United States Patent Application Publication US 2014/0057251 A1 - sequence listing, part 7

SEQ ID NO: 13934 - DNA, 8394 bp, Cannabis sativa
ggataacttaccgcctcagggccaaggaaccccatggctagaagaactaggtcagcctcaatgatttcctctgatccctctatctcattgaactggaattttccagaagcatctttctcccaacgtacacgtaccacttcaagtcctttaacaactccattctcatcaccgatgaatcgcttggttaatacctcgtaagatcttgggtcttttccgaacttggtggaagcttcttggtgaccataatctacacggaagatacgaggccactgcgaattgcaatattggagatacaaatataagtaccgaagaaatctaatgaaaatggaatagcataatgcaaataggattaaaatacaaaaagagcagtttattacctgtggccagggattgcctggagccctggttaccggtggctcgggaagaagctctaaattcacaatgctagtgcagccatgacggatggatgttcctatgcaatcagtaccagtgtcacctccaccaattaccactattttcttgcctttggcagaaatgtatttaccatcttcaagattgctatcaagcaagctcttagtgtttgcatgaagaaattccatggcgaaatggactcctgataactcccgtcccggaacaggaaggtctctgcagccaaaataaaatgaattagtttgctaattaagctaaactagtcgatgtgtactgcttagagctgtagtgtacagatatgaccaactatcaaattaccttggctttgtggatcctactgccaaaatgatggcatcattctcctctctgagaaggtcaagtgaatataatggatcatttccaacattagcattaactacgaagttgacaccctccttggtcataaggttgacccgtcgctgaaccacatctattttgtctgtcttcatattcggaactccatacatcataagacccccaatcctgtctgcacgttcgtaaacagttacagtgtggccaattcgattgagttgatcagcagcagctagaccagcaggaccgcctccaacaatagctacccttttcctgcaacattaaaacaatgaatccccatttaatgtttggattgaaaaatgttatatagcgtcttgaaattaaaattaagatattactattaacctaatccaccaaaatatcagtgttaagaaaaatgcatacccggatcttttgacaggcggccttggaaccatccaaccttcctcaaaggccttgtcaatgatggcacattcaatacttttgatggatacaggattctcaatgataccaagaacgcatgatccttcacacggtgcaggacatactctgccagtaaactcggggaaattgttagtttcaaggagccgatctaatgcttcacgccacctattttggtatactaactcattaaactcaggtattttgtttccaagaggacatccggagttttcctgcaaattcaatgaacataatttctcaagagattagttcaacaatctttagaaaagacaagcaactatgtttggaagataagactgaagagagcaaggagaaaattttgcttacttgatggcagaaaggagtaccacagtccatacacctggcagactgagtttctaaaagagggcctggttttgattccaccatcacttcattccagtcattcatcctaacagttggatccctgtatttaacaccctcacgttcatatgagataaaaccacgatgtttcacagcattatcaacctggctaggcctctttgatgaatcagcttcttcaactttctgcaaattgcaaaactcaagttacaccaacaatattataacagcaacctaagtgaagggataaaaagatactgcagttgcttcatacctgaattgattttccatttaaagatgcagatgccatcttctttagctcttcaaaagcatcttttttcattaattcagtctcatcatgttgctcctcgtcatctttagcaactacctccacgtccacctttaaggcctccccagcattcatctttgcaagaacacgtttgtattcccggggaataaccttgacaaacataggtaggagattctctaggtcgcctagtacatctctggctaaatcactatttgtgtaacgtagatgctgctgtatcaacattctcagggtcatgacgtcctcctcttcttccactttatcaagatctacaagctctggattgcatctggatggaaattttccttccacatcaagaacataagcaacaccaccgctcatacctgctgcgaaatttctgccagttttgccaagaaccacaacagtgccacctgtcatatactcacaaccatgatcacccacaccttccacaacagccttggcccctgaattacggacacagaatctctctgctgccatcccattgaagtaagcctccccgcttgtagccccatatagagcaacattaccaataacaatattttcttttggatcaaagttgctttcccttggaggataaactacaactttaccacctgacaaacctttaccaacataatcattgctgtcaccctccagctccagcaggatgccagaacagaggaatgctccaaaactttgacctgcgctgccactgagtttgatgtggatagtatctgcaggaagccctacattgtggtaacgcttggtcacttcatggctaagcattgttcccacagcacgattcacgttacatatctgagtgtcaatgtaaacaggaagagccttttctaaagctgatttggaaagagtaatcagtttgttgtccaacgccatgtccaatccatggtcctgtttctggacacagtactgggcagcaccaggtcgaatatcagcagcaggtctaagcaatagagaaagatcaatgttatccagcttctcattgtttctggtcacttctttatcaacttcaagcatatctgcacgaccaaccatctcattcaatgttcgaaaccctagctctgacattatttctcttacctcctctgctagcataaagaaaaagttgatgacatgttctggttctccagcaaatttctcccgaagaactggatcctgagtagcaattccgacaggacaagtattcttatggcactttcgcatcatgatgcagcctagtgttatgagaggtgcagtgctaaaaccaaactcttcggcaccaagaagtgcggctatggccacatctcttcccgtttttagctggccatcagtttggagaactgtgcgaccacgaagatcatttgcaactaaggtctggtgggtctcagctaaaccaagttcccatggaagaccagcattcttgataccagtccatctagatgctcctgtgcctccatcatgaccagatatcaggacatgatcagcatggcccttaacaactccactggcaactaccccaacaccggcctcagatactaacttgacactaattcgagcacttggattggcattctgaaaatcaagtagattcaaataaaatcagcattttaaacattgagaaatcaaacaataaaagactggatcataaaagatgataacaaagttccacaaattaaaagataaaaaacatgaaaacgcaccttaagatcatgaatcaactgggcaaggtcttcaatagaatagatgtcatgatggggaggtgggctaataagtcccaccccggcagtagaattcctggtgacagcaatgtctcctataaccttgtgaccaggaagttcacctccttccccaggcttggctccctgttaaaacagaaacaagtcaatatgcaagcaattcatagagagtaaaaacttcgttttaatacttaacctcaccaaattccaaaggtaggtatcaattaaagatgcaaaggcacccagaggtgctttgcggacacagcaacatctgccatgaacatagacattaacaaaaagaacctctgctccaataggaatacagagtcgggaaaataacataggaaaagaaaatcaaccatagacagaccttgaagcttggagttaaaatgtaaataattacctgagccatttttatctgcagttcatcggcatttgtaagatagtagcttgaaacaccaaacctcccactagcaacttgtttgattgcactcctctttggattcctagaaccatcctgaagaggctccatgcgagagggttgctcacctccctcacctgcaataagatttggtttcaactgctcagtccaaaaacaaaacacttgcaatcttgtcataatattttaccaaacaataactgcaattaaaaatgctaaaaaaaaaaaagaaaaaatctttttgaatcaaaactggttattacattttcaccatacagctaacagaatagtgcaagtaaaaaacctgtatttgattttcctccaattttgttcatagcaatagccagtgtcgagtgtgcttccaatgatatagatccataactcattgccccagtgcagaatcttttaacaatctcactggcaggctccacttcttccaagggtactttcacatctgactctttaaatttcaaaataccccgcaaattgcaagccttattcaattcctgaatgagcttcgagtattctttatacgcggcaacactattcgttctggcagcctcttgaagctttgctatagcaagagggtcattaagatgaacctcaccacctttcctccagtgataatctccaggatttggcagggcaacagattcagcacttccacgaggatatggtcgagatgggaatgctaaatcatgcagatgaagtgcatcacctgcaagcatctcaaatgttgcaccttccactctacttggagttcctgcaaagcacctctcaatcacttctgatgaaagacccagagcctcaaatatttgagcacccttgtaagaagccaatgttgatattcccatcttagcaagaaccttcatcattccataagtgcttgctttgtagtacttcttcaccaactcctccttagagcgaatctctccattagcttttggcgggattttcccatcaacctgcaacctccagatggcctctactgccaaatatgggcagatagcatcagcaccaaatccaattaatgtacagaaatgatggacttcacgtggctcagcagattcaattatcaacccaacttgagtgcgttcaaggtttttaactagatgctgatgaactgcaccaacagccaagagggagctcaccgatacccgcttctttgagaatgctacatttgaaaatatatagcggaattagaaagaccagaacacatcacaaattgttgtcaacagtcaaatgcaactcaattagaacttagaaaagaattgttttaaaagtatcaaacctctgtcagaaagtactattgtagtatatccttctttaattgcatcatgggcttcagtgcaaatcctgtctaaagtttcttccaatccctttctaccacggttctttgaaaaagtaatgtcaataactttgcttttccaacctctgtaattcatcttcttaatcgcttccatttcttcaacggttataagaggagctttaagggagaggcgatggcactgttcttcagtcatttcagtgaggtcaccttcaggaccaatcatacattccatggatgtgactatcttctcacgaatgggatcaattggagggtttgttacttgagcaaacatttgtttaaaatactcaaatgttagtttttctctgttagacatgacagccaatggagtatcgtttcccattgatccaagggcctctacaccatctttggccataggaagcaacaacatttcaagggcttcaatagtgtagctgcaaaatgatccaagagttattaaacaaattcttccaaggaaaaatacgaagtaaaaatatcaacaaattaaaaataggtggcacagaaattttgtatacccaaaagctttcaatggagaaagaagaccttggatgcccatgttctgcatgttgtcatcatcagtagatgcctaaaaattagaaaaagattagtccaatcatacttcacaagaaaagaaatgcatatctttcaggaacatttgtatcacacttactgcaaccactccagctatggctggaggaaccctatcagattcctgaacagaatcaacaatgtccttaagctcaatcttttgtctcttaagccattcgccgtaaggccttgccattgaatactgctgctttaaggcgtcatcatctaccacggtatgattttcaaaatctactaaaagcatcattccagggttgagccttcctttcctgctcacatcttcgggtggaatatcaactacaccaacttcactggccattataacacgtccactgtgagtgatatagaatcgaccaggtcggagtccatttcgatccagcgtggctcccaagtatcgaccatcagtaactgcagaaactttcatcatcagtacaatagccacaaactagaagtaataaagaatatcgtcaaatgtaaggcttaaaaacctaataaacattacatgagataagagccggtccatcccatggctccatcagagctgaaaaatactcatacaaatccttcctttcaggatccatattcttatcattttgccatgcttcaggaatcatcatcattatagcttctggaagacttctgccagctcgaatcaggagttcaagaacaccatcaaatgcacctgcatatgaaatcaacccaatgtcagttttcaataaaagaaatgagcttaattgcaggacatgtatgcatccctgtatacatgtgcaaacaaaaaatttataaaaaggtcacctgaatctgatgaactagaatcaacaatgggtagaagttttttcagctcattctttgacaaaccaagttccttgcatttcaataatccttcacgtgctttcatcctggagaaataacaggtagcgtaaattaataacatagatcactctttctttaattattttctagtgttgcactaattaaaaatttggatgcactgtactatataaatgcattaaaagaacacaccagtttacatttcctctgagtgtgttgatttcaccattgtgacccacaacacgcataggttgagcacgatcccagctaggaaaagtatttgttgagaatcgagaatgaatctgcaccaatggccaaaacaaccaagactttcattaacaatgtgaagaattaattctattcaaaaaaatgataactgatcaagaaatcacatgcacaaaattgtgctaaggccaccttagtagtggcagtagtacaaatctatgggaatcctaaactgtacttgaaccaacacaatttccttactgtctcttaaataaaattcatcctcaacaacttatcacagagaggactgggcaagtttctgcaaacatgatttacttgataatgaggattgttaccaactcacccatgcatccaatccagcatcaaaattcaattagtaatcaagggagtggaagaacttaagagatcattcaaacctcaatgcctcagaagtcattcctcaaccttgcatctcttcagttactggtggttcccaggctgtttgttggagtatgaagttagtggagaaagataagaagtgaatggataaaatatttaccagggccatgtagctcgtaaacctttcattgccaagatctgcataataataatccttcacttgaatgggcttcagctgacctttgtaaacaacagtcctgcagaagatgggtaaagcaattcatcatgatgcaaccgtgatgcttacaagcttccctagaacaaagatgaaagctactctctaataaaaacctcgaggaaagagaacatatgtaaaagtctttagcactgccatgttcaaggtttaatgcaactcgtatagcagccattgcaaccctccttaatatatacatctgcaaaatacatacacacaaacaataatcaggtacaaataaaacaaagtagtgcatactcgcaactgcaacctatcatttctcaggaatcgacctccaagataacacgcaccccataaatcaccctttactacccaataaacatccaagaaatatatatatatatatatatgaagatatattttacccataataagattaatctagatggtttacgcaccaaatgatgaatgcaagtaaagatcttttcttattctaaattaagttcataacgcatcaaagaagaacattacctggcgctccaggtcaacagtcgaactagcgctagggctaaggaacacttgctcaatcaccggttccgtcatcaaagcagagttgcccaagcctgaattatctgtaggcacaagccgccatccaagaacagaatgcccgagagactcagctaccta

SEQ ID NO: 13935 - DNA, 1340 bp, Cannabis sativa
ttatcaaaaggtataacatacttcatgtgttcggaaaacagttgtgaaagcatttagctccatccatcgaagtagcaactcttcacttctctgatatttgataaaaggaaagtttacagcacagtaccctccaatatcactgtggttgaaagcaaagccagaaatgccactgctgagaagaccaacaacagaactctttatcccatcattggtttgccagctcaccatctgatccccttcccaaaacagcatgctccattttggactatttctgaaaccagctctcatgaaaaagaccaaggcttcttccgggtcttctttctccttaccaacacgactacttttccattcttctacaaaatctctgtttatctgggcccagagttctggatatctgttatgagcagatattggatcttcccctgaaatgagtaacgattcttagtaccacgtttctctaggaattattgtacaaatcaaggaatataaatttgggttattggaatcaactttgtttaataagctcatagaaattgattccttagaggcttcaacagattagggaatgacctcacaggaagttatgggatcattttaatataacaatttaatagattaaaagttcaacctgaataaagggtgcaatcgaccggtaagccttcaccgaagtcggccatccatcctccaacaccatcatccaccatgtcttgtagaatatgcttgaaccaacttgccgtgtctggatgagtcaaatccaacattccaacatcaaaagctgtattagggaccatgtaaggttcaccatttttgtcttttacaagtatgtccaacttttttgcttcttcaaagaggtttctctttttgtttggcttgtcatgagtctgtgaattcaagtagaagctttgctcaacattataaactgttgaaaaattccaataacatatagatattgcttaacccagccaacacttcttgaaaatgaaaaaggcccattgttagtatcagctttctttttactataggtcatgagtttacccctcgtatatttacgcaacaaagtcttcatagcaaccagttataaatttaaatttgtggacaagtaataaaataaaaaatcaggatagaagaatgataccggcgctagacaagggttgcagtatgtcatcacttttatgtgcttcgcactaagatcattgagtagttcttgccatccagagtaccttgttgcatccacttcccagttccaccatagttgggatccaatgattgtttccctttgtcccacccaatcctgagtattagtagtatagggtaagatccattcacatagaaatattaat

SEQ ID NO: 13936 - DNA, 2486 bp, Cannabis sativa
aaaaaaaaaaaaaactcttgtcctctaagtttattaccacttttgggccttttttttttcttactactcaatgaaacttagatcaaaataaagttgttaattgatcaaaataactcagcaatttaagtattcaaatgttgaaacctcttttactagctcaaagaaattgttgtagcgtgatcaaccatgaaggtcaatgataatttttattaatcacatcgataaaaattattgaatttggatattattatctcaaaaattactcaaatgatatggcatgagataaattgacacatcacaaaaaagtagacagctagtcagtaaataataagtaaggaagactgagagtcggatgcattagccggaagataatgaaatataacactatattaaaattgttgaatcaggtaggaaaggttctagagtgttcagctggccaatcacccaaccaattgtgtagattgtctgactagtggtgcctaactaacatggagcagcataattctttccaagagttttatatgaagataatctaatcagatcaaccgaccagtaagtttgacttattttaaatccacgaaaatagcccctaaattcctaaaaaaaaggtcattatggatgcctaaaatcgtagaattgagagaataatcatttaatgaatatatattttataatgaatgtcatttatttacttataaccttataaatagtggctcatttcattgtttggagatcttaattcatattttctaaaagaacacctaaaatatcttattgtaattcttaagggatattcaagaaattctctttgactctgattcaattgattgttattccacaagtaatactaaaaatagaaagttattaccaaataatttggagccgaattactttaaatttaaatttatgatgtcgtttcttgccttttgtcttattttattaactcataatatattgtcgtattttttattttgtgtcgttgataaaaaattaagttaataaatatctattttagttccctggtcagctaatgagacacacttgattctgatcaatttaattaattttgtagatgtatacaagggaaatgagataaggagggaatgcattacaacataaaaaattattccaaagtggctttcacttagtgacattatttccatctctttccatgtatgtaatatttttgagtcaaaagctacaaaaccgaccattaaacaaaattcacaattaataatctatgtaactcagctaccaccaccagctttcgttaaagttgaaatccaccatggccctatgatcagacgaagagtttgatattaaataattacaaatattaattaaacaatgaaaaccccaccaccttgatgattaatattattaaaaggattaggtggttactggttacttagtcttacattttagtgctttagtagatatatgaccttttgacgtctatacactggttaatttagaaatttcatgtaaccttcatctctgttcacatttgtgacactaaataaatacctccgcccatttaataaataaactttcttttttctcttttttattttctttcctttatttctgtaatatgtaccataaatcattccacaatggccactttatgccttgtttttttgaccaataaatgcatctaatactttactatagaagcctttgttgaacattttcttagtaacacataatatctatctgctccataatcttcatcttaattagtagtggaaaaatctatctagaaaacttttaagaaatttcaaatcatttggaggttgctttgggatcaaagaaagatgctaagatcaaccttaaccatttttttttttatatatttttagattatcaaaatttattttttaatttatatcaaatttttagattatatcatcatcaatttttttaaaatattttatttattttaaatatataatattaaactataaatacatacacattatacatttcattcaaaaaaaaaaaaaatatatctatatatataaagaaattaagaataatgaatagtagtctgtctctatttacattaattagtgatgagaaacttgtacactcatgaccagtaggagaaagtggacaatcgcattttgacaaagaccggtttcaaaatcttccaaagaaaaaaaacaacgctattctaacccaaaaaaaaaaatacttaagtagcaaaatttttgtctttaaaataactgatacttataattcttaaagttcctcgtatgttttttttttatttattttatataaagccaagtctttgattaagggaaaatttttattaaaggattctccgagtctttccattggaaattttttatttaactaactccactgcccactagctgcaatgaagcaatttttttttaactttggttttgaatttatttaaaattaaatctttgcttctgtacaagttttcttctccagtggttcatcaatgtttcgaa

SEQ ID NO: 13937 - DNA, 5716 bp, Cannabis sativa
  modified_base (48)..(67): a, c, t, g, unknown or other
  modified_base (478)..(479): a, c, t, g, unknown or other
  modified_base (710)..(715): a, c, t, g, unknown or other
gccaaacaagtcaaattgtttttaaaaacaattttctgtttttaaaannnnnnnnnnnnnnnnnnnntatgatgccaaacatgcactaagtctccaataacaatgctcaaactgaaattgatatttcatcttttaaattgataatataagtttttttttttggaaagataaacatttttaatttaaactcctctcattcaaaaaaatactaatttgctttctagaagaaaactttacactcaacaactcaattaagggccaggtgtcaagtgtgcaatagtagtaaaaagcaatgttacttttgaaaatttatttattttaatttttataaatggatatatgttaatggtatatgagttggataattaataattgtttattaataggaggagatgacgtactataatgggctcattcccaacaaaactccaaaatataattttacccgcatccaaattctttattattattattattnntattattattattattttaaattaaaattaaaaatccttcaaaaaaaaaaaattaaaattaaaaattaaattaaatatttacaggagtgaaaaagaaagagatcgggaggtgtttgatttcaaacagaagagaagaacagcaagcccccattaggatattcatatgcaaaattatatctataaatatctaaacatagatagatagagaaagttagagagagagagagagannnnnnaagaaagaaagaaagaaaagagagtatttttggttcgtttttgtgtgaatcgtttttctaattttctcatcttctttcattgaatttctccgcattgatgcgtttcgcttcttgatctcgttctcgatctgcctccgtcactccgatctgaattatcaccggtatgtttatctcttacgtcgttagatctttctttttttttttctttgtgtttttttgatctttatgtatcgaaattcagattcatatatgcgaaaattaaaaagattcgaaaactaattggataatgtaataaattgttagatcgtgtttgattcggtgcacaatgacggctgatgttcatgaatctgtggtcgttaatggcggtgaggcggtgattcaggaacagtctgatcgggatcttagccctacttgtactgttacttctattactcacgatcctgtcaatgctaaggacgatttcgacggttcgtacgtttttgtttcagatacggacgacagggataaggatctcgttgactctgatctcaataatggggaaactcttcacttgcctgttgaaaataatgagagtcttcaattggaagagggcgaggttgtagtagtcattgaacaatcagatcacaatggtgtcaatgatgataaggtcgagggagaaggagaaaaacatgacagtaatggtgaatgtcaaacagagaaggagtcgattgccgttgaccaatctgagcaaccagctgacaatggcgtggtggaggctgttgaattcagtaatgatttatcgacctctgaccataaaactgaggccgagacgattttagttgaccaatctgagcaaccacctcataatggtgaggtagaggccactactgaccatgaagctgagaaagaggcagttcacattgatcaatctgagcaaccggctcacagtggcgatgtggaagctgttgaaatcagtcgtgacttgtctactcctgaccttaaaactgagagtgagacggtcgccattgaccaatctgagtatccggctcacagtggagatggggaggttgttgaaatcagtggtgacttgtcgactgctgatcgtaaaattgagaacgagatagtcacagatcaatctgaacaatcagctcacaatggcgatgcggaggctgttgaaattagtggtcaatcgtcgactcctgaccataaaattgagaacgactcaattgtcattgatcaatctgaacaacctgctcacaatggcgatgtcgaggatgttcaaatcagttgtgatttgccttctgctgaccatataaccgagaatgagacagtagccattgaccaatctgagcaaccagctcacaatgccgagttggaagctgttgaaatcagtagtgatttgtctactgctgaccatgaaactgataatgggacagaagtcatcgtccaatctgagccaccagctcacattgttgaggtggaggttgaggaagacgcaagagctgaagatgttcgtggtagtttgactactgagagtgagatggtagccgttgacttccctgagcaatcaacttacaatggcgaggtggaggctgttaatgatgacaaggttcaggataaatcagatttggctggagatgaaaaagaaaatctggagtctgacactggagttacagatgctcaaagtcctgcacatcaggaagaggagaaggaacaagttgagccttccaatgagattccttctgaagattcacctgggagttcaacaaatgatttggagcaggatcccacagcaactccatgtgttgaagccgaaatcaaggatttgtctatctccaatgaaagctgtgatgttgtacctgctgctggtcatgaacagaattgcatttcagaagatgttgtccatgaaaacccagctgaagaaaatgggccttcagctctcgataatgagaaaccattgagcgtctctgaagaggttcctgtggaaggctcccaagcggacaatgaagtgcatttagatcgtactttggaaacaccttcatgttctgaggctgatcaaacgacagaaacagaacctaatgaaggtcctttatctgaaaataaaggagagggctcgcctgctggtcttgaggagagcatttcagagaccgttgttattacagacttggttgatgcttgtcaaaatacacctgtacaaactgacgagtctgttgaaaatgctgaaagcttgacatcttcttatgattgctccaatgcacttgtaagtggtgaaatcgctcccgatgccatagcagagaattctgacgttgacaatgaagcttctttgcctgctggtgatcattcaacttgtgatgttgaagatgtgagatcagagactgatactggaaagtcaaatcaggaaagcattgagattaatccaagctctcctgctaatgaagtgagtttccagcctgagaattcttccaatgtcgaagagattgtagaatctgaaaattcagacaggatccctgaacgtgctggcagccagtctatttcttgggccgaatcagttgatgatgatagcagtttgccagtggttgttgctgctgatgtgaagcctgaggctgaagttgagaacgcatctgctgtaagcgagagagatatgtccggtgttgatgttgctgttttagaaggcaaggatagtgaaagtggagtagatagtaatcatattccggagcatgtaggcaacgatgtggaatcaacatgtgaagaagttgcaagtattgatagaaatcagaaggatgaagcctctacatcattgccagaagattcttcagaaggacaaaatgttgaagttgaggtggtgaaaaaaccattctattacatgataagagttcccagatttgacgatggagacttgagagaacagattaatgatgctcagttacaagttgaagaaaggactaaaagtagggattcatttcgtgctcatattcagacgaaaagggtgagaatttgtgctaattaccgctatcatatttgattctatgattattatctctcttaataattgttgtgattcttttaatggtcaggctgctcttaaggatttctctgataaagttcaagctctcttaaaggaggagagagccgcaagagacttgtttaagtccaaacgacaggaaatggattctgctgtctcagagattaacaaagtgaagaatgcattatctgttggggatattgatggcagggtacacattttcatctctgtttctatcatagatattgcttgattttcttatttgatttcaattttgtgaagtttacactcgttcatatcttcaataaattgttgctcattaacagatacgcagtatggaacacatgattgaacatgaaaccctgcctttgaaagaagagaaacagtacattcgagaaattaagcaattaaagcaacatcgtgaacagctctcttccagcatgggtacacaggatgaaattaaacagactttagaccagaaagacaaaattgaagagcgcttgaaggtactgtttcccactaaatcttgattttctgtacataattagctagtgagaagtactgagatgcccacttgatttcttaggtaatgtttaaggctacagcggcaagtcacatgtctttagggcatatttgaatcaaagttattgtcttaggtgaaatgtttaatttatataagcttttggtaattgtaggttttgaggaaagagttggatttactcagagacaagcttaataaagctgaggaagccactcaaattgctaagaagagttttaaggatgaaaatgagaagttgaacagcattctatcccaatacagagctgccgatgatgttcgtcaagatgcttatgcgcatttacagagtttgaggaaacagcaatatgaaaaggtacttttatttattttgagtcagttcttttctctttctatcttttttttcactagctgaatctttatgaaattatgtgcacacaattattttcattaatctaatggaggtaagagcaatgtggttgatactttttattttgatttgatttgcagaacaagaatttttggaggtacaaggatgatgcaaaggtggctctaaatttatcattaaatggagataaggagcaattgcagcgtctttgcctcgatcaggtgatttcatcgaatcatttcaaacttttcgttattttctcttaacaaaaactgaagatctgattatctcattagccaacccaattatttgtctgtgatttatacaggtcgagagaactatggaactctggaacaacaacgatgctttcaggagagaatacattaaatggaataccaggagtacaatcaggcggctgagaacattagatggtcgcgcgctcggccctgatgaggaaccacccgtaatgcctgaaattgtaaacaacagagtgaacaaggataaccatgtgaaagtggcttccgttccagacgtaaaacaagattttcctgtaaaagttgagaaaccagatcataaatcagttgcaaaggttgtggaaagagaggatcgaacagctaaaaccaaggctgctgcgaaatctgctatttcttcagggattagtcctgttaccatttcagatgaaacaaaagagaaagagaaagagaaagagaaggtgaaagaagaagagcttcgacgaagcaaagaggaagaggagctggctagaaaggctgatgagttggccagaaaggcagaggaattgagaaaagaagaagcagcagctaagttaaagcagctgcgtaagttggaagagaaggctaaagctaaggaagcaatggacaggaaaaagaaaatggctgagaaagctcgagttcgggctgaaattagagcacagaaggaagctgaggaaaaagagaaggtacatatattgtagtacaattttcatttataagggaataaaatgtatgttgcatttacaggcggagttaattctggttattattctcattgttgaactgtatgattctttgcaggaaagag

SEQ ID NO: 13938 - DNA, 3120 bp, Cannabis sativa
ttttatttaaagaaaaataaatttacgtttttaattttaaaaacaaaaaactgattaaaaaagtgttagcaaacgccactttatttatttattttgatgaacaatctcaagcattaattaatgaattatcaaaacaagcctaaagaccattgtagaacacgtaacaacctctattaaaaataactcgttagttttaccagcttacattttttagacttgttcttttttttttcttttatttaaagaaaaaaagagtttatcagttgtgcataagagatctaagatttatttgctagtttcaatattattggatttcgtagctttcatttatattctgtaacgaaaatagaatatggaagcccagctggaaaagtaccccaaaagttcaaacgaaaaaaagattgaaattaaacacattttaaaccttgcaatcttgattgaatggctgaccattttctgtattatcaacagcaatcaatccacaaaaaactataaattaataatgtcataaaagtagcttttgttatttggtttggttttcctttttacgaaaataacatagacgtatatgttcaagctacttgacgaaatcacaccccttaccattattgttttctttgtctttgatggggaatatgcattaatcaggccacccacgtatgaaatatgttccgattcttgcgtaaaaaataatatttactagtacttaatcaatttctgaggttaattttccaccagtattactatcatatacgaaatatcttcaccctcatcctcctagtatataatcagatcacactttcgattctcaacaccacattcccaactccaaaactcaccaaaaaaaaaaaaaaaaagaaagaaagagaaaatgggaagcccttctcaatttgtgtcagctttagtattattgatcgtcacaatcgtcatttcactccaaactgggccagccagggctttgacactgagtacaaaatcgaggtggattgtgaacgagagtgggcatagagtgaagctggcctgcgtgaattgggcttctcatcttgatgcggtggtgcccgaaggccttagcaagcagcccatcgaagcaattgcagcccaaatctcatcattgggttataactgcgttcatctcaattggcctacctacttggtcaccaacgacgctcttgcctccctaaccgtccgagactccttcaaaagtcttggcctcacccaagccattgctggggtagaggccaataacccctccataatcgattcttcactgtttgaagctttcaaggtgataatatactacgctcacatattaaatttttatattgcaccagctgcttgcttaattaacaagtgtttttcaggctgtggtatctgctcttggagacaagaatgttatggtgattctggataatcacgtaagcaaacccagttggtgttgcagtgattcagatgggaatggattttttggggacatatacttcgaccctaacgtctggattaagggccttactcgtatggccatattgttcaaaggtgtcagcaatgtcgtcgggataagcttgaggaacgagctccgtggccccaagcagaacgtagatgattggttcaagtacgtacatgatcacttgcattaatttatttccatcaacaaaactcattacttatattttgcttcgtaatatatatatatatgtgtgtgtgtgtgtaggtacatgcaaaaaggagctgaagcagttcactcggcaaatccagatcttctggtgattctctccggtttgggttatgatcatgatttttcgttcctgcaaaatcgccaggttaagctcacgttttctggaaaacttgtatttgaagttcattggtacgcattcttcgatgggaaggcatgggaaagtggtaatgtgaaccaagtgtgtaaaactgttgtccaaaacatgaagggaatatcattgttcttgttggatcaagggtttcctatattcgtgagtgagtttggtgtagaccaaaggggtatcaatgagaatgacaataggtacctgaattgcttcttagccacagcagctcaactcgacttcgattggggtcaatggacagtcgttgggagttactattacagagaaggcgttgttgggatgagcgagtattatggagttttgaatgatgattggagcggtgctcgaaattcaagtctcgtacagaagatctcttctatacaatatccttttcaaggtaattatgtaccacgactcttgacccctagcaatgttaattaattgaatcaattaatgatgaaatttgcattgcatgcaggtccaggtttatcagaagttagaaaacacaaagttatattccatccagcaacagggctatgtgttgtaaagaaatctttgcttgagccactaacactaggcccttgctctgcctctgattattggtaccattcacatgagaagaaattgacaataaaaggggcattttgcttacaagcagttgaattaggcaaacggacacaacttagtatacagtgcactgattctgattcaagatgggaacccacctcggattctaggttgcaactctctactaagacgagcagcggtgatagcgtttgcctagaggtcgattcttccaaaaatatcatcacaaacacttgtaaatgcttgaggggtaaacattcgtgtgacccttcaacccaatggttcatacttgttgacagcaccaggaaaccaaggttaatatagtcttttcctaagatgagaggccacgttacttgatcatttcagttttcgattgtgggattcttacaaaatatctcaaatactaagtgagatttgcaaagaaattaaataagagttacattatattatatctgattgaaagatatttcatttgaaagtgttcttttttaattttttttttaaagaacaagatatcgaagtgttactttatttattattattatttttttgtaagaatgtcgaagtgttattaaattactcttgttattatataactaggcaacgataccgcgctttgcgcggttgtttagaaactttttatttatgaaaaataattttaataggttaaatattaagtcacattatttaattgaaggctaat

SEQ ID NO: 13939 - DNA, 2650 bp, Cannabis sativa
tttttcaacaatatgttctagttattaattaatgttaattaccaaacaaataatatcaacatcttgttatgttgtcattcatagttaaattcctattaaactcattgtggacaacagaaatctaacaattagatattgcgttttaaaaataatttatgtatatgaaaccttaagatgatttgaaaaagggtccgattatctaggtgatattgcgtgaagaaatggacactgtggtgtaggttgttgaggatgtcaagtaatgtaatgttgttatctaatggattatgtgtcacaatgcatttggatcttctgggttttggtgggacataaattattggacaccatatccatttgatttcttaattttattttggttgactttatcctgcagccggttagctggttcatctagccgtaattatattttctacattaaataatcaaagaaaatttaaaaaaaaaaaaagaaaagaaaagaaaagaaaagagtgcttctaatatataaatatatatatatattttaaatgctcataataattcattaaaccttaggataatattctatttacaccaagagtagcgttaataacgtggataccaatatttgacatgaagcaagaaagatgacatctaagaattgagtagtcccaagtcatagcaggtcgaccttggaggggtccctagccttgtgcccaggttgactttgagaactctagaatagaagtttggacttcaataacttgaatccaactacatatctttcaatattctgtataatgaagacatggagcaacctaatcgaggtcctgagagctgaaattacacgaacctgcaagcccaaagccaaccagggcacctagggtttcacctgaagcccaagttgatattcccaactactgtttcagtttctacaaccgtcttagtgcaaaacagtcaaaacttatattggaacatcaactagacataccacagacatatttgaggcatcaaaatcagagcaaatttatttttcagcactctgggccccaagcacccagtgcccaatttgacaagctgtcaatctgagcgccttccaagtataagattaacaatccaaattttgcatcttcttcgtcttcatcaaaaatgaggaaatcggtcctttcaaagaagaaacaacactttttgggtgccaaagacgaggcctagtgcccaggttgacattttgtcaacctgggccattttcaattgagtccaagaacacttatgaacatcttcttcgttttcaaaaaatattgaggttcaaatatttttggggaccaaacggaatttccgaatgggcaaaattgggacccagtgcccaggttgacaatatttccgatcaaattcaccgaaaagtgttctggacattttttctatcataaaaaataatgaagattcaagcaaactcagggagaaaaccacaaacctgaaccccaagaaacaaggcctagcacccatgttgatctagtgttgggctcagcgcccaagttgagaatcaacttggaacgctgccttcaattgctcaaatgccaaatctgattcgaacaatgaatctaaaatggtcaaaaacagggcaagagatgtctttctcaagttcaagaaccttagaagtatcaaaaagagattctgagagctcactaaagagtacctagtgcccaagttgataaatggcctagtgcgatgggttctgattatccgatactaattctatttcgaccgtccatctagtttttcacaattactaagacccatataaacttagagaagtcaaattcacaactttgcatttctgatttccaacatgggaaactcactcgaaaatgaagattttcgagtctctcatttccgcagaacagctacatctctgacaactaatgactagctttgccagaacataaaaactgattaggtgatgtcaaaatatcacttaggcataccaaagtacatcccttggacgttttttcacttacccaacgtccaggttgacatcatatgtcatcctgggcgcggggatgtcaacctaggcgctggatgtaaacttgggtgctaggtcatgaactaccttcagtaaaacaaccataactcactaaatattgatctgattcaattcaacttgcgttttgaagctaattcaatgctctataagtcatatctcaaagttcaatcctaattttgaagctatcggcataaaattttacaaccaagggagttacaaaaataaccttcaggttacccacagcgggacccgttaggctagaaaaatggctatcaccaccaagagctaattttcactgttagatcatcatcaactgtccaaaacatccaaattttatctttcctatttttatgggcctctttcacctataaaaatagagatcccttagctcacttttcatattcagaaaactactcacaaggtcagagcatctctctctaaaaattagagcttaatcacttagcctttttctataatttttgtgagaaataaaaatttgaaatagacgtagccctattaccatcatgatatggggagtgaacttctataaattttgtatgtctttctaaattatttagttaaacttctttctcgtctcgtcaatctagcaagctaatattggctacttttcag

SEQ ID NO: 13940 - DNA, 7238 bp, Cannabis sativa
tctttctctctacatttctttctcaggtttcttgtcagtcatcttttctgtgatttgggtttcgggagtttgttgagccaaacgtggagtggaacctcaccctaatcctcccctttaagcaattctactgttagggtttccttagattccccactaatcttagattccaatcaattcgtctccaattttcatcgatctttacccgcctacgcctcctgatctactacgtccgatcaaaccccttccggctaatatgctggaaattgctcgaagaaatttcagtttctctattctgtggtccaatttgttcccgattatttgttctaggtatcactttctgcaaattttaggttttctttattgatcgtgtgatttgtcaataattaaggcacagatagtattagggttgttgtagctgatttttgtcgtttgtatgtaaatattggggaaattataatttttttccctgatttttaatttggttcgaagttgagaatatgtatattgaagaattgaagggaggaggggaagtagaaagtagggaggaggagaatttttctggtgattatggaagccggaggattgatattgctgataccaaaagggttttggtcggggcaggggctcgtgctctattttacccaactctgctttacaatgttgttaggaataagttccaggccgaatttcgctggtgggacagggttgacgaggtataatttttcttagatttcttttactagtttttgcatttattctaacatggtatcttttttagatttttctcatatgcgtttcatttgcttataattgaagatcatcactaatggaaagttaccgttgatctatgcatgcagtttattattttgattttgagcgtgattgataatcgtaccctttgttattttgttaggcattgaaagtaacgaatcatggttttgcatgtccagtccattgttcagagtactttgttattatttctttttcctggttctgttagttgatctatgctaaggaactcatgcttttatttttattatctcttatctatgtgttagtggaataagtcattataaattaggtctgaagaactgatacgatattgtttttcaaaaaaataaaaatgaaaaattgcagcttcacgagatttttgtggttaatcacttgtgcttatttggtttttattttcagtttatattgttaggtgccgttccatttcctactcatgttccctgcctgaagaagcttggagttcatggagttgttacgcttaatgaaccatatgagaccttggttcccacttccctatatcatgtgagtatttttctagccacattggagtttaatgtgacaaaaaagtcatgattttcttggttttttgttcgggttatgtgttgctaaactctatttctgatctgctatgtagcttcacggcattgaccatttggttattccaacaagagactactgtttcgcaccatcactaagtgatatataccatgctgtaaactttattcacggtcagtagttatttattttggcttctcagcatgcaaccacattgcgctactttggataaaaagtccatgcttcatcagtttttgttttgttatatcccctcccccaatgacaagaagtctaaaatggtagtaagaactaacattcatgccatctggttttaatatattttgttagtggtcgtaggctgttggtactacattcctaagattgaatcccctcccccaattaccaaaaaaaaaaaaaaaaattgtcagcaagaagtctaaaatggtagcgctagtaagaactaacattcatttggtttgtgacaatttgtatgagtacttgtctgttaattaacgatttgagttggatttgacttaaaataactgaagaaaaggatcagtttcagggaaatgaacaattgtttgcattccaagtttattagtgtagcctacttatatcttttttcatatacagagatatccggtcatgttttgttgaatattttattcattctgtctactatgactttatgtaattgctttttagtcttatgtgtagtacattagtgccgggccattggttttttatgtcttgatatgtctagaagccaagttctgttgctttattatagatcaaacttttctagtaaacattatttactgttgatctgatttcatttacttgaaaagaaaatgcattacatgggcgcactacatatgttcactgtaaggctggtcggggacgcagcacgactgtcgttatttgttatctggtaagtgctgtgccacactctgcttatgattaatcggaccaacatattctccagtttttctgagcttattgtttatccagattcaacacaggcagatgacacctgactctgcctatgcttatatcaagtcgattcggcctagggtgcttttagccccttctcaaagaaaggtatacaaactgtcagtaatttatttatttcttagtcctttatatttcaatttattctatgtgaggctctgttcaaccacaaaaaaattacacattatatgtattgtccttagctttagattgtagccgtgtcactgtatgtctaagtattcattattagaatataatatgatgtttgtttgttgtaatccaggctgttcaggaatactattatttgaggatgaaaagtgctgttatctacaactacagccccatgaccaatcttataaagaaagctcccaagtctgcaacctctcaggacttggttgcatttgatgatggttctgtggtagtgataacaaaatcagatcttgatggctatgactcaagcattgatctcaaatcaacttctgtgggaaatgagatatgggcagatttcaatgtggtttgccgtgttcgagttgctgggcaggcagctctggcgagaatctcatgcctatggcttcgttgccatgcctatcagaataacacaagcgagaagcttcacacagagagaagctgctcaataaggactgaccatcttggaggtatcagtgtggacatccatgtatactgagaaaagctccctgtagtttgcatacatactgtcaagttttctgtcttttgcatgttttttcgtcgcacagaaaattgcatgtaatgatgtttcattaagggacaaccaaaagatgttgtttccatccctgtaaatgagttgttacattgagtctctggtatatatttgagcattatggttcgaccatgggaagggttctagttaaacgttttcggtacataaataaagtcttgaactcttgacatggtgttcaatgaatgtattttgtttttgtttctttacaatctcacaaatataaataataatggatttcctagtttacgtggttatagtttctaaatacaactaaaaaccattaggggcttcggctgaatcctctgtgaaccctagaagttcactgatgaagctctgtatcgatgggggccaattgtaagaagatgatccatctagggatgaaagactatccaccaattcttctggttctacttgctttctctcctcattgtttgtactatctataaggtaaggcacaatatgtattttcatatcgttgttggagattccaagatgacctcctgaaacgtttacatactttaccctcccagcttcatccaaagtcttcaaaccaatccagtcttccgtataaagctttgtctgcccagaaacaagtgtaacggttatgtttgttcatcgtattagaaactggccaaagaatatggtaacaatgggttaatacctgttgtggaggtaaaactggtttgaaggcaccttctgggtaatatccaaaccaggaagtctctctcggtatcaaaaccttgtcattctcaaactgttgatctcccaacaaaaattaaataaataaaaataaagaagaaactgtagcattaattgaaccttaaaatcaaaagtaagaagattccatttggcattttatgattagtaaatatggataacttaccatgataagcaccaagttttgcaagctactaaaacgtttcttgtaggtggaatttctatgtccaggaagttcattgttaagctttggaagatacttacaatgctctaaatattctggaatagcctgaaggttaatatgtttatttagattgatagatgttaaaaaaaatgttttgttgggaattaataaagccttttttgttttctttccagttcagtgttatgaaaggaaaacaactcacgtttggtaatttaagatagccactgggagccaaatgatcctgcatttgaacaaccaaaccttaaaatatcagtttgttataaacatcagaacaattgagagtgaacccaactgaaacaataaaggtatttgatagtcagaaacatacttgaacgtagtcgctgtagatctctgacttgatgagcgagtctgcaataatgcataaaacaccagactgaaaaggcacacacagtaattcaggtatgtcaactggtttagttttatttttaaacatgcaactctgacaaggtttactcaccgttcaagaagctaaactgagatcacttatagataagagtagaatgataatgtaaatatgtgttacatcataatacaaatgagcttaattggattattatagataaaaatagatagtgtggtcttaagagaaatataaattgcattacctccaactcattttaaagatcatgctctaaacttaaacgtattttattgctaaaagttgtatcaccatgaacccttaacaacactaataaacttaggaagagaggcaaaaaatgtgagcatgtaaggagcaaatgtaggaaagcaaaatgacacttacaccacaaagaggaacagaagctgtacccgcatggggtcctgctaaagagatgaaattctttacctgttacaagttgaaatagaagaacttaggaaagaccaactattaaaaaacaatttaagtgttaaatgtactgagataggtatacaatgatttgcagtaaagttattaatgataaccaataatagtattacttatgtaggaaaatattaaatttaatggatcttaccggcggtcctccatcgcaaaattccaaaacacctcgaccaatcagattaccctattgagcaaaacaaattttaatgaataattaagaactaattttagtttacaaggttaactggtgctcaagtttttaaaggttctcttgaaaacagtataggagttgtaataaatgtacaatgagaaactggatattagagtcaagaaacaatactataaaacaaaattagaaatatgataacaaaattagtgtcaaaatatgatcatgcatcttattgcaagacataacaactgaagtatgctctgctatatatttgtgtgaaactatagccttatagctcacctgtgagagaccaactatgttataaccctttctcagttcttgcatttccttaacctgtgcttatatttgccaacatgttagatttaagagaacttaaaagtcaatctaacaatttgatgaaagcaattcaagaagcttcaaccttcttgcacacgacttcggtctgcaaaacacattaagaaaaccctccaattacatgtggaaaagataaagtttgtaaggtttactacaagatagtcctagctttcgctctaacctgttcttcaagaggcagaaaccaagaatcccatgttccacttccaacttctctgtgagaaggaaaatgtataaagtagtgtcatgaaatgtatactgacataattaaaataaccagaactggaacatgtatgactcttttaagtttcttacttgattttttcacaaatcaattaaaggtatattatgttagtataatgagttattatatgacatcatgaacacaacatgtagccaaataaagagtaactgtaactgacataccaaaggtataaaatgcaaagttctcaaaaaaaaaaaaaaatatgataataatggtttgaatacagcattgtcatgttgtaatttattagcgtacatgcagaatcctttaacaccggagaattgaacaagttggtcggtgaattgtttaacacctcgattcgagcactgatctccaatgcctgcaaaggagaaatataagaaaaggtactttgatatatcaagtgtcaactggcagtctgtcatagaaacatttcttagagaacacataaaacgtaggtaaaatggtatcagattacttctttgattgaaatttagaaaaatggagaataaggtatcagaatcaatagagtttgagtgagataaatatagaaatttttccagccatttcatctcatatacattctagatttatctattttccaaagaaagagtaacaagttatgtaaagcacacaacacaatccttatgaagtcttaatttagcaaagaattttagagctcgaaaaaatgaaccagaaaaaaaaatcacactgaacccacttcatatttggctgccatagttgcatagataaagatcataaatgcatgacaaccgatttggaaatataattaaattaaggagattaaatgtgctccaataatataggggagagcaacagttacaaaacactaaaacatattttaacacaaaattcaaatacccaaaagcagaaactaaaatcccatatacaaaaacgtatgaaccattaaaaaaatgagattttttttcactgaaaagggcagataaaaacaaagccaaatagaagagaggaaaattaccatgaagtactataaagggcaacgaatgtgatattggagaaactataaaagccaagacgaagatgaaggtatgagatggccaagtaaaccccatgattctaacttaatttttttaggttccaagaagttttgaagggattaaatatatgatattcgaagtagcagattttgtgtggtagttgttgataggtgaagagagtgcattgaagacggagacaggtggtatgtatgtgataaatcaacacagtattgattatttgtcagctctgtatttgtctatcggtgaaatcaaaatcgtttctcgaagtcaccaatgaattgcagtgccagaattgttggaggcttggattctctgtgctgaagtttttgtttgttaaggtatggactacctttcactttttttttcttttatggaaaataagttcaactaccttttacttaggagctggtcctcaatatgggagaattttgtatgttgtggttgtttaagt

SEQ ID NO: 13941 - DNA, 3001 bp, Cannabis sativa
gtccttgtaaaccagacaactctagctttgctttgctttgctctctttcttctatatctctctctatctctttctcaccaaactctttctttctctcttgggttttctcttctcagttgaatatctatatcttctaaaaagatcatccatttgagtataaaaatcacttaattttcatattcaaagcattgttgtttaaccctttctctttttttttttccttttttccctcatcttagtaaaacctcctgtcttttctatctctttcttcttcttcgtgtgattcttcaaatcataagcatatagcatttattacaattctatttaaagactatttctatcatcaaacacaaaggaatatatattgcagtttaagatatggggtctctcgctctgcttctaggggattacatttattactattgttctgtgagcattaatatagaatgttggtaatcgagaggagtgagaaacaaagatatatttagagagagagagagagtgtgaaaaaaaaaaaagaaagtgaaggaatttaagtaaggcacgcttccacaactacttactctgctgtaatggagaggctccaaggacccatcaatccctgtgtatgttgctttgcttaatttgtacaactttcttttgtttttgttttctctttccctttttccttcaatcccatttcctagtatcaagaaatggattgattttacttctttaaatgcttgcattcaatgctatgtattgtttttttacttcaaacactcatacctgctgcactgttttcacctctataaacattctattctcattccatttttatgattattttctgttcatactgaacccaccctcgttctccactccactccatgacagttttctttattacttactccctctttaataaaataagaatttacccttttgtttttgttttttttttttttcattgtttacacttcttcttcatctaattttgatgttttctttttctttgtttctcagttttttggtgaacacatggatatggagtgtctagaacaaggactaaccaccacaagctcagggaatgagttgagattcgaggaagaagaaggttatgtgttatcacgaggtttggatgagagaatgccatttcttgaaatgttacaaagcgtggactctccatctttcttgcctttgaaagatccgagctttcaaactcttttgagactccaacacatgaaaaagccatgggaaccaaatacaaatggctgcagctaccactcttttttgcctcctcaattggacacacaacaccaaattcaggggttagagttggaaagctgtgtcacaaatgaaattgctgagctacattcacctattaaatccgaaaccaaagaccttcattaccaccattattcaactactgaacaacaacaagctggtgtgagctcagaatgcaaccaacaagaacgacaacccaataaaaaacttgcagaagaagaagaacaacaagaaaagacattattcaaacagacccaaaactccaaattccctccagtaacccgggaaaggagaaagcggaagagaacaagaccagccaagaacaaagaagaagttgaaagtcagaggatgacccatattgcagttgagcgtaaccgtagacgccaaatgaatgaccacctcaatgtcctcaggtcactcatgcccacctcctacattcaaagggtatgtatataaacattaacattaaccatttctcttttgttgtttatataatatatttaataattgttgaagggtgaccaagcgtccatagtaggaggagcaatagactttgtgaaagagctagaacaacttttccaatcacttgaagcccaaaaaaggattaggaaagaaagtaatactaatactaatagtaatactactaccactagtaacggcgttgaaaactctgttagttcatcctcatcttcttctactacttcaaataatgccgtaacaatgccgtcatcacatgggctgtacatgtcgctttcccagttcagaattgggcctcatgatcatcaagagaataataatagtcatagtaatattatgagtagtgtgggagacgaagtcagggctgagaataagtccgaagctgcggacatagtggtcactgtcatccaaacccatgtcaacttaaaaatccagtgcccgagaaggcctggccagctcttgaaagccattcttgcacttgaggaacttaggctagcaattttgcatctcaacataacttcttcacaagcaactgttctttactccttcaatctaaaggtattgtttttatatttctatatattaatttgttctattttgtacgtgtgtaataacctgtaacatatttataaaatattgatatttttattgcatggtgatataattataaatatattatatacagatagaagacgaatgtaagttaggatcagcagatgagattgctggagcagttcatcagattttcagattcattgatgccacttaagatccacagctagttagtttagaagaatggttagtgaaaaaaaaaatgtaatgaatttgattattattattattattggggtgttaatcaattatgacttatgagagaaattgggaaaattaataaatgtggtcctgccattaaacccccttaattagtcttaggctgtgacttatggtttcataagatggaaaaaaaaagaagggaaaataataatcaaaaatggtttctctagcttctattatttatataatgcattttcttaatttttatatatatattgatattggtgtgatttagggcccagaaacgtgggtgcctgagttgaagttgggttgaatatatgagattctttctcatcattacgtattgtgtaggatattgcttctctttctaaatttgacttttggtaaaattccgtatacaataaaagatatttcatcattgtagatgctttatgcatgtcctgtccttccacactgcacgcta

SEQ ID NO: 13942 - DNA, 4923 bp, Cannabis sativa
cccttatataacccttttctgtcctgtaattgaagggtttttttttttgttttttttttttatgaaaaatatattgtcattcttatgatcagaatcgcgagaaagaaaaaaaatgtgaagcagctgaaatctggtctctagtggacttgtaaagtacaacttacataggtgtcattcaccttctgtatttatcaaattattgttaattattttgttggttgaaatttaataacagtattaactttaatattatgacttagaatatgttgggtcagatttaaaattaataagtgaacaacacgagatggtgcccatagcagtatcctagttgattaagtagctcctctgttcaaacatttaattttgtctacaaagcttttggtattggcattttgacagaattttttatggcttggtggagccttggtaactgactaaacaaattgaacaattactgtaattttctttagagagcacaacacaatataatatgctaagagcaaatttgagaaatagacatgttataatacatttgggtcgatacaaaagtataaacgaaacaattgagaaacgtgttgtaaacatgaactgaagaaagaggatagggtcattagctggtttcttgttttcacaaatatatgaattataaacgtacaagctggtaaaaggtacctagactgtgaaaactcccaacattacctcaaagtcatcgaaaaatagcaagtgattccccatccaccagtgaattactggcgtgcatactgataatctcccaaacattttgtaacagcttcattggctgtcgaaccagtcctttcttctcttttcttcttctccctgaaagccacagcaataatagcacataaaaccatgattactcagaaaagcactacacaattcacattattcaatccttcaattaaatctcaaattttcaggtttcatgtcacttaaaaatgaatgaacttgtcatttgagaatggaaatttgattttacacaccgccattacttaataactcacaagcaatcacacttcaataaaatttgatgtttgagatagtttcatttatgcagagatgataattttagattctgtagtttcaatcttttactctaaaactctggacaattaataattatcatgttcatacctggcaacatattcctttagcagttcctttgcctgaaccagtttggaaagcagattgcgatatacatcaaggtcccggtccacacttcttttgttaatgttcaaagctgtacaaagctgcaggccagaaaccaaactgtcaacgctgaaacttaaatagacatcttcctttgtcaatgaaatatttactaaaaagttcctagctcttcactctggttcaaagatatatcgctattctaaattgatgaaaaactttaaatcaagagttattgtatcttaagtctgtacaaatacgctgcatgcactgacagaaaatcaagagttagcagagctagaataaaaccttcttgtacaaatttaacaaaactatacaaagttgtctatatcataactgagacaaggatagaatcaggaagaaatatgcaatttttgctcgtttaccaacgttgaaactttaaggttagttttcactgggcgaaccatgaagttggtaaaagaatcaatcctaaaggttggaacacaaaagatgtaacacggtccactagaagttggcacatctttggtattgaccatcaatagcaccaaacaaggttaaatactgttgaaatctctcggcattagattataagaaaaacttgtgaagcaagaaaatgcattctagaaagaaacaaaatttggctgaataataagagatggccttattgctgcatgcacaataacttacagcctaccacactttgtgagaagaagggattagtaaagagctagtatcttttctttcttttcaagcccaatatactttttattcaagatggatagtaacagacaagtaaaagtatacattcaacaaatgtaccttgctttaaaaaaatcaagagactagtaagggtgaatgactacatcagcacctttcccacaaaaaataactaaattaatatgcatgatttaacaatttgacatggaaaacatcgttgagttctgaaatttaagagaataaggagtataccttttccaatattgttggttcagttgcatttgacaactcaagaagacgaaaaagacctacagcaaagaacctgctgtagctgaaatttccattggctgctctttctgaaatgtccttcaatatctcctccacttctccttctttggatgaaaactcaactaatgagcttgaattctgagcccgagcccactcttccaacttctgtgaatcagctctataatgaatgacatggttttcttagttaataatctatcagaatccttcccgtacatatctaataaactcaacaaatgcaaagtaaatattccaaaatgtattctgcagtttataaaaatgcagtccaaaatatgtttcttcaactattatgcctattgtctaataggaaacagtgtcttctaatgattgttgttatgagtcactgagagatcggtagaaatgcaaatcaaatttctcaattctcatttgtttccatttatataacatagatgatgaaactggcgtagtttccagtcttctaaaggcaaaggatgtacaagtacaacaagaaatatatcgaattgaacttaagaaagaagtaccgattcaaaaattcaatcaaagaataataatctaactatatagataaagccatacctatacttttctgggtcctcatttaacgcttttatgtatgcttggaagatggcttctcggtcttcatcgctggggtatccatccataagttgatcatatacagtcacaaaaccaagagcaaagataggatcataactgtatgacttcttgtattttatcaagtgttgctgaacaagcagctcctgcaacacactgttatagacacttgggattggtcgtttgtaagacttgagaaaatttaacttcgtgtcagctacagtgggtgagtctgcacattaagtaaataaatataccattactaacaagctgtgtccatttttcaattagttgaaaaatctaaaacgccaagcttgataatagatactcctccaacagactatggtcaatggatacaggaaccaaaaagcagggtcctaaatccactgagcacaaattcagtgcctaagttccattgctattgaatgagatgattgcctaaaaaaatctaagaaaactaatgaaagatagtgatcttgcaaaattacaactgtagttttgtttatgatttaccaaaacaaaaacaacttcccaaaggaaaaattcgtcctgaaaataatatttcaaccaacacagtttataattcaatgttgtaaacttcctcaagcacacaaaattttcactaagcgagctttatttgttaaatttactaaatctgagtatactaaacatcaacaaacatacatattattttttatttttttttccttttttttctttggggaaggggtgacattaacaaacatggagcaaggaccatgcccgtgagttcaccctcagaaaatagaaatggcatgagaaaagccaacctgtagtagaagacatgcaattgataaccatgcgagaagtcgagtttgaagctcgaaaacctacaaattggcaggaaaagctggtgcggcatctgaacaactcagaattcgaagctaaatttcgagacgacgataccacggctcttctctcagaacattggctaatcgctgagaaggatagggaagtaagagaagccatttgattttaaactcgcacccaagaactaaaaacaagaagaagaagaatcagagagagagggattcagagttggaaatcttctgggaaaattattggcattatggaaaataaaaaagaaaattttggagtgaaagtttcaaaactgaaaaagagagagagacagggagaggtccacgaaggaaggcttatccagtgtgtgaaaggtaataagcctcttgtgattttatcattaccccaataatgtcgtgacacctgtcattatttatgattgtgatttttgatttgttggacttttgacactgttttcattctattttatttacaattttatcccttttgtttgtttttctttatgttttggaccctataggcctagagatatttctgtgtgtaatattgtattgggaagtagtcattaaatgggtttcttgcaagtttctttctcccttcctagagtactcatatggggaaggtataagacttcattactatgaaagggtactaaaaaataccatcaccattcaccacaaccactacgaaaataagaattgctacgaggcatttatagtctttaatattaagataaagtgttattttataaatagttagcgattttttataatatttattaataaaacaagtaggacacgagtacaccctcaagtttgctaggcaatatgcgtctcttttaatatttcccttatgaaaatatatgtaatgtatataaaggacagattatgatattgtttggataaaaaaaattgaacccttattcaaagaaattataatttctaaaaatactataaaaatatgtatatttttgcaaattatttacttttgttttggactgtatgtttatagtaatataggttaatttaggtgccgtttggtaacaatttattttttaattttttaatcgcaaaatgaaagtaaaatttttatttttaaaaattttgtttttaaaaaacaaaaatacgttatggaaccacttttgtttttttaattttaaaaacagaaaacaaaattgtgttctgtaaagttcattttcattttcattttttgatcttatttacgtcgggtctaggtccg

SEQ ID NO: 13943 - DNA, 1243 bp, Cannabis sativa
atttcaaagagaataaagagaagttaggatattcaatttggattagaaaaatgtgtgactatagaatgaataatatgatacaggaggagttacatcaatggatggatttctttcccacttcttcaaagaagtgtacaaaagcaagaaatcagctcatgaaaataactactgtaagtacaacagccaaaaactttcagcattcacctcttctctttacctagctggtttggtggcgacactggttgcgtctccagtcaccagaaactatgggcggcgggctagcataatatgcggcggaatcagcttctttattggtgctgttctaaatgcctttgctatcaacatggcaatgctacttgtgggtagaatcttgcttggtgttggaattgggtttggaaatcaggtatgatactatttgcactgaattctttgttttaattatatttttagttcaagtgcagtagaagtaaaatgaaaattgagaaaaaaaagagtcaatgaaacatttaataaagtttggtgaaccatcagattcataagtttaaactaaagtcagagttttcttttttttttttttttatatttacaaatttaatttctatttcttaaccatttctactcaagagaattgaaaaaccaactcattttacagcaaccaaatgtgggaaactctctctttctcctcccctccaaaattaagaaacatatacatggtattaccaaaatatcttcacatacaaaaacttgtaaaagttaacaaaacgacaaaagaagtcactttcttactcagctagctaatccctcttactaaacctttattcaaacaatttatttaataatgttagcccacagaccgaatattgggtcccatactaattattatgaaatatggttaattgacctctaattggtgggtggtcaataataggagtgctttgaaaaaattcaattagtaaattaacccatattcagtttcagcaaaaaaaaaaaaaataattaagaaataacccatatgtagttggagtaactcatcttccaggaaaattcgtgtaaaatgattgatgaaaagttatatttgttaaataattcatgagattataaaactacacttacacactgagtggtcataaataatttcgaaaatttacactgaacaatcatacattgtttaatttcaaattacttttttctttatttcacttcctaatttttaatttatttagcaaatttgttaatatccaaa

SEQ ID NO: 13944 - DNA, 2520 bp, Cannabis sativa
tggcagattttgattactaccgagccgagctaagtcggctcggctcgctagctctagccgagctcatcgcacaaaaatcgtacaaatgtttagtttacacccttggcctcccttgggttgctgacgtggcggcggagcaaaatattccggtggcccttttgtgggttcaggcggcggtggttttcgatgtagtttattattattttcatggttttaaggaaataattcaagaaaatattgaaaactctttttttaaattgtcgtttttaaatctaccacatattaattttactattgaagatcttcccacgtttttagattcaaaaaattctaaattttttttagttgaatttttccgaacgcagtttggaaaaattgacgagggatcgaacccgaaaatattggtgaatacttttgatgagttggaaaaggaagctttaagttcaattgttggtaaaaatttgagtttgattggaattggacctttggtgagttgtaatagaagtttgtcgtttgatgtaaacgacgtcgttttgtggttgaactcaaagaagataacgacagtcgtttatgtgtgttttgggagcattgtggttttgtcaaaggcccaaatggaggaaattggtaaagggttgttgggctttggttttccttttatttgggttattagagaaaagaaagtgaaaaacgacaatgaaatagtggaaaacgacaatgatgaggaattgagttgtagagaagagttggaaaagcttggaatgatagttccttggtgttctcaaatcgaggttttgagtaacgagtcgatcgggtgtttcgtgactcattgtggttggaactcgactttggagggcttggttagtggggttccgatggtggcgtttcctcagtgggtggatcaaacgacgaatgctaagttgatcgcaaatgtatggaaagttggagcgagagtgaaacctaacgaggaaggaattgttgagagaggagagattaagaggtgtttggagttggttatgggattgggagggaagggaaatggggtggaaaatggggaggaaattagaaggaattccaaaaaatggaaggatttggctaaggaagctattatggtaggtggctcttctcataaaaatttaaaggctttaattagtgaggtgagtggggaagttgtagataatgctttttcttcaaaagtatgattttgggcaattttactttgtttttatgtatacatatatgtgtggtacatatatggaaatattttgttagacacaataagcattattaatctatacatttacattgtaatacatgatattttgttttagaataaagtttacatctatacaaatctcttcatatattatttaccttctttttagtacatatcacaagataggtggtggagtcaaacttactaaaagataaaaagaacataatcattaaaaaaaatgcttattgccaaaattatcaatattttaagattctaacatattgtacattttcttagtgattctattcttttccttttggagaaattcagtcactaatcactattatatgaacatataaattgggatgttagttgatgtttccatgttattctaagagtgaaattaatttagaaaatagtgattggtgtaattaaatattgttaatttaatttaataattattatatcgctaactataatttaatttaataattatatcattaattatttagaaatcgtcatctagatagtgttaagtactaccgatatcttataattaggatgttcgctatgtaagttcaagttatttttcaaaccaaactgcatatgtggttttaaccgtaccataagaacttggcaaaattcacattgcaaaaatgtggtgtgttgcggtacgatgcgatttttataatttcttaaacggcaactataccacaagaccttcgcgaaaatcacactgtaaaaatgtggtgtgttgcggtacaatacggtttaacagtttacactataataattatcaaactttaaaataaaaattaaaaagttagtctaataaagtttcaatgattacaaaagaaaaaatattttatcaaacttttaacatcataacatatatattaatcaagttataataatatgttaacaataaaaaattaacaaaaaataataaaagaaatcatactgtaaaaattagtatttttgtaatatataatacagtacagtttgaactgcgattataaaattcaaaactgcaaatcgcaaccgtactgtaaagaatttcaaattatattttttgtgttgtggtgtgatgcaagcagtttgtgctagggtgtttatcaaaccgctcaaaccgcaccacacctcaaaaaaatatggtttgaaattctttgcggtgcgatcgcggtttgaattttttctaagctgtgtggtgtagtgcggtttgcgatttgaattgttaatatgcggttcaaaccgcaccgtatcacatactataaaaatactaattttatatttatttaggtccaata

SEQ ID NO: 13945 - DNA, 6018 bp, Cannabis sativa
aaattttttattcatttttccaggttttataaaatttctttatttctccatatatttctaaaccacttacaaaaaagccatatttataaaaaaaacccaagagtaaatgccagctgggccgtagtataagttatgggccagttgggccaaatacaccaattgggccgtagacccaacccaacccagaggtcgatggtttgtcttcttttgattcatcttcttcgtcttcgaatcttgctattgttgttgttctttctcattaacaagtctgagcaacaatggctgacgaatctaacagaaccgtatgtactctttctcttttcctctgcttgtttaattttcgatctctgaggtttttcaagtgttagtatgaatatgacaggcatttttggagcttcaaggtcggatgatagatatctccgcaaaactgaagcaggtttctttctcgatggacttgtttcacaattacagtgacatatatttacatattatattggcataaatataaatatatatatgtacgatgagcaggtgcagaaccagttgcgcggcaaagaaggtgaaaagaagagagctttcttgaccttagaggagcttcgtcaagtgtccgatgacacaaatacctataaatcaattggtaacttaacttagaaacatttccctattctttctctctttttcaattttgcacaaatttatgtattaacctaactttgtttttcgtttttcagggagaacgtaagtgagtttcttcttaatcaaatccaccgcttatattcaagattcgaaattgaaaaacttttcttcattttgatttgatgggcaggtttgtcttagagcctaagtcgttcttaatgaatgaactacaagggaagcttcaggatagtgagactgctattgcctcactcacggtatgaattatgtaaccttacattttttggtatttgatctccaatgcactagcaaacattttaagcttacattttttttttgttcttcttcttaatttcgacaatagacctctagggattatttggagaaacaaagggccgaagtggagaccaacttgagggagttgttaagccaagatcctggccttgctcgtcagattatgtccatgactgttatgtgataatgctcatgtaccttttatttcatttgtgaaactattagtgtttgagcaaccaatttcttatcattttatgctctttaataatagtgtttaattttaatgtagtcgtatctaatgctcttcattttcaattggctgtcatgtcagcttctgaattgcatttgttggaaagatatttcattatgatggctagtttgttgtgcctctgttttttataagctcaagtatcaaatagttaaccattgaaattactgtatagtttatttattttatctcgaacaggttagactttttgcagtatctatttattggtttttgacagtttgacacatttcctagcaataaggcctggaattctagcagtaagagtaagagagagtaaagttgatgaaatggttgaaattgaaaggaaagagtaagcatctttatatgtacatgtataaaaagggtgtttgtctcaataggaattttctttattttttttttcttctatttgtgggatcatcttttattgtatagaaaattgtatttaatgtttaaacacattggttatgtgtgttttctccaaaaggagaggaaggcactggaattgatggtgatcattcaatattaacatcactatatagtgataatactaataatgataaaaaatcactagttttcatacatttatatgtggttattagcttagccttgcccatgttgagtacatcaggaggaacatttcatctttgcatatatattcaggagatgtctattctcttgccttttgagaatcattaattctggtggaactgtctctgcattaggtagtatacactcaattgattgtaatgtttcatttcaagaaatataccccttattctttgcctggggaatttaacatactatagcagctcggatatgatactgctgtgaagatggacacaggatattgggtatttttatatctgaatacacagcaagtgcgaagtggcagcctaggataacgatatttcctgcagtagacgtgtgctgcagttttcaactttctgctagaagaaatacattttcatttggtgcagaaattttaagcagcaaatttattgttctggtgtaagagcattggtaagaaggagatgcgttgatatatatgtttttttttcttttatgacaattcaaaaaataatacactccaatcttgctgtaaaaaaatgtgccaaacgtggctagaatgcatggcgaagtaacctttgatgtatcatttgtttatgccagtgccattggatctcacagcagaaggtccattgaacacaaagaaattcttatttatattaagaagaaagctaaatattcttattgctatatagcaatttaagggttgctagtcatgtacgtggttgaagctcagtattactttatttgaaagcactttcacatattcaagaatgaagagtaatgctgaaattcatgctccagatatctaacattatacttttttcttttttgaatagatatctcacattatactaaaccacccaatcatgttcaacattatttttcatattactcttacctaaactcagttaaacagaataagttgacaaggagagaagagagaaggcaaaattgtgtattctagaattttatgttgcttttctgtgtgcccaagaaaaatgcaaaacgaagacttactatatgagatgagtcggtttctttcaatgaaataagactacacgatcataataaagcatattaaggatggtgcttctgctagaaacctatacattgacaaaagttctctctacactcaagctcatatagcagatatagaatttgccccactggcttattagaagggtgaaaaaataacatgaagggtttgcagaagttacaacaaataactacgattacagtcttaataataatgagaagctcaacttgcaatacagtcgaccaaaatcaaacacatgataattgaaaaggattgcctgcctcccaactgctttagttgtaatgacagtagccgatgctattgttctctatccagttaataaatactcattcagtgctttgtaaatctctcaaggacttcaaagtaatctgggaaagtttttcgggtgcaaccaggatccttaatggtaactggcacatctgaacaagctgcaagagagaacgccatagccatcctgtggtcgtcgtatgtgtctattgctgtgatatttagtttctctggtggagtgatcacgcagtaatcgggtccttcctcaactgttgctccaagctgaaatgtttgttcccataagaacagatagccatcaacaattacattccaaggcacataaaacggtataacaacttaacaagcacataaaacggtataaaactaacctttctgagttcagtgcagatggcaatcattctctctgtctccttgactctccaacttgccactgggaattaggaaaggcaagaaatgagtatttaatcctctaaacaaaataatattttattggttttcatttttgtctctgtgaaattcattgcaaatgagcagattattttttgttatggcagacgagaacctacaatctacaccaacccaaacacctgtcccattttaccatcttgcaaatataaggaaaacataccatctcttatagcagtggggccatcagcaaaaagagcaactacagcaagagtcatggcaacatcaggcattttgttcatgttgacatcaatggctttcaagtgtttactttttacagaatctcgtggtggtccagtgacagtgacactgttctctgtccagctaactttagcacccattttctcaagaacttcagcaaatttaacgtctccctttatgaaacaccagttaatgtatgtaaatacacttaatcttagattctatgtaaacacaagtacaagaataagagatttcaaggtctaagcaaaatacctgtaaactactagtcccacaaccttctacggtgacagtaccaccagtgactgcagcaccagctaggaagtaactagcacttgaagcatcaccttcaacataagcgtttccaggagatctgacagatttttattttgcaattcattactctttgacataaccagatgtaatgtaaatactatcaactatattcagaagaaacctacttgtacttttgacctcctttaactaaaaatcgatcccagctatcactgtgttcaacagtaaccccaaaacgtgccatcaacttcaaagtcatatcaacatagggaaccgagatcaatttatcaattatctcaatttcaacatctccaagagccaagggagctgccataagcaaggctgtcaaatattgactgctaattgatccagaaagtttcacctgcaaagggtaatattacataattctgagtcaaaatgatgaagtttgtcatcatttaagatatattaaatgctgtagattaatcactacttatgcatcatttgacaatattgtttttatttaaaagcaaaacaacaacctaaaaataaaccagtcaatgatgttttatggccaaaaagaataagaagaagcaatgcaagcctcaccttgcccccaggaaggcctccttttccaagcacacgaacagggggacaatccgtaccatgaaaacaatcaacatctgcaccaagctgcttaagaccagtcaccaaatctccaataggtcgttctctcattcgaggaacaccatcaagtacgtagctgagatatagaagttaagagattactgagaaaatgtgataacagcatacgaaataatttatgatatgtgctaattcatttccaacatgtaatttctagcataaccacatctatgaaacacaatcctaaagcattacctacatcaaagtaaagagggaagtataaatggtggttattgttagcaaaagtgactttctttactcaaaatgtaagagttactcggcgagtaaagaaaaacaagagcataaattcactgcattagaggtactttattttcaaaagcaattgcaatgaagacaaacctagcatttccaccagcaacagtcaccgcagctgtgagtggacgcattgctgttccagcatttccaaggaaaagttgaacttcgtcaacagattctttacctgcaggaaactgacccccacaaccttccacaattgctcgcttgctttccttgtccgcttcaacacgaagaccaagggtttccaaggcaccaagcatgtagtgaatgtcatcactatctaacaagttgtccacaacagttgtcccctgaataatcataacaaaaaaaacagttacttcccaccgctcaaaatattttatagggcaaaaaactcaagtacatgaaaataacatgaactgtaacgataagtagtagcgccaaaatatggggaggaaatagagaaagagtatatggagaatgaacagctacaaattctagatgactcatacactaatagtacaactttattctaaatcccacattctaaaatttagggagttcaggtgagacaatgcatcaacggaacacctcatatataatgtaacagaagcgtagagttatgaaattctcataaataattaacaaaataaactgtaaggactccgaatctctccgcagagtggagctctagactaaagttgtaaaagcacaaatgagaccagaaatataacttcagtaatccagttgagttgcattttttatttccatcgtattcttacgaatttaaccaaaatatcatattactttactccatttctctcaattttcctcccaattaagggcatgagttcagcttaaatgaacactactcatttacaccaataaagtaaaaatgctaagcattactctccattttcttgaaaaaaaaaaacattccatcgct

SEQ ID NO: 13946 - DNA, 5079 bp, Cannabis sativa
cgatagtcggaggggacgatcggtttctaggaatgacaatgcttctttgggggcaaccaaagaggtgggtcggactctgtcgagggtggataccggtcgccgcaatcgatctgtgtccagatgtcctggtcctaggaagtcttacatgaattccgaggtttgggctttgtgttttttcattttcctttggtgggtaatactgggatttgggttttatatgtttgctgtttgcactttgtgcagagtgaagctgagctagaatgtagtccagtgaagagtttcgggagtaagaatttgaatttagatgagactaaacgtttggttagaactggaagtactgatcagttgaaaggtctaaggacatggtctagtcaacattctgacatagagccctcacatgattctggtgtgagtttggtatgaaaaaaggcaaactcactttctaaatttgcaagattagtttttctaaatttggatgtgaaaatgtttttggtttttgtatgtgttttattttcagttttcttcacatccaaaaacttctaggggagatggagcttcctccacgagctctttgttgggagttgaagagaaaaccattaaagcagtgtgtgaacagatgaaggtaacttttgtggtgtttcttcgttaatgtgttagaaagggtattttgcagaatgatttattaggtctgaaagtacattgctttagtttttttttttttttttttgggaaacgatgggcttatacttttatgctttaattcacaacagtcagaccgggattctttggatggtgatgcttctactgttggtatatatgaaactgtacgatctgaagtgaggcgtgctatatctgaaatccaaaatgaccttgaaaaagtacgttttctccttcccttatctttaagtaacaaatgattcggtgcatagtttattgaaaatgcgtgaagttcaacatataaatttggcaattgatcaccttcgatactccacctccactcattgttcaagtatttagcatttcaaatatttacatattagttaatcttctaatttttttatatatagttgccaagattccaatttagtaaaaaaggattgttcttattataacttttgagatattaataaaatgaggttcatgtatggttttgaagaagtattatctcactcaagattcataaatggcaattgatcactttccaataatccatagttgttctagtttctattttttttaaacataaaatgaatttcattaaaaggcccaagaagccacaatgcaagtttacaactctaggtttaaggctaaacatagatctgtaggccaggctgccacacttttgcgctctcttgagaaagaactaacttaggaagggagtcgtgtagagaattaaccattatactgcaatgcacatgaacagggaataccattttctggcaatgcaattttcttttgtaaaaggttattcaacaagaaaaggaaaaatgacagaagaactaattgttaacctcatgagaataattgttgaaaacatcttatgttgatttagtttcttagcttgaataaattaattattgcttataaggacatccattgtggctgttgcttactagttatggcagtgtaatgctgaggtagccagccagttttgaggtctgttagcttctcaattaatataaagtgtggacacacttgatattattcctttttaatattttcaatcttttcaggccatcagaaggagtaatacatcttcaatcgttaattccaacataactgatattcctcctgatctggtaaatccaagtgcagttgaattagtttcagatataagaagagaatatgctgaaaaacttgaacaggtattttctcttgctgttttttcttcaaacggggagttgttaacctggattacgtgttatactgagtggttcaagtctaaaattttgaattataccttctcaacttaaacaactaaatttcacaacagaagtagataaatgattgaatacttattagttatgagtgagtgcgtgtgattaagcttcatttgggaaaaaatggcttgtttttgctcacattaggcttcttgttcctcttgctatctctcttgctagactgctatagtataccaccatttaaactttcctgaacttgcagtccaaggaacgggctagacaacttcgaggagacctggctgtagaggaacaccgtggacaagagttgagcagaatcctaaaggaagtacttccagatcccaagatctccaatgtgccaaagtctcgtccaggaagaaaagtaggtcccatttatttatttgataaatattttggggggtatgttggaatgtatattaaatgtttcacaatagctaagtaaataattgggtttatatgttgacaactttgtatagaaacattttcactataagtcatctattttcatctttattgcatcatctagttaattgttatgacttcatgctttacttgtatcaaaaaattcaattttctttattaactaccgattattggttagaggtttccttatttgcttgttcaagaagatagtgggttaatgtatcttgctaggagtttttagttgtgtttttttgcctactttaaccccaaacaaactattactgactataattattacagaccagcattgaaagaagaaagatgtccaaacgtctaactgaagaggccatgtcttacttcgatgagtgtgtatctctatccacatttgatagttccgacttttcatcacccgaagacccacctgtcaacatagttggttgtactcctatggacaatagtgtatccccactccaagcaagctcaagtgcctcggccaccaatttctccagcagttttttcaaggataaacaggttggtctcaaagttagtgttatgctttctttttgaaaattaaatttctgaattgttgccacagatatatttatcaatacagtatcacaaaatgcattatctcatgctatgactaatcatttatggcatcccctcttctttgaaagaacaatggcagaacgattttaaggcatccctttttgcatgatgatattttaataaaattaaagcaaaagctgcaaaaccatttgtgttgtggatttgtgaaacacgttcattggaattaatgattgttcttacaggaatcaagcattcaatatcagactataaataggcatgaggctgcagaccaaatggccagcagtagccatatggattccaccttagatcagtctagtcctacaggcatcaatgagggaaggggttggaaatcccaatcccatttttcttttgcgcgaaaggcaacagaaactcctgaacttcaacaggacattcagaagtacattagaaattccgaaaaaggcgtcaagaagggtgacataaattcacaatttgtgagatcgaatggttgcgacttgggcgagtatgaattgcaggctgcctctcaaagctttgtgtttgacagaatggtcatgagaaacagaatagagtctggcagcttgctactctgtaatggtggtatcccccttccattttctccttttgcctcttttgtttaattaatttagggctgcctctgaatgtttatacttgtataatacggaagggatgctgagaatgaaattaaaaaaaagataattttataaataccgaaaaacaacaaaaaaaaaatttatatttttttataggtaattatgattttttttaatatttttatggatttttttttcttatagactattgtttttaggttgttttaaaaaggaccttgtttacatgtttttacgttgtggaaatacggtaccatgaaaataacgtgttttttttttttttctaaaaaatacaaattcgtaaaaatgtaaagataaaaaaaagtctttaaaaatgtaaaaaaaaagtccatttataagaaaaaaaaaaaaaaccaaaaggatggtgtaaaactcaatcaaggcacaacacaacctcattttctttattcatttatttatatttgaaaaaaatttaaaaagatcacttggaattacacctgggctgggagaaggtttgaaggataataaagtttgagtaagtaatttgtagtaaaaatacaagagtttaatttttagttgcagatagttaagttttattaaattttaatttttgagtaaggataattttttacggtaataatacaagttataattttagaatttttgtaagtacttgactgttaggtgtcaagttaatgatcacataacagtctctagtggcttaagttattaatgacttctgaagtttaaaaaatataatttaagtatttatttgcaaccgaaaattaaacataaatatttatactgcaaattactcttttgagtaatatgtcaagtcaacgatttaaggcttaatttgtcaaaaatttagaaactgtactctactactaaaggaatgtttaaatttatccaaatgccaacacggtttactcctacaagtatcaacatttttgttaatttccccactttccccttttgtttattattattagatttatcctccttaaattaaaatctctgtagagttttgtccttgaattttttcatgttgcgaagattcttcttgcaattgcattctggtaatttatttaaacaatttattaatataacattaatataacgttaatcagtctaattcaagagtttagataaaaaaataaatacataattagcagtctaatgataaattataagagtatgtatgtacatttttagaactactgtttatatataatgttaataaactagattttatgtaacttaaagttatgaaataagtgtcaatactacaattatatttgtaacttatagacacacaagcaaattattataaaaaaaatgagaagaatataatttgaggaggatattgcaacgatttgcatagttggaggggatttttgcaactgagaaaaatttaaggatacaattttataaatatcatagttgaaaggataaaaattctacttattcttattattaatgctatttatgtgtgtattagtattattattatc

SEQ ID NO: 13947 - DNA, 2969 bp, Cannabis sativa
gagcctgtctgaccttcatatcaggtttctcaaacacgcagaaaatagtaagtaaatttttaccaatataagagtaaaaatgtgaaaataatcacaataaataaataaatatttatgtaaaaaaaacccaataaaatatgcagcttttctcacatagagctagttactatagtttgtgcactactagaaaaatataatttagcaacacttgtttagcaacactttaaaaaaaagtgtggttaaattatttaatttttaaattaaaaacacttataaaaaaagtgttgcaaaatcattataattttataaaattttaattttaataattaattataatatccaaacacaacactctaaaaataagtgttgctatttataatttcacattaaaaaaaaacaacattttttataaaagtgtctctaaatgtatttttctcagttttttttttttttacattgttttaatagcagattttttttaggacacaatatgtcaatatcaaggaggaccacgacaatctcctcctcttattttttatcacttttcccctttcttttattttgtttttctgacatttccacaaacacataccgtgctcgtcgccagaaactaaccccaatagatggttggagtcagcaaagaagacaatgataaaggtggtggaggaagcctgagcactctggcttgctcctcttccttgagaaatttatcttcaatggaagtatcataaagtttctcagctcatcattaaaaccttccacctccaagagtttgacttggcacttctggttcaacgcaaatagtctcgacccgtttctttgttttagaatcccagacccaagatcattttaattttgatttgctggatgaaaagcttttgcatggatcattgtcttctcattgccttcatcttcgttgttctccatctgccttcatcttcgttgttcttcgagcttttgctggatgaagagtttcgcatcatcaatgtcttctcactgccttattgtcgttgcaaaattattttcgtggacttcacttatgtagggtactcctttaattttgcaacttatgttttcttatgattcctttctattcttattttgaaccctcaatggttctctttttttcaattccaattgagctgaaccagcttcaatttttgttcctccataatggtaaaagctttctctaccctgttttttactttaattttttggggatttttcaattatatcagtattatgattcttagttatgtcaacatctgctctataatgagttttaccaaatttatgtctatgcaataatatttgagatgttgtatttagatttatatccctatttgacaccgactatgattgtgatatagtagaggttctacttaattatcttattatgtgaagtttctaatattagagttgctctaatcttttttttataggataaaaaggggaaagagccagatgtatcagagttcatatcagctttggcggaagacaacaatgcacaactcatggtgatggcctgtgctggtgctccaggagcaaacgctcaggctttagttgcggcaagacatcaaacaggtgagagattatggttgttagatgtttaagaaaaataacgttataaattttgaaaaaagtgttgctatttagctattaaaattgatacacgttctattgtttccacttttatagttcttatattctttatttactttttgttgaatatccattattttatttatatacaagaatgtgtaactgtctttctctgcaatagaaaaaaataataatctctgctacaaaaacttcaaccttccaagctcagctcatactcacggtacggtaatctaatctctagaaaataatatatatatatatatctttggcaaataatattaaacatattatttttttatgattaatgtttaattttatgtttattagtgatttttgagatttaaggatttcaatacttactcaaattatttttcagcaaaaaaatgttctgctattattttaaaaaaattgggacacaaagacttgggtcatcaacattcttcaaaattaaattttagcttatgtgagtttcacttgtgttgttaatttttgccattgtttttttcccttgtaaggtttactgttgtttcttagatgagtataatagaattgtttcttaaatttttttatatccatcttgtatattattattgttttttaagataatttgaaaagtattaaaattgctttttgataaacaaaggcattgaaaatgttaaaatgaagtatattgtcctattaatttcatctttataaaatgaatagacacacacacatattggtagattaagtaagatagatgaaccataaaattcaatcgagaataatccaagcaacattgtgtgtaagtaggatttctcaatcttgaagtgtaggtaggattttgttcatgacttgtgtgcctcagttttaccacgtctttgttcaattgcttgacaatttactgataggcacagcgtaaagagtgatgtttttaagggcaaacagtttcagagttatagactcttcagttctgtgatcttagggtatgccctcgagaggttagagttgtaccgaggcagatttttgaagaactcacaagttttcatatttttagtatgagtgtatgcttgagaaaaatactcatttcttgactgttctttatgaaaatttttagtcacttttcttgcttgttctatcaatcctcggaaagtggtagaatcaacataaaactttgaggcggcggggtggtgattcaatggtaatagagacagtaggattagagaaagagggggtaggaaagttaaaaagaattgctaagattagagtgcaatagtgttatttgaatcatgaaaatgtttaaggcattctggacatatctccatccaactttgaattagctatgtctgtctgtaaacatttgagca

SEQ ID NO: 13948 - DNA, 1680 bp, Cannabis sativa
atcattttacaacaatgcccaggaaaagtgtatgtactaaaacgtataaaaatatttggatggtagagagagaaataagtgtaaacaattaaaggattttatttgatgcatggtgggacaagttaaagatattatttagacattaaaacaataaataaatgataagggcagagcagagcagagcataccgatataggagttagaacttaggaattctctttgttattgggggatgtgccccaaaaagtctttaaaagtgcagaggcgtagggcgagggggttcacctaataagtaatatttataataatgagcccttctatgaagaaggatgaagttaattggagctgtctgtcatttctgttttcctcgcagtcctcagtaagtatgcattccaatgatctttatgattttgatgcgtagcgaaaatcgcaatttatttaagttagataaagctttaagttttatagagatagactaatctaagcaacaaattaagaagcatataattcatttagcttaggttctattcttcatcacaattaaaattgtaatttgtcacaaacacttagaatcctagactattaggtgaatagtaattctaagatgacgatagattaaaataaaacctaatttagcagtcgtctcatgacattaaatatagaagagaagaaccaatttgatataatggaaactaaaaattaacattcattaatgaaactaagaattcatgcctcgagttttgaaataacccttaactaaaataaaactactctaaactagacattattaactaaaatcattatatttaataagagttcaaggagaagaaaagaactagaataaagaactcttcgaagctgcgatctccttctcttccttgctctccctcctagtttctctattttgtagctttggaatcctttgctaattaagagtttttcaatttttttgttctgaaaaccttctaaaaatactaataataacttgtttatataggctaacaaagttaattaaaagatactaaaaatatttaaaatttaacttaaaaaaataaaatcccaactctacttgaaaagcttctttttttttttttgctatcttttatctttttttttttcaaaaatttcctactacgactgatactattttagtcataacactatcgatattgctcagaattgaaggattcaagatgttctgaaaagctaaaaacaagatctaaaacttccatgttgagctccaagtctaattctgcttctaagatcatctaaattttcaattaagctttgccttgtaaaaccgagctcgccgacttctactattttctacaaaaatatgccaaaatccctccaaaagactctaaatgctgaatagtctttaaaatggcctattataattattccactaatcactaatttaaaaatttaatttaaaattattaatacataaattgatcatatttataagacaaatatggactcattaaattctcccacacttgactcttgctcgtcctcgagtaagttaatgataaaatgaatgagacttaaacaaatcagtatttatgatgttatcccaattttcgcactctgacgtggcatcacatgaatgatgacacgtggaatccacttggaatatttgcccaggaagcatagtccgagcaaaacatatcgctggca

SEQ ID NO: 13949 - DNA, 7841 bp, Cannabis sativa
tatctcttttgggattagaaatcttgcagctataccaatttgacgttgaagaagtattcaaatcttgataaaccttcaatacatttgcttagttgcactggcttttaattgagaagttgggtttccaatgtactctttgctcctaaccagcttcgaatgttagttttattagataagaattttgcagcaacaacccaaaggttcatttcttattaccagaaataaacagctatcatgtacattgatttgtatctaaacatttgaagagtttatggtgcttttatcaaagcattgcgcatttgctttacacctacctactttaccatgcttattattacctaccagtattcatttgatttggtaatggggctgagtaatgttttgtacaggccgctgctgctatgtgtgtaggaatgggcagcttctccgaccctgttgatgcgcaagggcttgcacactttcttggttagctctttttttatttttcattgttttgtttttgtttttgtttttgtttttggggaagaggatgatacactatagtaccgattcagttcttgaaagaattagagtataggctgttcattgatatcacaaagaattgcaaactttccaagcttttcaaagacatttggatacctccatgagtaagttttactctttttgtgcaaataaattcttaattcttaacaattaatcagcctctctatttatactaactcaccccaacagatttttttaactaacacctggtaggactattaggacagctcacttaaaagcatttcatcacagccactaaagacctgaaaactcagctatcataatcctaattaattatacttttgagactaatatcaaggcctaacagaggagcaattgcaaagagaggagaataacaaatatatgcagtacttttaaataatgacgtgcatagatattctgacaaattgtatatactgcagaacatatgctgttcatggggagtacggaatttcctgatgagaacgaggtctgtttatcatttcagcttacttttaactatatttttttaaaggaaaaagggaatgattagagttgatttttttttctttctccatatttcgatgcttaagtcatagtagtgatgagaaatgtgattctcactattcatgaagatgaaggtctcttttatttttcatcttagcgaggtgatattattatttaggcataaatggctttgtagattcatgtggtacacaattattatccctctttaatttctttttttttttaaaattccttgtccaatatcttttgaataatggctactagattgactctttcttttgctagtatgatagttacctgtccaagcatggaggggcatcaaatgcatacacagaaacagagcacacctgctaccatttcgaagtgaaacgggagttccttaagggtgctttgcgaaggtaaaatgctgatttcccatctggctattgctagcaaagtattttttttcctttcaccttttttatctccctcttcccttataagcattgcattgttttctttgctgatagattaatatgaatgtggtcttatttgaggttaaatgattttacattctggcatttcgtttccaatccaaagactaaaagaactgaatcatatttggagatgaaggatagttgagcagaaaactttggaattagaaagcaagtaatcaataacgagtttcaaattcccaagaattaatcatttcaatattatcattggattataataaatttttatgctggctctgcctctcataatttctgttgcatcattatcactgatacattctacaaaatgaaggtgatagctctgtggatattaactttgaatggccctatagtttcttacagtgattctcgttctgcacattttgcatttccagatgtggagtttctttgtttgaaattcaaatcaagaggtcggtttcacagttatttgtaacgttgtttcatcaggttttctcagttctttgtttcacctttagtgaaaatggaagcaatggaacgagaagtgcaggctgtagattctggtacttgctaatcttatcctagtgtacttcctcatttttattttcctaaaaaaaataaggagtcaagcataacagcaaaaatgctgatgtatttctgctgctgaataaatgccacattgttaaacaaaatggaacagagtttaaccaggttttacaaaatgatgcttgccgccttcaacaacttcagtgccatacatcaaccagtggtcatccttttaacagatttttttggggtatgtttaaatctgtatgttttgttttattcttaaaaggatatgtgtttgtctaaagatactcttatttttattgttaggtaataagaagagccttgtcgatgccatggagaagggagttgacttgcggacccacatattgcagctgtacaatgattattaccatggtggattgatgaagctagttgtcattggtggaggtgcagtactaattccctatatatttgtggtgcacttgtcattttcttcatgctatttaggttacatggtttcttgtaattattgatcatggtctgagagtgttgtaatcttgtgatggaataaatgttgtttatgagttgtctgcattaggatgtttgaactgttcataatagttgtcaaaattccaaccttccaaggagttggaatttttctttttggtaatatagttttcagtttcagttctgcaaatgtagtattcaaagttctatcctccacgcatgcatttcagtctcttacgaaacaacaattcttcttctgtacagggaatgattctttgtattgttggtttaacgattgttgatgtttacacttgttaagttatacaatcctttgtttttatgttttgtatgcatttattacgaaccgaaaattttcagctgatgttgatatattatataatatctgcagaatctcttgatgtccttgaggaatgggtgctggagctatttggtaatgttaaaaaaggtcaccctgtaaatttggagttcaaagtggaagttcccttctggaaatcaggaaaactatatcggctagaagctgttaaagatgttcatatcctggacttaacatggacgttgccatgtcttcataaagagtatatgaagaaaccccaagattatatagctcatgtcctcgggcatggtaagagagtccattttgatacatagctattgacataattattttattggatatgtagttgccatattcttgatacctttcagtggttctctaaatctaatgttattattctgtttttgactatagtggacgtttgtcttgtgtttttctgacctttctctagtattttaaaagtttcattataattctatatgggaaaaattttgggctgatgcatgttataaattcgaaatcatttagttttctttttaactcattttttttttaacagtattggaggttattgtaattgagttggtgttcggctttactttatcttctttttttttcgtttgttttgtttgcttcattttgagggttatgctcttacactatttttcttttttaatttttatctatatgaatatagtagttctgtttcttataaatattataaatacatatatttgcagtaaattcattcattaagttcaaagaaaaagtttttgatttttatttttatcaaatttttcttttgttcaaattctaaataatttaaaataagaaagaaactatgaattttatttatccaacctatttctatgtcctttttctttttgaaatttcattttggattgaacaatttttcatatatatatatatatatatttatataccttttggctattcaagatttgtacataagccaatccatagctctattcatcgttgccgctggttcttgagttgcaaactttttagtgccctcgtacttttctggtcctaatgaatgaaagcattccatgcaaaaggcaactttgctatcaagagatggtcatgatactgccatttgaagaaggaattaaattaaattaaattattttatctttattttctttttccaagtagtttacattgatgagtaaacccatttattgctatttagcctttcattgtccatggtgtttgtttgactattgattctgaattcttaagtcatggggtttcagagggtcgaggaagtttgcttttctttcttaaagctaaaggatgggcaacatctctatctgctggtgttggggatgaaggcatgcaccattcgtcaatagcttatatttttgggatgtcaattcacctcactgactctggcttggagaaggtattttctttgattacttatggagttgatttggaatttatactcagtaatatgcttattttaaagaaaatctcactttttttttttctttgctttctagaggaatttggataaaaattattgcatcttgcattcattttttcacttggaaacacgtcattaaggaactttttttttaaaaaaaaaaaaaaacttttatgtgctataccaatggttcttaagttttattttctaaaactggtgccatttctgcagatattcgagattattggctttgtttatcagtacctcaagttattgcgtcaagtttctccacaagaatggatatttaaggaactccaggatattggaaacatggattttagattcgctgaagagcaaccccaggatgattatgcctcagaacttgcaggtactctttgtttggttttcaagtttcctctttgtttatttatgtttttatttcccttataattgatttagggtcttaatgacactcttgctcatctatcataccataactcacagttggtatattgtatttggcctctcttggtttcttggactatgattgagaattatttaatctttgtgggtataagaaggtgctaactctcctacatatatattgcctctatattttgaagaatgatttcatttagcatattatttatattggcattatgaagtgtttataggtgtttgattgttatggttttatactttttgagaaatttatactcagttttttgttaaccataatgaaaccttttcattgcagagaatttactacgttatcctacagagcatgtaatctatggagactatgtctacaatacatgggatgaggacctgttaaaatatgttattggtttcttcaaacctgaaaacatgaggattgatgtggtatcaaaatccttcaagtcagaaggtaaatcccttcaaccttaagatgaaataaaatgcattcttcatctaaacaaacaatgctggaagcttttagtatccaaatggtttgagctgcataatgttaactttttggttctacttttaccaggttgtcaatttgaaccttggtttggatcgcggtacgtcgaggaagatatttcatcttccttgatggacttatggagggatcctcctgaaatcgatgtttcattacatcttccttcaaagaatgagttcattccttctaatttttccatccatgccgataatgcgtccaacagtactgcaaatgcttctccaagatgtatacttgatgatccattgatgaagttctggtataagcttgatgacactttcaaacttcctcgtgcaaatacatatttccgtatcaacttgaagggtggatatgacaacataaagaattgtgttttgaccgaactatttattcacctcctcaaagatgagctaaatgaacttgtatatcaggttagtagcttaacttttatgtgtaatagtaataccagtgattggttatgctagcatcatttcaaatctgattctatggacacatgtttcttattcaatctgctgtcagttgtttggcagagagattgaattgacttgcttctagaattattgtcaacctagaattcataactaaacaatttaataaatttgtcttcatgttgtttgagatggagctgtgtgctcttcaatatctatgatttgttctgtattgccaaaacttatgaaccactttatctaatttttcatatatttttaattttaatctcaccattatctttgtttagtcttcccaagtggtcaacctctcctgaataaatgaacaatccattttcttaattactaagacaagtctatgtcaaaactgcaaagggagtgtctttctgttaattttatgataaagcttaaaagtaaaatttatattcttcccacttaatctatcttatcttctagtattcaactccaagtaaaaatgttcagggtctttttaagatttcaaagactttttcttttgtgctgacatgcttgatttgttacttaaaatactttcttctagtagggaattcacccggttgttcaacttttttgtattgcaaatgttcattgtctgttattgataggaataccgaatatttttttttctttctgtgcaggccagtattgccaagttggaaacttctgtatctgttctaagtgataagttagagttgaaggtctatggtttcaacaacaaacttccagttctgttatccaaacttcttgcaacagccaaaagtttcttgccaactgatgatcgattcaaggtatatgcaatgtaactttgcatttcttaaatgtttatttgttttcaattactcagttcagattttacgtccttttttgctgaacttcagccaaaagttcctggtggcttactatagcaaactaatgctctgaatttaataggtcattagagaagatatgaagagagcattgaagaataccaacatgaagcctctgagtcattcatcatatttgagattgcaagttttatgtcagagtttctatgatgcaaatgagaagcttcagttgttagatcagttatcggttgctgatctgatttcatttattcccgagcttcgttcacaggtatagtaagatgtagcatactatacattcctaattgtatgctacacagacttgtaatacaccattcttgaggaaattttttttttcatatcatttctgtagtttgaactaaataaagatttgcatataatttcccataatattttccactggggcaattaattgctacattatttttgttacaaacgattttcatcttgtaatttattttgttggtatttttttctttgagatttccaaaagaacaatgttggatgaacatttatgagcattctcatttgtacagctatacgtcgagggcctctgccatggcaatttgttagaagaagaagcaattagcattgcaaataagtttagagaagtttttcttgcacaagcacttccatatgaaatgagacacaaagaatatgttatctgtcttcctgcaagggctaaccttgttagagatgttactgtgaagaacaagatggaaaagaactcagtgatcgaggtaatgaatagtttcacatttaccagttagagtttaatacaaatgctttatttctatatttttagcaataaattgatttggttctgcattgcagctttattttcaaattgagcaggacatggggatggattctgttagactgaaaacactggttgatctgttcgatgaaattgtggaagaaccattgtttaatcagctaaggtgaatactgaaactaaaagtaataaatattgtgttacccataagtgtgaccttgtggagggtggttttgctcggtactcttgttaagctatgacaaactttgcatctagacttgcaaaagataaaagcagtgttcagttatattttaaatgaagaagacaaatagagtattgaaattgtctatgcttgggctgatagttttgtgtgtgt

SEQ ID NO: 13950 - DNA, 3425 bp, Cannabis sativa
aatgcaaattagttattagacttgagccaattcctgcaaatagggcaacaagagtgtgagatcagccacttatcaatgcatacaatatgaaaacggtggttacacttaggcaggactctaagactctctccttctaagaagtccattagacaaatagcacatcctacagccgatgaaggggatccataattattaattgtatgagttgaagttggcaaagccaccatttctttctttttaaggcctgagttaagcctccgcgaggccatccactcgatgggttcagtgaggacgcgcctagcacattggaacacacaatgtaacatggaattaaggccgagagcgcaaagtaaggcgcaaatgattgcagccactattatcatgatgttgagattatttgcagctgcagctgctaattcattgcctccgcatccgtgctcgtcttgacaaggagtggtatttgaggtaggacaaggggagggaggggctgtcctaggcattaggaaggggtctcagaatgtgttgctgatctttaatggttttccaaggagtaagtggaataaagaaggtgtgtttttcaccatgttttaggatatagatttcctatgccttgccccggaatttaaagatgtcctcaatatatgagattttaaggttaaaatatttttggagcatgctcaaatgatggtgttaagtacttgtcataatgatggcatttaattaggccacgtttgttaaactatatgacaagaattcatgatcctatctgatcaattagtccaatcaagatttattttgagtttgaaaaatatataatgtatatatcttattacaaaatgccccttggatgtttgttccaaaaaaaaaaaaaaaatgccccttggatgtgtattcataataatctctcttttacacattgataattaagggtatccttggtcaataaacacggtctttccctttcaatagccaacaagaaatgttatccatgattaggaaaagcactcgaatttattactttgtctttatcataatacattgttttcattttttttttcaatggagtattaacatatgctagacactattgttatattgtatctctttttatcagttcagtgtgcttttaaagccaaatgaaatagcctattatgtacaatgtgtagcatacaaatactaatataatatatgcttaagcacgtttgctgcaattaagtatatatttttattcttctttcttccggtgtttaagaattattttttttcaacatgcatagaataaagggtacaaaaagatccaaccccaaggcaaaagggacaattaatattgaagggccgtttttggaggagaaaatagtgtagtggttgtacgtaataatcatcactagaaatggtggcattggatatgcttatatgcctactagataatccattaatatgttcaccctcaacctttaattttagtttatgcgttctccttcaacataagagaaagcatatctatcgttttctgtttttctcaaaggattcttacaaatatttattggttattccatatcaacatgttcgatcaatctcccaaaggatatttatatcttactcttcgtgttgtaattggtccaataattagcagcttctttatgacacttgtcattgttaagaaagagaatgaaaattattgaatgtggtttactaattatcaatctcactagaaatatgcttcaaatttagtttttaggattaccaagtgaaattaataaattaataatttaatttatgcaaaattattataaaattatttgaaaaaaaaattgaaatctgttttattaaaagccgaacttaatagatcaaaattatactgcagaaattaaaatgacacacggtattttgtacgtggtatcaacaattcttgtagattgctactagtctacgggtcaacacccatatatatgattcattagtcaaatttcaacagtacaaagttactaacttaaataaaacatagactcgctctaatcattttgccacaagtttgatgtattcctattcgatcgctgaatgaatctccttaagacacctaggtttgaactaacttcaaattacttgatgaatgcttgctttctctcaatgcaagacttatagaaatcttctcccgaagataacgctacttgcttcttcccaaaataagacttgtagaaatcttctcttgaagatagcgatatttaattcctcctcaagtaagacttggatgaacttctccctgaggttgttctttatgttcatctctttggaatttacttcacataaaagtaataacaaagacacacaaactcaccaatgaatagcagaacaactatcatttacaaaagaaacactctcttttaaaaatataaaaaaattaagaagtagaagagttcaaccttctgctggtggtttaggccaaatttatagtgataaatgacacccaaaaccaagctcaaaaggtctgaatctagactccatcaaagccaagttcatccccatgaaatttccttggacattacacaacctagcttgagtgattaataagatcatatcagaaaaggaataaaataaatcagttacaaagaaatatcatatatagatatagtatttattgcataataaaatagtttattttttccatataaaatcacaacctgagtaataatatattttcaattaatacaccattggtcatgctttaccaataagaaaataatcaaataataaatgaaaaatgtttccaaaaaggaaagtcagaatctatttaaacatacaatcagtccgttcaaacatatgcattgaacctagaaagttttataggaattaacttacataatataaataaggaaacatgataaatattatccatataacttgtacacaatttcttaactaagaaatcagataagaataaataaaataaatattaagtattttcttaaaatacaaagtaaacactaaataatctaaaaaaaaaaagaaaatcacatatatattcaccaacaaagccacaatctgatttgaaagacttttaaactaagagaagagaaactatttttgaaaaatattaaatgcaataaacaactaattttaaaaataccaaatataaataattttgtcatttttatcaaatatcccaactaacaactttacaatctccctttgtggcaatttagtagacaaaattaattacaaaaccttgcaacaaacatttatttgttaaccattgacactgtaatggtaacaagcccttttttgcatcatattaacactgtcccccaaactttaaaaagaaaaaattgttagggtttacgccttcaaaagcttgtaaatatatttttgattatttaaataatgagtaaacatttgacatatgtgtgaatgttaaattattaatattt

SEQ ID NO: 13951 - DNA, 2526 bp, Cannabis sativa
acttgtatagttagcaaaattaaaaaggatgtcaaatatagattgtatttactcaagaataggattggctccaaagtggaattagatttactaaagaggttgattatagttaagtgagggtgtggccggtctccttttggagaatcttgagggtgttttgttggttgttggtgtgattaatgaagcttttttcttcttgataaaaaaaaattaatactttagtgtaattcatagaatatatattatgaaaaatggatgatttttaataacatatctttttttaatgtttcaaaaagtattatattaaaatatttataatacttttttagtattaatatcaagttttcttgtagtgcatgagttccaagattaatccataaagtggcttaaatttaatctcatgtttttattgttgttatgttggttctcttgaattgattcttattaggttgattaattaatctaaatctaaatctctgtttgatcactgtgtttgttgattgatttagctctaaatctctatttatatatcacaaatcttattaagattgatactcaatccatacatatatatgtttcgttacgaaacccgaaaattgtaaaacatgaaccagaaaaagtaacaatcatcatgacggtttaagaacttaaaaataaatttatgcgtgatacctattcatttatccctttttacctataaatattgctgatgatattagatagtcatatttatatgtatagtaataattaatacccatggctttattaatgcttcgctatttgttctcttgacaaagtccatttataaactccaactactaattgacaactatatataatatatttatataaaagatcgatatacatgtataattgcatatattcagttgttcctttgttaataattaatctccaaaaaaaagcaggtacgtagaagaagactgtttcaagttcttcagtcattttctcaaccaaacaatcagaatctaatatttgagcttttccctgtaagtctttattgtgagtctatatatgatatagtacctcattttttcagaactatctttttttttttgggtgggtttaataaaccatgtgttattttccttctgatcgctattgtaatttttatgtgtttattttgtgaaaaacagttgactttgtctcttaaattaattggtctaatgtatttggtatattgacttcattatagcattctagaactcctttcaaccgctctcttatttaaaatgaaagcaatgtaatgaaatgataatattacactgtgctcaacttgattttttatgcatatatttataaatatatctatttatatgtatatttcattgcaccttcgttatatactaaaacattaatgagaggaaaataaatcttggtattttcttgacttttatgtttggcattatattctctaataataggatgttgttcaagtttagcaatcggttaaaatgtcactgcttgctttagatagaaatatatataaatatacaaagctctattattatgatatcatcaaaatctctctctctctctctccctcttcctagtataatctcacggcatttgactttaataattttctatcctcaattactagttcccacttacaagttggtttaaattataggaatttttatcacacctaaaacaagcaaaaggaaaaccctaagaaaagttgtgactcaatcatgcatgcttgagatgactgtgctaccaaacttttctaactccaaatatatatatcaaacctaagcttaaccttaaccttaccttattcttgttgttatatttgatattttgtttatacaaataagtagtagaagtataatagaagaaaactaaagttgcttctttgataatgataattaattaatatgtaagcctgatatatagccaaagctaataaatttaattacttaattaattatattttgtgtatatattcatggggccatcgtgccggcttggtgaaatctgaattaggtgatttcatgggcacaataaaacacaccaaaacatttaaacaagatgttgacagaagttaagtactcacaaaaaaacagtaattgaaagaaaacatcacctttttatacacattttgcgtaaaaatatgtattctattcctttgtctagtctaatttgcatttttttcaccactgctaagaaaagacaatatcttatggggacccactaaaaagcaaataaataaataattatttaattattattgatcaaacaaactgatataagttacaatataatatatgctccccacttctataactttttcctgtattgaaaaattcataatgaaccaatagcttgtttggtccgcgcggatgattctcctcatgttccaaccatataactttgttataatgatgatgagattataaaagtatagtaaaatcttcataataagtcatataattaaattgaaaagagaagctgcacgagactataattgttacatgagaagaaaattgtacctttgaaaaaaaa

SEQ ID NO: 13952 - DNA, 7075 bp, Cannabis sativa
cgagtttttaatttcgcggtgcgggtgcggttcgagaaatttgaaaaaccacatgtgcgagttggtttgaaaaaatagtcaaaaatcgcaccatccgcacggcgaacacccctacccatgagtgacatttctcaaagaagaattaatgaaatattactgttataatttgcaatgcaatctacaattataatttcttagcaacaacattatttttccttaccaataaatagcaaaacaattttcatttataattaatatgatcacattaaagaaaaagacaataattgatcacgagaaatataagtttggagaatatatagtccacactttacatttgaatttcataatatgaacaatggttccatcttcttttgcatgcatgaggattatatatcaatatatggcagtcaaaagctgcaaattgcagtgttgcattgcaaatggccaaattaatcaacatacatgattttagcctcttcggaaattactatttcatcttcaaaaactcaaatttaatctaccaatattttttgtatgagaaatgctaaagggcaccagtagtgcctagtaccctcctatatgtcaatatcgttattggtccaactaaatattaggtcttatataatttaatataatagtttttaggtagtatcgctaactaatcgcaacgcgacatatttagaagatgctaagcattggtgccttataacaatgctcttttttttatatattatattattttacttaataacttcttacttgttactgttaattattatttacataaaaatctgtaaaagacaaaataggatgctgttttaagtttaatcccaaaaatcaatgagaagtgataaaatcaaataagataaataatgatacaaggcaaacaacaacaacagtctctttttagtgaaaatttattaaaagtccaagggtaaaaatggaagataaacatgagagagggatgaaaagtaaagaaaacagctaacttttccatcattgcattcaatttcaaccaaaacgtgctttttatattaatgtccattttttttaaccaatttatcagaaaacaaagcttacccgaaatccaaaacaacaaaaggtcaaaatcctcaaatactcagcaacacagcaaataactctctctttctttctctctgtacactagtccaagctctctctaatttccatggcggccaagaagaccattaacaacaacaacaacaacaaccaaaacaagaacgacatgaagaagatgttgaatataattctcaaccctcatttatgacttagtcccttttgtcgtttttatcaactgttcgactctttctctctcccataactcttctccattaaacctctctccctctccctcttggttttcgtgctccactaaacttttattaaagtcgtcccatctttttctctctctctctctctctcattccaataactctctcagctagacaaagtgggggaaaaaacccaagcaaaaagcagctaaatttaagcaatttgagatctgggttttgtgaatttttgccttttttcttgtgattttattgaagaaagcattgttttggcttctgggttttggttcttctgttgggtttttgataaaaaaaacaaaagaatgggaagcaaatggaggaaagcaaagttggctctgggaatgaatctctgtttatatgttccaagaacattagaggactcccctccttcccttgacacctccgatagattgtccgacgcggctctactttcgccggccaactgggccgtcagctcctccaggcccgccactccagcaacttcttctcacagcttgaagctctctagaagtgccagtaaatcgtctaaggtttgttctttgcctccatatattatctttcactaacttaaactgtcgtttttttcttcaatgattctagaaaatctagttctagattttttttttcttttggccagtgatatactaatgattatcttttgtaactatttttctttcttttgggtgtttatagcaccagatatttatttagatgtcttaataactgaagcagatttttatttctggtattattttttgttttcgattgtttggcatatttggatacaaggaggtgaaagtgacactttttcttggaattaaaaatggggggttttagtcttaccacaattaggaactttgattagaagttagagataatctattatcgttttaacaacaaatccagggttgtgattttggagattatttcaaaacaaatgactaggacaaatcaaatggcttttaatttctacaaatattatttgatctgcatcaatgtttacactaattaataactgtgattcctttgttaataatatatttatatgaaaaggattcataagattttgtttctcagtgtgtgtaatataatgaagtcaatattttatagcagatatcatcaaagttgttcttttaatgtatttttccctacctaccctacccatgtcatagtagcatttaaatgcaagtccctttcaagacccttgtttggctaagcagtgaaatataactagtagttttactcttttccttttcctttttctcccttttgagagggaaaacaaaggtgaaattggtcatttgctggcctcatctgatgagtctgttgatatcatcatctacaagtgttctgccattgaatttcatcaaacaagtaaaagagaagaaagagaaagcaatgtcataaagaaacaacttattactgatggttttacttttctccatttgtatcattgtatgttgtcttggtaaccttttcaaccttattatattaattttgtgaattattatttctggtcaatgataacgtctcacaagtgaacacgtatgatacgtttatttcttttaatcttaatcgtttcctattattctctttatttgtagggtgccaaaacattgacttttttttttccttcaagattaatagctaagatcgaaaactcttttgaatatttgtcggtatagataattgtactttctggcctacccaatagaaaaaaaatcatctttactaataacaatgtgtggcacaacttcaaagacctaagaaaataaaatttactcttttcttctttctagtttcatgttcactttgatggtccccccctcctatgttgattgagttaagcaacaagtttcaatacttatgtatctctttttcaatctttgacctttgtttgatatatttatagaaatgaaagtagaatgtatataccatggatgctgatttttttttttttttaatttgtgccatttttcagcaaacatgttctatatgcttaaccaagatgaagcaaggaggaggacatgccattttcactgctgaatgctctcattctttccatttccactgcataacctctaatgtcaaacatggcaaccagatttgccctgtgtgcagggctaaatggaaagagattcctctacagggtcctccaactcttgatcatcctccaccggggagaccaacggcgatcactccggttggttggccgcctcaaagtgatgctgttatgactgttgttcgccgcataccttctcctcgaagggacttaaaccgccgacatattattcctctgtatcaggctcctgagccggggatattcgacgatgacgaatctttagaggagagtaatagccagcctgcaatgtcaaacagaagcccttgcaataataatgaagatggtacaacagagaatgttccttccaggacaatagagatcaaaacatacccagaagtttcatctgctccacggtcaaattctttcgaggatttcactgttctggttcatcttaaagcttgtgcaacgaccaaaaggcataaccacaccagaaaccagagcagctgccttcatcaacagcaacagctttctcattctccccgagctccggtcgatcttgtcacggtgctcgacataagcggaagtatggcgggcaccaagcttgcattgctcaaaagggcaatggggtttgtaattcagaatctcggctccaacgacagactttcagttatagccttttcctcaacggcccgccgcctattcccgcttcggcgaatgactgatgtagggcgacagcaggccctgcaagccgttaactcattggtcgccaatggagggaccaacattgcggaaggtttgagaaagggtgctaaggtaatggaagagcggagagggaagaatcctgtggcgagtatcatattgttgtctgatgggcaagacacttacactgtaaatggctctggaacgaaccagacccaacccaactaccggttgctcctccctgtatcaatccatggcggtggtgacaatgcagggttccagattccggtccacgcatttgggtttggtgcagatcacgatgcctcgtccatgcactcgatttcagagatctccggtgggactttctcgttcatagagactgaggccgtgatccaagacgctttcgcacagtgcataggtgggcttttgagtgttgtggcgcaggaattgcaggtagtagtgcagtgtttgaatccaatggttcgggtcgggtcggttaaaacgggaagttacccgagccgggttggggtcgatggacgaaccgggttcgttgacgtaggcgacttatacgccgacgaagagagggactttctggtctctgttcacgtcccggctgagcattccggcgatataacatcgttgttgaaagtgaattgtgcttttaaagatcctatcactaaagaaattgcgacaatggagagtgaggaagtgaggattgagaggcctgaggtggtagccgaggaaggagccgccgccgtggtgatatcgatagaggtagacagacaacggaacaggttgcgagccgcggaagcaatggctcaggctcaagccgtggccgaacgaggggagttaaccggcgcggtttcgatactagagagctgcagaaaattactagcggaaaccatatcggctaaatctcgagaccggctgtgcgtggcgcttgacgccgagcttaaggaaatgcaagagagaatggcgagccgacacgtgtacgaggcgtctggtagggcttatattctgtcggggatgagctctcactcgtggcagcgagcgacggcgaggggtgactcgactgatgggtctagccttgttcaggcttatcagacgccgtccatggtagaaatgcttacaaggtctcaagccatgttgctaggtagtccttcggctcagagacttgttcagccattatggtccattggatcacaacccaaaccaaggtagtccgttcgtatgagggtgggggccacatcttttaagtctttttcaacagctctttcttggtgcaattttttttttttcttttttttaattgaagtttttgaaatttggggttttgttaagaggagagagagaaaagatgaaggagatgtttttgggaaaggtttattggggatttcattttgctcatgccttgtaatgtgtaaatgaataaggagtgagaaaatggtgaaatatattatatgttggggggaggaaaacaaaagagaggcacactaagtagggttcttattaagtttaagtttttttttgggggttatttttatttttaattttttttgggttttaattaattgtgttgggggtggtgtacatagagatatggatatttttctctctgggaaaatgggtataaagtttggcattttgtgaaagatggttgggttggacagtctcatcacctgaatatgtataatctacctgctctcaattcttttttctttggcaaaatttgcaagttgagttcatttttactctccatatctctttcagttcttttaattattaataagtacgccgcaaaagtgatactgtagacatgattaaaggtgttgaggacttatcaattttctactcaaagaactaccaactgttcaccactgcaattaatatatcccacataaatggaattacattgggcaatttgtccaatccaaaagaaagtgccaaacatcattgggatgacaaattccagtcccactcgctatccaacgaaaaatgccatttatgaataagggtattgttatggatcactatgtttattgtacataatcagaatacaataatcatcagaataaattaataaagaaatataatagaataaataaaaaataatcggaatcaatatttgtttactaatttttttttgaaaatagaatagttataatttatcttgtttatttattaagaaatgtaatcggaatacataaattgaccaaattacctttttaagttaaattatattatataataattattttgtaagacatattttaaaggataaaattttttattatatatttaatattaaaataaaataaaaataactaaattctattactcctaatgtcatttcttacaaaattagtagggaaaattctccattatctaattaagttctccatttcctaattttaataatgtaagtaaacaaatgttagggaatgattaccttactattaattcccattacttattagtaaacaaatataaaagtacttaatacctcgtattttttaacaattttctatcaataattaaggatagtatacacttattattactattattttgaaaagctaaattaaagagaagtatttgtaaagagaaaagatgcggaaaaaggaggacacaatgacagtaattgtagataccatcaactaaaagaccattactttatagacagattagattgatttttcaagccatgtttcatactttagtctgcatcggaactttaaggattcattcatgagaaactctggtaaacaaacctattgactaaaacaaatattctaaatggtaattactaatggctaaatcaggatctaatccagaacattgttttcaaaacttcaacaccaaaacgttgtcgtatacaagcccaaatccgaataggtaacatcatttcaagcctattcaccagatattgatgtatacataatttattattttcacattgcaacatcaaaaaaaaaaaaaaaaa

SEQ ID NO: 13953 - DNA, 2341 bp, Cannabis sativa
  modified_base (2143)..(2144): a, c, t, g, unknown or other
agtgataaaagtaaaattttttgttgtgaacataattggacagaaatctttgaatctatccaacaatttaaatagttcaaagaaattttttaacgacctacaaaattcaagagacgtaaaatttaatacaagttaaagttctttaggaaaaattttaattatccaaatatattaccatgtccttatgtctctattcctatatatgttaattttctcctgagtgtcagctaatttttcttccaatttggaaacatgtgaattgacttgattataaggctctttgtatttttcagcgtgctctttctccatttcgacagaagtcttgtaattggaaacttcatcgttaaaataatcttcaattccttgtttgactatagccttagtttgagatttagtatcattcaaagctttgatagcctcttccttttgttgctcagaactatcacgttcactcttcaaggtctcaatttcgtaagccaatttgttaaccagggaagaacacctgtaatacgctaacattaagaaaatagattagcaaatcctaactagttaatgtgtattagtatggaattatattaatatataatctattatatgtgaattagtctgatttataatatgttaagactccgttggtgagctaggggtatttttgtaattttgacccgagaagggtaaaactgtgaatttaatttaattgtgtgcttatgggactatattattatatagtatacttgtcttgtcctttttcaagtgttttctgacaggtcggcacgatatagtcacaattgggaattttgggctgaaccgagttcggggccaaaattcattttcgggattatttattggcattttattaatatgtgattaatttgaaaattatttgaatatgtgatatgtgatatgtgatggaaatgacctatttggccttaaatgaatatgtgtgttatatggttctaggggtatattagtcatttttggcatttgaattatttgcaacaaaagagattttcggctgaatattgaggtgttatttattgctttatttcttaccccaaaaccgacccctctctctctctttctctctaaactcatctttccaagttttgaatttgttgagaaattgcttgggttcaagcttgatttgtgggaatctttggagcttgagtgatttgagatcttgaggtagttctatctctttttgtctttaaattgttgctacaaatggaagttgagaattatgtctttgagctttgaatattcttgaatgcatgagaagttaaatggtgttagatgatggtgatattgtttcttaaacttgcccatatggggattttgcatctttccttgttggtgattatttagggttgtttttagagtttaaaaatctgatccttggctctagtttttagttgttggatgttagtgtaacatgttgtaatatccaagttcttgagtttgtgatttgggtgagtctcaagtgtgaagcttatttttgagtagtgatttaatctgaagttttatgcattaagctgtgatttttgagctttaaatatatttttttgccctctgttatgttgggtatttgtgtggagataaatgtggtgtttgagcatattttggcttagtttgggtgtgtttgagcaggaattttcgaggctgaaaattgggattttttgggtttaaaacccaggggtcgcggcccgcctctattaaaatcatgggttttgaacccaggtgttgcggccccatgtggggagtgtcgcggcccgccctacgtttttgggcagattcgaacgcgttattcgaatccttgtaactttgtgatccagactctgttttaggagttctatatatcgttggaaagctcgttctgagctctatgtgattatctagtattttgaatgctagttttatattatgtgaaagtggatttagggattaaccctatacttgtgaatctcgaaaattgtgattaggattaccggtacttggtcaggagcacccagagatttgaaatctccacgtttgcaggacatcaagtaagacagtagttagcacgtagagttatgcgcggtgacacttatattgaaaatgatacatgtgagtaattaggaaccggaattagggttattaccctaanntgagcggtttaatggcatagggttattaccctaatgattattaatgtgtaaatgctatgtcatgttatatatgtattgagaataaggattatacgttaaaggtataattgggttggactcggtaactagaaccgagatgaaccgttctaaggccttattgtatttagacgtgcgagcgtaacacgtaggtttatgcc

SEQ ID NO: 13954 - DNA, 2386 bp, Cannabis sativa
tacataaaaatattgcataaaatgcaattcaatataatacaatacaatacaatacgacctagtacggcattccaaacgagcccttaatatatatgtctagcacttcaatgacagaatgaagtgtgtcgaaatttatatatggacttcataatttaattagctcttctccatggatgtggaggcatctgctccgacgtcgtttgaggctttcagagactgactacgaatctcattaatggttttcttgccagaaagaacacttacaatatcagctatgtccggcctcacagttggggctatatcagtgcacatcttagctaattttaagatgttagaggcttctctatccttaaattctccttctaatcttttatccaccaactttaacagtttttcctcacgatatgaatggacctgcatacatgcatgcatttacgtatccgcatgtaattatatacattttaaaagtacggtagagttttatttaggtatctgcatgaaatttctaatttgttataaaaaattaaatttcaatttaggtcggttataaataagaataacttagttatacattttttaagtttaaagtatatatttctatatcagaataattttattttaataaaatatatacatatattaaggattattttaataattttattttataaattatttatgtaaaataaataattctaaattataatacatctataaatatggtatttacttaaagtaattataatattaaggattctattatatttattgttgttacaattacaacgacatttttcgatcggtattttaattattttttctaatataactctatttagatataatataatataatttatttaattttgaataaagattgtactatatattcaattagttagttcagtttataatacttttatacctcgtcgagaagaaaaactgtttcttgtttggatttgcgcactttattctgctgcccacatacaatttcaaggagtactaccccaaaactataaatatcagtttcagtcgttggttcactaagttgaaaatactcaggagccaaatatcccctgcatttgaaccaaaaggtacgtaattaaacattaatcaccaattacgtaataataaataaaggattatttacaccatatgattttgagagtttggtcgatcagtgaaccaaatcaatttttattactattgtttttttatatattgttcaaaaattagattaaagaataaatattataaacttacaagaaaaattattcgaatcaagattacaaatttacaatttacaataatatgaaataaacatttatttttaaaatagaaaccaaatattaataaatcaaattataaaatccaaagtactttaaattaactatatcctgaaaaaaaaactattaataccaaagtgaaaaatttaaataaaaattatttaaccattaaacacaatttatatactacattacataatcagtttatattcggccagcttagaatagattagacaaatttatttatcagggttgtaaggttaattggtttaaaaaaaaaaaagaaattaacacccttattggaaatgagtactaccaaaaccttgcttctttcaaaattgaattagagtgactaattttgtgggacaaaagtatatactaaaacaggcagagtgcacttactttgtagtctctgctttaataacggaaaattgatcttcctcagaatagacttttgctaatccaaagtctgatagtttggcctgataatgttcgttaagaagaatattggcagtcttaatattgccatgaactattttacctcttggacgcttatgcagacccttcaaacccattgctattcccttacatatgtcaaatctatctttccaactaagctccgatttatctgaatctgtattattatgtatatataattaataataattaactatcaataatatttatgacacaccaattaatcacattataaattattatatatttacgtaccaaataagacacttgcaagggatctcttttccatatattcgtaaacgagcaactgttggtgttctccaatatgagcatcccacaatctaatgagattcttatcttccaacgatttcaggttataaatttcacctttcactatttcattgatttttcccttataacgatgggaaagttttttcacagccacagtgatgttatgatgttgatccttgtcaatattcatttctgcctaaataaattaatttattgagaaaaaaaaatgtttaggtccaaccgaaatgtgtattataaaactttgaacggaaaatatattaacaatttcaccttattactaactaattagcaatatctctaatggtgttttc

SEQ ID NO: 13955 - DNA, 1074 bp, Cannabis sativa
ctaaaatgtgagccacaatattggcttctctaaaaacaaaaaataaatccaataccttcagatgttgcaacagagaacgaatttggtgtagcaaaccatcaatgtctcgacaactcttatttttttcttcaataagatgaaccgtccttaaacaatttgtttccacactaaattaatgtcccaatactgcgttgaatcccagccataattccttcccgaatacccaatagttctgcttcgaccactatttttttctgttgtataaatttggttgttgcaaataagatatttctattatcccctttcgccacatagctcgtagcaaaacacccttctttgttgtgtagccccgcatcaacattgatcttaagatagccttccattggtcgggtccaacacacattttctctagcagtagccgcctttgccctcccattatttatatccttatattcttgtaaaaacttaccacaccaatttatcatgtctccatcatgcggacaaacccccagtgaccaacgcttgttcgaatgttctaagccatagtaaaaaagaaaccaaaagtagtagcaggccatacttctttcatttcttccatgaaggtcatcacatctgaacttcgcttgtctttgaattgatgccatagcccatactgtttccaaattcacacattgtaacaacaaccccataaaacatgaaaacatttgctttctttcccttagaacacagagtacacgtaggattcacagacaaaccctatttggataaaacataattcgtagagagccatttatggcatattttccaaatgaaatgcttaatttttggaggaattttttgcctccaaagcgaggtccaccatgcttccatcctaaaagagtttgactgtgccgactcctccctcatagccacaaccgttttatattcgcttttaaccatatacgcaccatttttgcttaagtgccatagtatcttgtcttcaagatcgaagtcaccactaggagtactcaaaatcaactcagtattatcattgttaaacaaggcccgaacaaaatccgtatcctaagaaatatt

SEQ ID NO: 13956 - DNA, 2822 bp, Cannabis sativa
caaggatacaaaagaaaaattgaaagaaacaaaccttggccctaagatgaccaactggactgctaaattcagggaatacatgctgcaccaacatacgctcaagttctgatttgtatggttcagtttgctgcaatttgtcacagagagctccaatagcaagaagggcaccatctttttgtcgatagggcttgtgttctgccggtgcttcgtcatacctgctcagtgaatgaaaagtcaaaaccctaacagaatcgataataatatgttcaaatttggctaaggacagaattgaaaagtacctcttaaaaatttcaactataaactggataaactttggaagattatctccacgtttcctaactaactcgctgacaaagtccatggaagcagtccttggactatacaagtcttcaataatatctacagggaagcaaagaagataataataatatatattaatacacacacatattattgatgaaaaataatatctactcagacacttaccgtatccttttctaacatactcatgaggatcctcttcccaaagcttctgatcattgtcattgaagcacataagagggaatactatctcaaaaagaatgacctcaagtcgaggttgcagaagagtatacatacttagcttcgagatactgcatgtttgtagaataaaagcatgtttagagagaggggactacttttgtgcagacaatttgcttattactcataaatatttctagcataaaaatctacaaactacaactacaacaccacaacaccacaatagcaattttagacagtcagaagtagagtactgaaaccacaaagatgtgctagaagtagtgcctagagagaatttatttcacttttaagccttctgtggttcaaatatatgagttatccaaaatagagtcaattgatttccttgaacaataaaataaataaataaataaaatcactgctgaagatgttgtactcaaaattagtgacaataaaaatgacagaatcatgaaacttttcgaaatggtccaattctctcctctaagtttccataaatgaaacttatccaaaagactacaaccacatgaatccataaacaattcaaaataaattaacacaaaggatttaatctacagaatataaagttacactacctgttgcttaaatattgaagaattaggttggtaactctgtcaggtaaataaccaccaacacgtaccacccccaacagacttaaatgacactccaaaatcttccctgcataagttttctggaacatttgagcaaaggctctattctctggattatgcagtttcaaatctccaaacctgaaagtagttttttatgtaaaaatgggttgcaaagaattaatcctcctgattcaaggctaggtcctaatttcaatttgtaccagacccaaaacattacctggtgaacagcctgtttaaaatgtgaacagtccatttcttcaccttccaccaaccccatgtttttctgaggtcagggtctacgggctgaccatccacagggacgggtctctccaaaacattcaagaacaaaaccatccacgcattgaacacatttggatcaaatagctgctttggaatctccaactagaaaagaagatgtatatatcagtatgaatatcacaaaaataaataatgtgaatcgttatttaaaagatatgagtaaaaaaactacgcctgattaatggcattttaagagttctagtacttggcaccacctaaaaatactatgcctcaaacaaaatacaaaagaacatgcacgttttaagagttctactaatggcaccacctaaaaatactatgcctcaaacaaaatacaaaagaacatgcacgttttaagagttctactcctggcaccaccaaagaaccatatgtaaacacatacgttactcttaatagtgacatatgaatatgaaaatcttcagtcaaatgattatgtatgttattagtattacatagcaggtgccttttactagaaagtaaaatatgagataactagtggcataattgtttcttcttgccctttaattagaaatggacaagtaggcactttaaaattaacttttctcaatataaccttctagaaagacacaagacaagctattaaagcaaaacacgcacatatatagaagaccaaaatattttgcagataagcttgataaaatctgctacatccactggtggattgacaatctggacaagcttgttgaagatattaagcagactgggaaacgtttcttcaacaatatgatggacaggtaccctctcctcatcagacttgaacctaagaatataagaaattttaaaataaaaataatatatataaatagatcaaaaggattttaaatgaaaagattccaaatcagaaaaataaggatttatttaatgcaacattgaccatcaacaatcagattactaacaacaactacacaacacacttttttcaaatgttagtgttaattaaataaaaagcttttgcttgtaatgcttgagtcgattaatccttcatcccaattttcacctatccagtaaaaaatatttgtctgatagggcactagggtccacaacacaggttcaaaagacaatggttgccagaagaatagaaaacctattgacataatttattagttaagggcaaaaatatacaggatctgaaataatatacgaaatgtatttcattctcacatattcaaaagtatgaaatacttccccttgataatctatgtactaatacattacccaatgtttcaaaaagtaaacaaagaaatctgcgggaaatgatatatgaacaataaa

SEQ ID NO: 13957 - DNA, 2839 bp, Cannabis sativa
acgaaacataagaagaaacaaaaacagtagatggagacgaacagcacccttacatgatcaccggagcctgaggagaagagtatcaggtgttatcaggcttcaagtgttcatatacaatccaaagcctggagaatgtccttcttcacgtcttcgaagtcttcgactccaaaactaaacctcaccaagttatccttgataccatacttaagcctttctgactcactgaggtccctgttatttagcaaagcaattttatcactctgcctaggcctcacagtagcaatgattagaaaagctatctaaaatcaatgtatccagagttcaagggtgtttaccagtatgacataattgctggttgatccacaatactctcacacccaccaaaagatggggcaatgtatggaattttaagtgcatcaacgaattttatggtggtatgtaagtcgccatcaatctgcatagtcaagcaatacaccgattcagaatgaatataccaatgataagagggtgtatagagctcttatcaaactcacaaaagaaagctaaatatatgaaaattagtcagcaatgctcacatcaaaactgacgacaccaccaaaaccagtcatttgcctcttggcaagttcatgctcaggatggcttttcaagccaggataatagacatgagccacctgtcatagatgtcgtgataccatcaattcacaataagtgatactaacgaataagaagacttaagtattattcatgtaaagtaaccaaaaattgttgcatccagtaccttaggatgtgcctctaaaatttcggccatcctcgatgctgtcgaattctgttgctgtacacgaagatgcaatgtcttcatgcctcgaatgattaggtatgcagcattctgcagaggaaagtagaggttaaattgaatttcatcctaaaacaagtttcagggcatttgcaaacagtgacaagtgaaaacagccctaaagaacatgaaattcatcaagtaacctaaccttctgcaaaaacattaaacaaatattgaaataaagcactacatggtatcattatattataaagagaactcaccgggttgagagcaccacccatgatatgatgcaaattacgaatttctgagatcaacttaagaggaccactaatgcatccagcaaggacctggaataagatacaagcttgttagcactcatttcaataatcaacaaatgatcatactctaatctgtcatggttgacaaatacaaactgacttacatcattgtggccgccaatatattttgtagcagagtgcacaacaagatcagccccaagagcaagtgccttctggttgataggagtggcaaaagtaccatctatacaaaccaatgctcctttgctgtggcatagcttagacacgagctcaatatcaacacacctaaggaatggattagtaggagactcggtgaagaacaaagaaacctgcataaagcgtaaaatgccactcactttaaatccccatgattatcccggataatacataaaaactaattgaaagcactcaatttctactgaccttgttcttatccagtgcagcctccaaagctccaacatctgcaggatcaattaccgtagcctacatattgattgataacaaaagtcaagaacaaatccactacaaatagttcatcatttccaaatcgtgtataacccgtaccgatattcccatcttgggtagaatagtctcaatgaaaatcctagtcttcctataacaatctgtggttgttacaatatgcccaccagctggaaccagtgccataaacaagagtgtgctagcgcacatcccagatgccactatcatggttgactcagctccctcaagcgcactgatgaaaaaagataaagacaataatacacagtgtaattagtatccaaaaaatattgaagtactggaatcagaaaaggcatcaaaaaaagtagatgtatcataatcaaaccttatcttctcctcagccacaaccgtcgttgggtttccatagcgaccatattcaaaacttacagctcgtttctcctgccatagcattaagaacattaaaccaccaaatcattaaatatccattcaacaaagaaagatgcccactaattactctactcttataagctacttaatttcaaccaaacaaaaatggggtttcagaaaattaatcaataaaccaaaaaacgatttcagtcctaaaatcgaaaacacaacttaaaagattaccttgaaatcaatgaggtcggcagttttcttgaaaaaataagcagaagtattgaccactggggtagtaattgcatcagtaactatgccgcgacccaatcgttccccttgaaaattacaagaacatagatatgaaaataatcagaagctaaaaaacaaacataataataatttttgaaaaaattgcagaaaacttgaagttttgatttatatataccagcatgaatagtgagactcccatcggagctcaagaacgaggactccttcaaagcaggaaagccctcgtcaaccggtggtaagcccccatttccagggaccaccacatcatcaccggacgcaccctcctcaactggcgcaaccggaacagctgcggtggtggcagtagaagccgccggcaccgccggaacaccggaagaggagttgttcgaccacgaagcggcgacgatctgagcaacgccgatgttgctacagttcctccgtgccttagtgctgagctggcgcacgaagttaggaggaaaccttaggatcagagaagaaaggccgtgagagccgcgagccgaagccgatgggtctacacgcatacggaagcgagccgaag

SEQ ID NO: 13958 - DNA, 899 bp, Cannabis sativa
tatttaatattgcatgttatccgaaatatgacttccatgttatctggattatcaggtatgtaagcgtaaaatattaacggcagggagggaatatcaaacacgtggctacacatcagtgggaccaatgccacctttctatgtctttccatgtgggcacgcctttcattcacattgcttaattgcgcatgtgacccgttgtacaaatgaagctcaggtaagttggagtattttctttcgtatttgttgacatcaatttaagttgtttccagttataaaaaacagacagttctttctcgttcagacctgatgtttgttcgtgcattgttattattgcaggcggagtacatactggatctacagaagcaaattacattacttggtggggagaccagtagagattcaaatggcagtttaacagaagaatccatatccagcatgactcctgtagataaggtcagtattacatttttatcactgttagagttcgttacatattcttggttctatcttgaagaaaattgaaatttgtgttgccttgttagcacgttgggcttgtgtttctagtttgggtcatgataattttcattgcacagcttcggtcacagttggatgatgccatagcaagtgaatgcccattttgtggagaattgatgattcgtgagatatctttgccttttatactccctgaagaagcatatcaggttacttcgtgggaaataaaaccacataatcttacaaatttgaggtctctttctatgcctttgtgatcacatgatgtgtggtcataagctcttacattgcttgttagagactttttagtgtttcttcatattttataatattttaggtgtggaattgggtcatgaaaatgccttttgtttcccttatttattattttg

SEQ ID NO: 13959 - DNA, 2459 bp, Cannabis sativa
tattcagtaagttatttgcactattcaagtccccacacttaccatagaaattagtcaatgaactagacaaaaccgagtcaacttccacgttatcaatcacaatgcgtgcatggatttgcttcccgcacccaagagcagccaaatcagtacaaaccccaattactgttgccaatacaaatttatctctatatgatacttctaaagggtttgaactcaagtgcttgaagaatcttaaagcatcttttctctgcccattatgagcaaacccgtgaatcatcgaagtccatgcaacactatttttgctaggcatctcatcaaacaaactgcgagcagtatctatccaacccgcctttgtaaaccccatgatgactacattccaagagaactcattcctttcaggcatagtcttaaacaattctaatgacattgtacaatccccggatttcatgtagccttcaatcatggtattccaagagaaacagtttctatgagtcatttcctggaacaaaatatgtgcatccctcatgctgccacacctcacatacatctgcagaaggcggtttacgatcgttacactagattccagaagcccaattttgagaaaaacaaggtggagctgctttccttgatgtataaaatggtgggagttgcatgattggagcatgtgtatcaagtaatgaacatccaaactcatagagacgttgctacttgtgcccacattgctagaatttacagaacaaaaaaaatacgaaatataattcaatcatcaaaagtagacagagtagtggaggagagcgcttcaagaacagagtcaccaattttcaatggatgagagccaatattgaatttcgtgtgatgagtgatcgctaactctttcgtaaaataatcttttagtaaattaactttccaaataattttattagcaaaataactatgtcgtgcaaccaaaaattacactctgcaaccataagaccgtaatggtcgtttgcaaccataaatttacactacacaactatagtgagttgtgagtataaattcaatttggttattttaaaattattacaatttcgagttggtagttagcaaatttaactcttatgtaaaaatagtctttatgaacatttttattagtaacataactttccaaaaaatgtcaatagcaaaatcaccacctttggtcgctattacactctgcaaccaaccataacacgaccataatggtagttttgcgagtgttttgtaaaaatagactacgacaaattttattagcaaaagaatatggtgcttaagcgaccataagttacactgtgtgaccataaacgacgattatgcatagagtaaatcgagtgtggttattttacaaactttactatttcacaatgttagttgggcaaattttccattttgcgatcataaatttacattatgcaaccatattatagtagcacaatatcaattcaatgtgattatttacgcaaatgttataatttcaagttgttagttttgcaaatttccctaaactaaaattaacaaaaatccatactttgataaacaaatctctaagttcctcaatacaaatttaaaattatgcaaaccctaaattcaatcaatcaagctaacataaaagccccaaataaacaaaattaatcaaatttcaaagaaaggtacctgagacgagctttggagagctcccaatagcaacgaccatagtgtcgagcagagtcagaaacttccctagctttagaggagaaatcaatcaaagccgattgagctccaactccaactccatgagatggatgtaaacctaatttgaccgattcttcaacggaagaggaaggagaggttgatggagggaaagagagagagagggatcgaacgacgccggaaagagaagaagggtgaatttttcgggtggtggcgagtttggaagagaaactcagtgagtttctccacatggtcggtgacgagtcggactgagaaactggttctcaggtcagccggagagagagagagagagagagagagagagaagagagagaaaggcttcctttgcttctttttgttcgcattggggtattagattgaaaattatgtgttgggaaaggggtataaaggtaatttcatatatacaacgtcattattttaaaaaattatattatttatttttctaaaatagctaattaggatattttttgagaaaaattatgacaaaaattctcaaaaagtttgatgcagataaatttccaactttaaaaaatagcggtaataatcttcaagctcgagattcttgtaagttcgttggtctttttctaataaattggttaattcatttttaaaatgtcacgtgttgatattaaattgttacataactccctaaaaagtttactttgatgcagataagttctaatctctaaattttttttggttatagtccctagatattcttttttttttttttt

SEQ ID NO: 13960 - DNA, 1582 bp, Cannabis sativa
aaaaaaaaaaaaaaaatgtcacaaaactagtgcaattttaactcaacttttacatctcacacgattatacatcaagattgattacctatatcaaccatagaattataatgctaataaaaacttaaaaatttcttaagtttgaacaagttccaggctgaagtgaagaactaaaaccaagaaccgatcttgagagatcaaactccaaaaagttgtccttcaactgatgcccccctaagactattgaagttgttgcttttactccaccatctacaaaccccaaacacaacgtattcttgtcaactctcaccatcgaattggcaccattgatattccaactcagctttcccattctccccgataattccagagcgatcaacggcacccttggtcccaactttgtccaacgaacacccttgacgctaaaacacgcgtcaaacggcttcacggccgccgctctagtgatattcctcgccgcggtgctctctacgaaagcgccaaccacagccttgtagactgagctgtgaagaatgccgtaaggaactgtggtagagagcttagccgagccaattattaccgtttgtgaatcgaaatgaacgacccttttgtctatcttaactgatttcacatcaacaaagtactcgttggacgtgggcgacagaacgagtcctgtaaattggagcaaactggatccatcaacaccaccagcgaacatgtagggcccaggtccgatgaagaggtctccgaatccattgtcattggaagaaggtaagcatagagtgaatttggggatgatattgaatgttgaggaaagccgattagtcaacgtgtttgacgttcttccaaggccaagtattccattattatttctagagtttgagtttaggcaagaaatatccaagcgggtagagtttgtgtcggcgtaaaccatggtgccatctgttttgtgaatggtaacaatgtcgtcgcttagagtaccggacgacaaagtacaagcccctttggggtcacagacaccctttaagttttgacactttgtggatttgcatgggacagagcggagcgtggatgaggaggtgttgcagggcaacgataagaagttgcctccgagatcgattagggggttcacattgtgtgaaggagttcctgattggaaggaaccgtggtattggtgggtttttggatctactgagatggcaatgtggaatgcatcgcgattaatgttgttttgtgcatttaatgagtttagaatattagagacgaagaagagaacggtggagaagaataagaagttgggttttgaacctttagataaggtcatgatgaaggagagaagagatatgaatgaatgaggatatgtgtgaatgtggaaggtgttttatactgaaaaagttggtatatattttaataataatcgttattttcagcacgttgtagaaatcaatgcatgaatcaattaagttattgttgtactagtaaacatgtgccgctcaacatatctatataataaaagatatatctagatttatcagtctatatatgggaaatgctaacggcaccttaaggtgacaatatatatatatat

SEQ ID NO: 13961 - DNA, 5054 bp, Cannabis sativa
  modified_base (4988)..(5005): a, c, t, g, unknown or other
aaatgattttatatataggaccctgatgtcttcacagatgaaattttgtgccacaagtgttgcacaaatttataaccgttggattagtttacttttcaatatattttttttttggataaaaactacttttcaagtactttaaatcgaagggctcataacaaatgttgttaaataatttttttaatagagcaaggataattattattgtaaattgaaagagttaccaactattttataaattaactacttgtcaattactttattagttcccgcagcaagtgacatagtgaataactctcctctcatttcaactttcgcacacgagccacgatcaagatttcgtctttaagctcttgcttctgaggatcaatcttaggatcaaattgatttgtacacacatcctcacagtaactaattagtctgaccaaattctacacacaaacacattaataaaactctaagctttaagtttctcactgtctctgcactcaggctaattaaggattagggttcaactgtcatccaaggtaaaatcataattctttttaatttttttaatggatttaattgtcttaagttatgaataaatttttctttgatacatcatcaagaaaatgtgattttacaatttctcatatttcttattatatatgggttttcttattagttaacaaataaaataagtttgtattcctggaaatcactccctctctctctttaagcatgcaaaaaaaaaattatttatttaaccaaatataaaatttgagcaccattacatttttattaacccaatacagaagagaatgaatttatttcattataataagatttttaacaattttttgcaactctaatccctaaacaatgttttctttatttttttatgcaaatcattgcacctctgatgttttttcattgaagttagatactagttatgtaggttttcaatattacttttgtgagattcatcaaaagaaaaaagtcttttgctgatgcaaatttgtgtcaacaaaactagacgcaatgtgcaggtacactttttgtcggcgcataaccacgctaataattctagctggcaatacgtggtcaataaaaccgtgtttactggcgcaattagcaaacgtgctgacaaaataaggttatactggcaagtttcttcgtcgacaaaaatggtctcgccagtgtcaagtgttggctaaaacttcaatttggcaagaaaaatggtttttggcagcgcaattatgcgccaatgaaagtttgcgcttttttttttccaattagtgggcaatagttttatcggtgcaaatatgtattggtagaactgttacccgcacaataaaatatgacgggaaatagttatattttgtgcttgtaaaactcttacccgccatattttattgtaggttgggtaagttttgtcgacgcatttttgcgatggtaaaaagttgcttttttttttaaaaaaaatattttgataatttataataagtgttgacctcaaattcggccaactgacagcagagtcatatttattactgatgctaccacatgtacacgataagaagaggaaaataaaggagacacaatatttttatagaggtttggctcccttagttagcaggtaacgacttacttctcttttagttgtattaataccagagataataccacttaaatcacaaaggttgcgaattctgaagtggctctcttaatagtacaatatgagaataagtaggcaaatctcaagtgagagagataacttggggcgtgtagaagggatgaaaagagagaattagggttttagacttagagcttgagagcttagagaaattgagacttagaggaattagggttaggttaatgctctttatataggagagcttacaagagattaataacataatatccctaaaaataggaactataaagtatttattacatcattaaagaataaataataaataggttaattatttcccaggaataggtgaataagtgatatttctcccctaattttgtgtgttgttgaagcccaaatcacagcttggcttgccatcccgaatgaaggctgcacaccaagtgccttccaagtgcaagctggccggctaagtgcctgacagggtacaagtaggctggcccttcattttttggtggtgggccggcctatgcttgccatagggtcggttagggggggtccagtcagaccctcaaggtgatcggttcattgtctctttgtctcgcttaagcattcagacttcctgtcaagtgatgtgttacgtagatgacttagccttcttgttaacaagttgtactccacgtggcaatgatcttgaccgcgtggacatgccacatcatgtgggtaaaaattgggataacatttgccttctaagtccctgtgcagacaactgtacagatagggactttctagcttagtttggattgatggagccttaactgggcaaatctttcagtatatttctttgaaatagttactcttgcttgtctgatcacattccttagcagaaagttgataatagttctgcatgttattttttgcgtgctgcatggtaagtgagagagggacccaccagaagctatataagattattggtgttactcacttctcattctctctcttcaaaaaaggcaactaaagaaagctcttcactttccattgaggccgatgccgcatagtcctctaatactcgagatttttgctttgttttgacgatccaagctttccaccatcttccttgaaggtttctactagtgggtaagctttcaaatcctgttctctacttgtttacttggatttgccattgttttattgaagctttttcatgatttgaacattctttgattctcacattagattgtaatcttttggtattttgatctgcatgatagttttagaatgcataatgtgtgatttcctgacaaaaaagattcaattttggcctttgttgtaattatttactctttcattcacgaaaaatacgaagaacatgtttgagttttgaaaaacacacattttgatccaaaacaaaccctggccgaccctagggatcttatttgagacctggctgaccctcgggttttttcatggggttggtcggttctacggtttcaccctataagctggccagttcatgcctaggtttggtgaccctagctaattcttggctaggtcgtgggaccctggccgaccctctcaaagcttgggaaccctggccggcctaggccttggttccaagtgcctaggccttggttccaagcgggtggccaattttctgtcctcttttgacctcggtaagaatcccgccatggccttgtaggcatatacaaccttagtcctatacgtggtttccttagaaactctatacgaaacttaatggtgagtctattatagtcgaatgctcaagttaagactcaagatttgtccaagttgttacacttgagactatactttgctgataccccaccttgtatgatgaaattatcaggcaagtacccttgggtacgattgaccagagctttgtctataccttgccgctttgtcaggttgttcagctcccctagttttttgtgtgcagatgatctcgagtgacagttgggggaggtgataaccgcatcgacaaagatttagttggtcttccctttgaggactagtgtctagttcattcctctagcagctcctcgagcgatctcaaggttagtagtggttcattatggtaagagtcaagcatacatgtcgcagaccctcatattgccaggctggcgaccagagggagagttggtatagttaaggaggcagcacatcctctggatgacaaagagttgggggctggccaggctgaggcacctgtggccgtggatagctcggatagtgagtccaagattgaggaggtagtgcctactaggaggagacagtacttgacatgctctattttcctcaacaaccctctaggttcatatgatgaggcttggagacccttgaatagcctcagtcaactttctgaggtcggagtggaccatgctatggaggaggctgcatagcctcaagttcttaattatggagagcagttgaacaggtggatctctcctccatcctctatcatcactcagacacttgacaagatcaaggaaagtagattggtgggacatgtccaatgtgataggcctttgagaacccaacgagcacatggactgaccttcaactgaatggcgtggttagagcgccatatagagcaaggagcagtgttgcctatttaccgagatttttgaaaaccaataaactagagcttaaggaatatataaaatagtaaataatagataagtaatttttacgtggttcaggcattaataatctctagtccatgagttcgttatattaaccttgcaggcgagtgtttgactattacaagtgttacaatataaaccctagtaatgtattctgatgtttctcttaaagaagaagaaagcttgtaagaattttagcaaaggtttgataggtatgaaattgttcatcccttgtacatgaaaagtgagggtatatataggcacatatacgggtaagggcgtaccctctacccatcgagggttttgtactcaacacgtcacaagggctaatgctacaacatgacgatctgatcgttggatgtttggaagccttcccatcgtgtggtgtgcggccgctattttgtgggaaggaggacacatgtcactcaaacgtttctcctttgtaaaatactaaagattcaggtcgctgtgaaaaaggcatgtctagaggtgtgtatgcgcactaccatgcttggcataggggatgttgttgaaagaattttacaacaccaaaaataaataacaataataataattataaaattagtgtgagtactcgacccagaatggcgagtattcgaattatgaacacaaatacttagcaaaaaattaaaaaaataatgaacacaagaggaatatagtggttcagnnnnnnnnnnnnnnnnnnagtccactgttgcaaagattctcctcctccattttacagcagatcactc

SEQ ID NO: 13962 - DNA, 4791 bp, Cannabis sativa
aaaaaaacttcaactttctccaccgcttagacttcgcgggttgtccaaggagataccccatgttttttataactcttatttgaaatcttttgaaccagaaaacgactccgttttgactcttcgagggagaatggggaacagaaggtttgctcaggtttccactagtgacgaagaagacaacgatgttccggcgcgccggcaacggtcgacttcgtcggaggacaaacagttgaagacgaggaagaggaagaagaaagaggactacgaggaggaagaggaggaggaagaagaagaggaggaagaggatgaagaagacgaagaagaggaagacgaagaggaggaagaggaagaagaagaagaagaggagaagagtaagaagaagaagaggaagaaaaataatacgccgacgaagaaaaagaagaaggaggaagaggcttcgccgccgagcgaggaagaagaagaacaagtggctgaagatgctaaaccgattggggattcgattaagactactggaaaaggaaggagtaagaagaaccattacgaagcgttcgagtacgacggcaatcagtatgatctcgtgagttccaattttcgctcttttttgttttcaagaaaaaaaatataattgatttgagattttagggctaggagtttgattttggaatggtgagtcgtggattcagtattggggttctggattgaaatttgggaatgggtaagtatgtttaggtttctcgtttgccatagcaaaatgaaataagcttaacatttttttttctggggggagaaggttttctgcgtagtgtttatgattcgagctatgataccattgtttttcattattcacttatagtaatgatctgaagttgaaagggttttgtattgggaatggtcagtaacgtaaaaaatacttgtttatacaaacgcaatagattgttcaagttctatttgataaacattctggcttctgggcattaatatagtttcaaaaaagagttaacaaggcatttcgagaactcttaatcagcaatgtcgatgacttggttaccacttaccactaatctctcttatgttcattatgatatgtaattatgtatatgcgtgtgtgtgtgtgtctatattaatttgctgtctttctttctttctttctaaccagtactgatagtatgcaccatgaccaattgtgcaggaggagcctgtattcttagttccggagtgtgtgtctatgtttatttgttgtctttctttttaattggtaactgatattatgcaccattgccgattctgcaggaggatcctgtactcattgttccggagactaggtttcaaaagccctatgtggcaattattaaggtacttgtatactgccttgaatattgttttccaatttagctacgtaagactgtttttaaaactgtagtagaatacgcatgattttatgtgagcctcaccaggcttttattgaactggggacattttatccccactctaccaattaatatgtggtcacatgcgttcatgattgtctttggctgccaattgatgcttctgaatttgtaatttctttgatgttcattctacttaagaaatgacaatcatatttaatagtactgaacctctgttgttcatttaggatattgctcaggacaaagatggcagtataatggtcactggacaatggttttatcgtcctgaggaggcagagaaaaaaggtggtggaaattggcaatcaaatgacactagagagctgttttacagttttcaccgtgatgacgttccagcagaatccataatgcacaagtgtgtggttcattttgttccattacacaagcagcttcctaaccggaaacagtatccaggattttttgtgagaaaagtgtatgatgctgttgagaaaaaactttggaagctaaccgataaggactacgaggacaaaaagcagcatgaaattgatctactggttgagaaaactatgaagcgattggtagatctccctgacattgagcctgaagatagcagtgtggatcaggaagatcatttaaagtccaaaagaagtctccggagaaaggccatttctccaattgatgtatctagaggagaagaagatgtaacaaggcctgatcaaacttcgaaatatgatacgcatacgccgggaagctgttccagtaaagcctcagaatattacaacattttggtgaatttcaatgtactacctggtgaaacccagcgtgataaatggttggagaagcttcttgagagtgttcagcatgtctgcgtttctgctgaagacagtaaggatgataaagacaaggctggtgctgatggaagtaaccatgatggtgatattatgcgtccaaaagctgcaaacgaatctcaagaaaagagtcttaaggtacttaatgcaactgctctttttctagatcttccaatttccttttttattatcccaagaagtggcatttgtaattcggatgggagtttcaggaagattttgactgatagtctgattcttactttctttctgttatcatagactggcaacaggacccttatctggccagatgacgctgttccagcagttgctgctcttgagaaggctgcacatgactctttttctctcgattttcggaagtataatcaaaaattaaggcacttaaattcaaatttgaaggtaaagaaactttctatcttaatccaacttcaagtggatttgttgtcatgtcatgtcttgtctttcttaattttcatccatccataaattcaagattgacatcccaattcaggcatgccacaaacacagtcatgcatctgctcttgaaagttcaggttttatatgactgagatgctgaacttggatggctttataatcaataacaattatttcagacctctttggatccttgcttatgtttcttctttatgtctattttacttatcttgacagatcaatgggccacttgccaggcgttttttaaataaagaattagatcctgtgaaactactgaatatgtcacccaatgaagtaaaggtatggacttgatagcagcctcatacatcttgaaagttctgacattttagttatgcagttatttcagttttgtatgtaatgttactttgactagtgtaccagagcttgatctggtcagccatgatattgttcattatatcaattatgagaattttttttttaattttatgttaaagctaggttgttgatgtctttaaactactgtagtgtctagcacacttgattaactaagctttcaaatcttcaatcaaaaaataatttggaactataactacatattcttttagtcataaagtaagaagattattctctctcataaaaatgcatatgctctgagtgagggtaaacagcgtagctctcaactttttttttcagaacaaagcctagccctaaacttgaaggtccaagtctgtataatttctcaccaatgcagcaattttactgtctatgcaaagtgaccttggagggtttcttggtgtgggacaacatttatgttccctgtagttatagtctcaatttggagtgccatgtagtttaagagctggccaaagagaaaattgatgggtgggagttataagaaacgataagaaaaaaaaaaaagatggtgagagtagaacttcatgtcaggttgagcaagatttttgtaatatgcttatatatattaatctatctattcatgctgttgtattaagaaataagcaaaacttagtaatatatcattcagcatattttggattttgaggttttactggacaaattgggtgagataattcgaatgtttagcacaaatgccactaagttgatgatttgaactttctgtcttatttaatgaaaaaagatattgttattattgtttgatgtggtctaaattttgatcggcagcccttaatagaatgataatatgcatttatttgtctcctactttgtattttatatttgctttcttgtttttagctttagtaacaagaagtatagcaaaactaaatatcaacatttcaggagggtttaactgctgaggagatgaccaaaacggaaccagacgagttagaaagaatgcaggtaacttcattttatttcagtatacttttctcctttatattattggttctcattctgtattatctgctgcttgtgaagcagatgactcaagctcgttgctcaagatgttcagagttcaaagttggtgtgagggatatcatcaaagctggacacggagagcgttatcaggtttgtgttttcataatcattttatagtacgtagctgggtagcttctactatttgttgtagttattcggccaggatcttgcttactagctccaaagttatacaatttattttagcagctacacatttggctttagttgtaatgcaaaataaacagaatgtggccttttatattttatcaaagagaaaatgataaacagagattcattacgttgattatgtcgaactggtgatacattcacattaattacattgtaaatggttcatatcatccatatttgccattgaccttttccctctggtttgtggcttcagttggagtgcattggttgtggtcactcatggtatgcatctcgggatgatgcggcagccctgacaattgactctacaagcaatgcaaaaaatgtgggcacagctccattggctactgccaaatttgaaaacatcgaaaagaagatggtaagcccccgggagtctgacaaggaaaagaagatggtaagccctcgggaatctgacaaggaaaagaagatggtaagcc

SEQ ID NO: 13963 - DNA, 5689 bp, Cannabis sativa
  modified_base (194)..(196): a, c, t, g, unknown or other
  modified_base (5368)..(5370): a, c, t, g, unknown or other
cttgccataaacacaagtctcacagaatggtaatacacatgtctgaagcttttcaatgactcccttcttgtgcaattccctcattccttgtgcactcatatgtccgagcctttgatgccatagctgcatatcactttctaaaccttttactgtatctgcctcggccacaggtacagtttcaccctcgagtacannnagcccatgtactctctttcctttcatcacaagcattgaactttttgtgatccttaggctctcgttcaaggacttatagccataaccttcatcttccaaggttccaagtgatatcagattcctcctcaattctggaatgtgcctcacattatgtagaatcttcacttcaccattgaattgccttatagccaccttaccaattccaacaaccctgcaagaaacatcattatccattagtaatctaccaccattattggtttcttgataatcaaagaaagattctaagttgggacacatatgataagtgcatcctgaatcaaggatccactctttactgttattattttctgaaatagaaaataattccccatctgaacttccatctccattggacaggtacatgatgatggtgtagtaagccatctcctccatctctgtaatttcctttggcttcttctcagccagcaacttttcatccccgagtacctttgcagatgatcatcgtaaaactttcattcggtagttaaagaatatcattatagcaaagttgaactaaccgaatcatggagtatctgatgagttgagtcgcattgctcttgcagcaaatttttcggtagcaaagcatgaagcatatattgtaaggggtaaatgttttcatacaaagtcaagagatgatgctcgagaggttcaaaatagtgacataagtatcgtcgcagaaaccattcatttttaaagataaaaaccttgcttaaggtaccgtgacatattatggggttattgaagaaatatgggacctcaattatttttcgtttcgattccattttttaaatgttcttgggttgacaccaatgtttgagtaaaaactgacgagattagttttactttggttgatttaagtaagagaggaagcaagaatgatctattcatcatggctagtcaagcagtacaagttctaatacggctaatgataaatggtctgttgttttatcgacactagaaagtaagttcttagagaatgaagagggtaaggaggatgctaatttatgttatgatgactttattgttgggcaaccaattcatgaacaagttgcggaagttaattgtaaccttgaagaaggcaatgctgaatacattagaagtgatatcaatgagggaatatgggccaattaggattcaggcaaagataaacaaaaaaagaaaagaaaatgtgtctaattggtaacttacttgtgataattttagtttatgtagttactgtttgtaataacttacttttgattgtgtttcgttatgtagttgctctgttatagctaacttgtgattatatttattaatgaagtaatatgacaaactcaggttcaggctcaaattcatatttggacccaatagtagagtgtcctagggtgatacctaagcatggtagaagtgagatgaacgaaattagtaagttaattgaccaaggaaaaagagttactctccttgtcaacaataaaggacaatattatggaaaaaactatagtaagctaatatcgcctttaggagttaaatgtcgtatgacaattgggttgtcctataaaaattagaagcaagtcaaccctgaacattaaagttaaatttgtaaagatatataggtaagcagttactttttaaaatttttatttgtgtttgattaattcagatgttaactctaataatgtttatttaccttataagtagacgagttttatagtttgagatgattttaaacatgactacatggtcattatcgggaagttagtgaaagatttcaagaataaaatgaataaggacatcaaaactcccacattagaagaaaataatttgcaatagttagcccacatccctgaaaagcttcctgaaatcgacaaaaatgactggttgaaatttgttgcaagtttcctaactcgtgaattttaggtactaattatatatgttaagataaacttttaaatacaagtactagtagctaacatattattttttttatggtaggaaatgagtaaagtaaaaagggaacgattaacaaaaaaccaatctaaacatcaaagtggtcgaagcagaatggtgaacgataagagaagatgttgtaagtaattaatataatgaatttctagaaatgtacatcaaaatgtaatactactcatttaagttttgtaaagaatgcaaaaaaaaaaaaaagaaacttgaggtttaggatcccccacgccaccgtatttggatcaaatctcagcaaaaaaaaaatcaaacttgtcactgattacgacaagaaaatcgccactaagatagtaagtattaatcgctaataaagtaataatgagttaatatatataaattatatactaattgcttgaatatgtgcactaggctcaattggaggagcaagttagtcagagacaagttaaggctccatggccaaaatgacattctgacgcacgcgctcgggacaccagagcatcttggacgtgtcaaggctacgaggtatgctagtacttgaaaaatgttatttcattaggaaggcatataaactttttggtaggaagaaaatggaagtttttgatgttgtggcttagaaacatagagagattgacaaattaaaagcaaaaattagatcccttaaatagaagaaaaatgatgtcgaacaagagcaaaatgaggatgaagatgaggaagaagaacatgctccaaattatgttccactagaacatgctcaccaggagtatgttccacaagaacatgcttaggagtatgttccacaaaattatgctcaggagtttgttctcctatatgagccacctctcatgtacaattttcctgaatagagggcagttgagatagtattttcttgctcaaaaaatattgacaacagagtagtcgtagcttgtttgtacgaacatgatggtccaatcaaagttcacaccttgaactatgatgattcacatgcctacgttataattttaaaaatactgcaagaagatgctgaaattcaaatattaattgaggggtagtgtagatatgttaggaagtagcgaacatgttccttccttggcctaaatatttaattttaatatccgaggtaaaatctctatcctagaaataatcattacaaattatacaatacacattttgatatattatggtgttttgtatagggtccacttgctcaaccaccatcaagacgtgctatgtcaaaggaaaaaggtcccatgccttgtcaaaaaggcggtagtgatcaagctgatctaattattcactctagagatcatggatcaactccccaggtcaatctgatgtatagttgaagaatttttgagaataaaaaagaaaaatgctataattccaatttcggtaccacgtggattcataggacctcgtacccagatcacgatatctgcagaagatttacagcaggtgatgttgtgttacttcattggaaactaatgaacgctttttggaatgatgtatactctttttaacctaattaacgttatatatcaatttttactaaaactattataaaactttaatacttaacaatttgatgcaggcacatttgggaggggttacatggtttgagatgattttttatgttgtatgacagagagcttctcgcattgcacggtaaaacgtactgatatagagaaggaacaatcctttaacattgcatcacaaagattggctcattggttatcattgatgaaaaggcaacaccaaatattttttattccctagaatatcaggtaagcactacttaagagataatttaaaattattttctttattaactatttttacaatatcctatatacatgtatatatatattttttagactttattggatgctagaattcattgtgtcagagaaaattatctatttaaaccatatagatggccaagaaatttcttaataaattcatgggatattaaaaatataataatttaattacttttaatatactaaatattttaattaactaagttatatatatgttaattaattaaaatgttaatataattttcaaaagagtgtatacgagattttaaggggattaaatacatttatttggccgtatcagagaatatcgatagaaaattgtccaaaacaatccgaaaataaagaatgtgacatcagtgacatcgtcgtacatgcaaattctaacagttacttaaccgatcatgtaacgccctaatctataggggcgccacgtgtgtgattttataaactagtttaatactgatagattaatttattattaaaaaccataataatattaaaaatttgactaaattaaaacactaaaaaaacagacattataacgacataaaaagcatgtttcgagaacccctgttataaatttttttataaaagaactacatacaacgatgtctcaaaaacataaaaccaaaatacacaatagatactacccaaaataactcctggcaactctgcacgtaggccggtgtggtcaatatgtacattgctggagaagactgtcacctcatggttgatcaagcttttctttacctttacttgccccacatatcactcgtatgtcataaggattcagcaagaaaagtaataataataatcatatagtttattattcgaatactgtcatttatacacgatcagaatcaaaccaccacgaattgttcataagatgaaattcaaatcactactggcatctgccatgaataaacatcagtatgtaaatatttggtaatacaaaactattataccaataatagaattcatattcatttaatcatataaattatatatacatatgtattacctcataactaaccatcttcattacatcacgttgcctaatcaggcaagtcgatactttaatttgataatcctgtattgcattgcctaatcaggcaagcctgtgccatagcctagcacccatatatcgcataactacatcacctaatcaggtgagctcgtgccaaaaatatgcacccatatatcacataactacatcacctaatcaggtgagctcgtgccacaacatgacaccaatatatcgcatcgtctaatcaggcgagctcgtacctatgcccggtacttatcatatgtcactgacgcccgtacctatacccgatatgtcgccaaatagaaacccaacaatggtttcgatctatgccatnnncaggcattttcatatcactgacgctcgtacctacgctcgatatgtcgccaggaaaatcacgtcacctaatcaggtgagcccgcacctatgctcggtatcactgatgcatgtacctatgcccggtacgtcgctaggaaaagtgcatcacctaatcaggtgagcccgtacttacactcggtactcataatatatcactaacacctgtacctatgcgcggtacgtcgccaggaaaattacatcacctaatcaggtgagcccatatattacatgcataatatcataacattatcgatactcaaccaatcaatctttttattat

SEQ ID NO: 13964 - DNA, 4771 bp, Cannabis sativa
tttattatgataatatttgtgatgctatatttttttaaccaagtgtgtgatgagaggttgatacaatgtgtttattataatttataaaataaaacatgcatgtttattactttttttttaccatatatagtttataaataaaaattactaatatatttcttatagttaataaaatatatataataaattgtaaataattttttatgcgcatataatataattaagtactataatatacataaaattataaattccctttttttctccatattttgtaaataacccatctttaaattggctaggcaatatagttaattaatactgcacataaatttcacaaaaatgcaaacccgctgagtgttatatttgacttttgtcttttttaggtttgcaaccacacgagaggtatttgattctaacactattcttgtcaacaaaaaaaaaaaatagtatatgtagatggcaaatccaagtattcttacaattaataataagctagagtcaagatcattggattatattacaaatataagttttaaacaacatcttcacctaagaaacgagaaaggaaagaaaaagaacaaaatattttattcgaagaaaacagcacaagatctttttcatcatgcaaaattcaaaaataacacccaatattgacgtttgaccagaaaaaggagaccaaaatcaacttcaaccattacacccttttacgaaagcttttatttgttttacattatgtacttactatactattttgtttatctgtcaccttgttaatcttcgaattctcctatgaaattaaatcaatggtgtcgaatattttcttaaaatgccacacgtctaattttaatatagtccacatagttttcacaaaactccaaaaatcagtgagaaaaaaaatggaggataaaaattaaaaattgaaccaaatcaaatcttatggcagccaagaaaaataaaaataaataaataatttaataaacactgaaaacgacgtagctggttactgctggcttggtggtttggtctcgttgattggaaaagtgtaaaagctccaaaagaaaattccaatcataatttaaaaagttttccgtatttcaaagaaaccacgagaaaagaaaagaaattttctcctctcaattaagtttggttttttacgtgttgggattcacagtttctcgagaaatggaaaaccaaatcgtgaatggttcttctcatggctcaagtttctctgctctcaattgtatcgatctctcaaacccagatatcgaacactccgtctctttgcttaaacaggtttaagcttagtttatgttccataaaaaaagctttgatttatttgtaatctgtaatttattattttatttatttttttgtttgggtttaggcatgtttggattgtggttttttctacgtagtcaatcatggaataaacgaggaattcatggacgaggtttttcatcagagcaagaggtttttcaatttgccattggatgaaaaaatgaagcttttgaggaatgagaagaacaggggctacacccctgttcttgatgagcatcttgattctgaaaaccaagttcacggtttgtctttttatgttcatcacctttctttgatatattttgggttatatgattagggtttgatggatcagttgtttttcctatgattaaagtaggagattataaagaggggtattacataggcgttgaggtacctgaggatgacccagaagtggaaaaaccattttatggacctaatctttggcctgaacaaggtaactctagttctaagaattagaatctagttactgatttattagtacaagagtttgatataaatgcgtttaatgatgttgtcttaactcttcccattgttctcttagataaattgtctggttggagggaaactatggagagatttcatcaagaggcattgtatgttttatttatgtgataataagttcatgaatggctgtgttctgttccattgaattgtatggagactttgtgatctcatgcaaaaaaatgtgttgactttctctgtttatttagattgattttctcctgaatctttgaccacatatgataaattgtgttatgctcattttctgttcttcgttttccttatgaaaactatgcttcatttgcattcagggaagttgcaagagcggttggaaggatcatagctcttgctctgggactggacaagaatttctttgataagcctgaaatgctaggcgagcctattgcaactctgcgcttacttcactatggaggtgaaaattcagtcaaactttttaactttcatcactgatctcatcagttgttatgattttgatgcaatttcttgtttaggtcaagttacttctgatccatctaagggcatatttggagctggagctcattctgactttggcttgataaccctcttggccacagatgatgtgttaggtctccaagtatgttggcttcttattacttcatgatgtatcttctagtactatttttctaagttggtccctttaccttactcattctttttacagatatgcaaagataaggatgctaagcctcaagtatgggaatatgtagaaccaatgaaagggttagtaactgagccactcttcatcttcatttgttctttttcattgatctttgcagtcttaaatggcaatctaagaaagaaagaaaaaaaacagaaaatttaagagcatttacttatctgtttctcttgttttatcgtaacagagcatttattgtgaatcttggtgacatgctggagcgctggagcaactgtattttcaagtattccaaagctctatgcttttttggtgtagttaaatactgatttccctttacaccactcatgtttggtcttttctggtctctattttgtgtttaggtccacgttgcacagagtcctgggaaacggtcaagaaagatactcagtaaggaatcttttcctttacgtcgcttttaagtgtgtgtgtgtggtagtcttcctagttcctgtggcgttcactagcttttgaataatttaaaattccaataaactacacaccacttaatactaatatcaaaagtctaattatatggaatttgaactcgttttctactttcacagatcgcatactttgtggagcctagtcacgattgtcttgttgagtgtttgcctacctgcaaatcagaaaaaaaccctcccaagtaagttatgctttttgagatgtaacctataaaaaaaccccatctcagtatcatgataaatgcagcagagctagtaatagaaaccaaagaatagtacaagtttgtctattgaataagaaaacatcttaatgtgatgttaaactattaacttctataatacactaatgcctttttttgtctcttttctttggtcaggttttctccaatcttatgccggacttaccttagccaacggtataaggatacacatgttgatctgaacatctacaaagaacatcaaacgtaaatgctctttttatgatacagcatttggatatgagagataaatcccttaagagctcagagacagatagcaaacaataaaatatattctacagcatctctagtgtaacataatatgtatcaactagtacaagaagtgccatttttcaatgtaatagaattgtttatttccttggttgagcatcattttccattggaatgtaaagacattccaagaatagtactttagaatgtgtacttaattaatagccaataaacactttgaatgagtatggtagtatttttaacccttgttgaatgagtatggtagtacacagaaagaactgagtttatagctagagtgaaactgaatataacagacaatgatctacataaatgaaaaaaaaaaaacacaataaatgataatctacattagatgctatccaacaaaatcccagataaaataaccactcattttttttttaacattaacaaattaactctaaatatcttatataggttttactacatatgttttaggttggaaataaattaaattattttccactttgtatgaatggtatgaagggataaatggtccaccagactgaagcttttatttctctttctttacaataagagagcttccatataacacgtaaaagttgatgaaaatgcttagctaactcgttttaatcaagtcaagtctctctctctcttataatttcttttatgatatatatatattttaagtgaagccagccttttaagtccaccaacttttttattattattatttttaaaagagacacttgcaaacaaaaaaacaacaacccaccactagcttgggatgggtctccgcccaattgttccaacatgcattttgataagtaccaacgttttctttgctacttgtgccagaacgtgatcaggccatctccatcaccttcacttcacctcattttatcttcttttttttttcacaccaaattactccttcatctctccaaggaccaccacttcaaattttacaacagacaagaatattcttttttgattgttttcaatcatcaataattaatcaatcttaatgataaatatttgatactataaataatatttttaaagtattttgattttcatctcatattttaaatcttgtaatatttaaaattttaatgttattatattttatttttatgttttcaatttttgagttgtacatttttttttagactaattaggatttttgccccttgaactttgacgtgtactaaattatgcccctgaatttttaaggtcgt

SEQ ID NO: 13965 - DNA, 4312 bp, Cannabis sativa
cgaagttattgaagtttcccatattagatgttagatagatagagagaccttttgagtttgagtgtgtgcctttttttttttcttgttgattgtgctagagtcaagtttacttgatttttcattgactcaaatgctagctacttttgaccaggtcagatctttagttccagaactttcttcaagaataaagagggtgttctacatgtcaagtgagggtcaaaatttactgcatgaggtacatgtttctctcgagcttgccttttctttttggtgtgcaattggacagttgtccttgccaaattgacaatgaaacaaatatggagagcatgtgaggtttataagagtccttagatcttttggctgttatttcatccattttaacaagaaaggaacaacagaaacacaagttgttcttgcaaatgacacaaatttgcatattatatggacttttaatttttatttattattagtaattttgcttgggttacaattgttgatcctaattgtaatcatcttttatgattaggtcttccctgcagcaaaccaggccgtcctcgagcagttgaggaatgtggattgcattgtttatgctatgggatctctttttacgtctatctgtccatcactggtaacatccttgagcagctgagctcaatttgccttttgttgaatctctgtctaatcacttttgatgcagtctaaatttatgtcaaatcttaatgattttgtttaaggcatttatttttatttttgcttcaagcattctggcatcgtcaattttggttctgtttctgtttggatctcaagatgtcattttatcatttgcttttgaaggtattaattggcattggggagattatatcttcaaggtcctgtcctaaggcatgtttccatcaactgttgaactgtctattatagctggtagaaattataagaaatttgaatccctagttatatattgaaaattttgacttctcaagaatgtccttttgcctgctggagatttgaatccgattcttttgtcttttcacttttgattgtttctgatataattataattattcatttatttcgtaccctgttcccatattaaggtacttctactaaatggcactcatgatcgtgaaacgagtggtttttcagcgtcttgctttgtaactgctattacagatgcactaaatcgaacgcacggagatcgtcaacattgtataaaaaaccttgtaagtagaataccagaggagaccttgttaaagtttatattcattttgaatcatcctattttcatttttgaattccagcgattggttcacccaaaaaatttttccttgtagccaggacaatacatcaatacccttttggttcccaaggatggtgaaattcctgtaaacgctcaaaccttggctgctcaaggaatatttgatgtggtatgcatgctcactgatctgtttaagagattaataaaattattgttgtcatcccccccctctctctatatatatataatattatataatattaatataatatgatttgattaaacaatgatgtagcctgtcattctttgggtaaaatattgacattgttacttcacctctcctcacaataagtcccaaactcgagtaacaaaacctttttcttttcctcgatactgggaggcggcattcgaatttgggacttattgaggagaggtgaagtagcactagactgcgtctctgatcacggatttggtttactttgggggtcagaattatggatttttcaaaattaaatcaactctgaggtttacttattattgttgtcgttgtcgttattgttattgttgttttttttttttccttttttttttggaaactgctgtgttattttggcttcggtatgtagctttattagtgactcaacttccagtactttacgtttctgatgaacaaggacttttaaaaaacaattgttactgatacagatctatgtgaattccgtacgtgacccaaaagttggtgttctattcgacccgaagtccttaatagaggcgcttgcagaagtgacaggaaaatacatgtgcgaaaacgttgcagtgacttaaatgtcaatggggggaatggcaagcatggtgattacaagtgactaagtcttggttcgtgaaccctcaggtacaatgctttccctagaaatctttgacaagtttctttatatgcaatgctttgttctgtccttagtcatgctgttgctgttaatacttattatgtcataatgcgaggggctttaatttcttatgtaatgataggtaaattgcttaacttgtgtgactctaatttcatgacatggtcatgactcatgggaagtagggtagaaagtatacccatcagtgttttgggaaccattatgcatctcggagaggcgtttggggaatcaggaaatgaagaggatgtcaacaaattgaaacttaaagcagagtgtttgaggacttcaattatgtttcaatatatctatatactacatgcgtttgtgtacaaattaaacatttgagggttatttcttggtttgggattcaatttcttctctctttttgagttgtgtattattattgtttcttagataagataagatagcagttctatttatttatatttacagaagcttttacttagttcttgtttaacttcttttacaaattaaaaaaccaaaatttttctagtgcaaatgaaataataattattattgctagtgtttctccttatattttgtatcttctattaggggttattgttcttaaacccatagttgctgaaagttgtcttttttctccagccaggcctactggccctccttgcgcttaggcgtggcttggttggggtctgtggtttcgctactgtgattgggttttgctactgcgactggattttgctatcgcgattaagtttttgctactgtagttagtcttgtttttatgacatggttgagtatcttttgtttaacttattgcgattagtcttgtttttgtgacgtgattttttttttttttggtttgtattctttgttctttgatggctcatcatcaaattgttgttggttgttgagaataacaaacactgtgcggttgaaggggttagtggtgcaattgtgcatcttgcataataattgattgttcaagctaagtggttgagtgaacctgctgcaacagtttctactattgtgtcttttgaatagtggaagcaaatggatataggtgtttttaaggtaaattgttggctgacttgtttttttaattttaatcctagatgtgtttcaaatgtgagagatgttctgattgagctgcaagctattattttagctaattgctattgttaactcagattttagataactaataaataagtcttgtttgacaattaaataatactgtaaaatgattgtagataatagataaataagttttacgtgattttattgttaaaaatctacatagtctatgagccatcttatttttgagtttttttatgtacaacgtatataatatcaataagccttgtttgacaattaaataatactgtaaaatgattgtagataatagataaataagttttacgtgggtttatagttaaaaatctacatagtctacgagctatcttatttttggattttttttatgtacaacgtatataatatcagattggcaagatcttctctctaagtcctctttttaacaaaaatgggtcgtccttttgtaacgtggtttctgccattatttataacatttcttcgaaatggtagttattccctttgttcttatcttgacacctgttcatgaaacatgaacaattctcatgtttcatttgatttactacatgtgggaaaaatataaactccttaaattgctatttgatctcatctaaaatggttattttgtcgagctgttatttcatttgtgcgcttcacataatacattgatgaggcatttttcgtgaggtgtgtacttggttggacattcgtcttgttatggtcatccataatgaggttttggataattttttcataaactttagagtaagctcttcaaattgtctgtgtttatgtgcttaggtcgaattcttttataatgttttgttcaaccaacaaagtctcttgtcttattttttctgtactttgttgttcctaagatgattgttattgatctcactggtctactagtgcgctattattttgacttattcatagttagctaaggatggcccgttcttccttatatctttccaaagttcaccgaggacttcaatgccccccagtatcgtggataactttccatccttggttaccc

SEQ ID NO: 13966 - DNA, 5741 bp, Cannabis sativa
ttaaattatattgaattagattatatattatattttcaattttacacaaatggttattttgaaaggcttaaactaatatcatgtctgtgttcttttctttgttttttatacaaagatagtgattaaaaatcaatatgtgtgttagcttttgaagtttgagtctttatgctcagtacaaatactagcttttcattaattgtaaaaaatgacaattacagttaattaaatatgatttgtaagtttaatagaaaaaaaaatatgtataatctttgttgtagcaactagtcgtggactaagaggttgcaaacttctatttaattacttgtgttgagttaccaaatgagattgcaaaattgaattcaattgaattacatgttttgatttgaaaaatcatgttacaagactattaatttactctcgtgagtagtgaaattatttgatttatttgtattgagttgcaaatctctatacatttacttgtgctgtttgcaaaattgaattaagttacttgtaattgtatagagttgccaaaatttagttgtagaatgtagaatataagagaaaactagaatgttttaagttgttattgatgatgatctttcctccctcccctcttatttttattctattaatagattattaacagcaacaagataaatttgggatttcttgtttaattagtgtttagttaaatgtaaatttaacgccatgttagagcttcttgttacaggagcttctttattgatttcaaagtgctatgtgcagtggtgtatagacttctagtttttatattatgtcaattcttgaattttaatttttagtttgacaaaaagcaatattgttattactctattacatgtttgagttacaaaattgaactaatttactcaaatgagttacaagagaagatggtctagcaaacaagattgaggctttggcatagtttgaagaaactcatttcacagatcttgtgaagaaccatttaagtacaagtctcgttctgatctccaattccagttcttccactgtttatgagttgcatctacatgctgtgtaatcttattaagaaaaattaggagcattttcaattattatctttttggttcattgtcaatataattgtattagtatggtgagtaaaatattaaagtattggctattaaatggaaataaaatttggtgttcgatttttggttattacatgacaattattgtccaatttagtttcagattttgtgacaaatttggtgttctaccaatccacacataccatttttaatttgaaaactacatgaattccgttatctatcaaaagaaagaagcattgagcaccaaacaggtccactttgttgcctaaggttggagacagtcacagaaaaatcaaacaatgtggtctcttctctttactgaactttcttttgttacagggcatatatatactgcaaactgttagagaaatcaaaagtaaagaattcctctaatcctatatttaactaaaataataaattcttctttctttcatctaccttctcctaaacatctgtcatgaacaaagtcactcctacattgtttttctttacctattgtctagtatgatcctacctcctcttaactaagtattcaaaagatgactattatctaaaataatggaatcaaccaacaaccttaagccttaactatttattctgcagtcagttaactttcttcatcataatcttcatcatcttcatccatcctcctatttaagctggccagttgtatgggatcaatggccatcttttccacatccgccaaggaccaaccagagtagtccccgtgcttgttttcaggaatgatctgtgcagtctgagcagggaaagagacaggtgtaagaacaggaacaggaacaggaggtggggtcatcacagccgttaagtcctcagtctcattcaagtcaacattcaagtcaaagtttcgaaccgatgctttggtgctatcatcacatgcaatcttctccttgggtccttcaggctctgctctatcatctagaacttcaagattttgatcattacttttcttgtacttgaaatcgtctggatcatcttcgtacctgtcatgatatgcctctttgtctctaactcgactacctcgagcacgccctctacctctgcccctaccccttcctctgccactagtgtgatgaccaacttcatgctaaaaacaataataacaaaaataaatagtcaagagcatatgatatggcagtaaatcactaaatcatcccataatggactcataagtacgtcaaattagttgtgcagttgtataagggccattgagaataatctgaagcaaattaaactatctgaggtcaatatcaaagaaaaataaatcgggaagcaacgagtttcaaaacgtaaatggatggacaaacaacaccaaaaaatatggacagctatatcttctgccttcttccataattacgcaagataagggtaacttatccagtaatttagtttagttttccaccttctgaatggcaaggaatcaagtttatcaagaaaagtaaatggaaaatctttaaatgacaacagaggaaggcctggtctgtattccaaaaaaactaattgtctacaaagggattgactctatgataacaataagtacaaaagtcaatttaaaaaattaccgttttattcttctgaaaatcctcatcactattattgccttcggtatctacaactttcctgataaaaaatgcagaagaatttaaacaatcaaattaaaaataaaatccctttcttggctgctggacctaatacttgaaagagaagttgcatatttcacaaaccttttcttcgcagcagatcgttcctccccagcagcagtatcagacccacccaaatcaggaactttgctgacaatatccttcaggaaatcaaaaacattaaacgagtgcacacactgttttctgcatgatcagaaaccaatttaaagcatatgtgcatgtcagtgtatcaaacaaaatgcaagaaagaggtacaaactttatggaagcaccaaaaaaaaggcaccatgtgtcaaaagcaaaccagatatgaagggtaaaataattagtcactcacaaatgcagagcattcatggtctttgcacctttctgctgagtaataccatacgtctgatggcaaagatcttgtagaaatagttccaaagctttggctgcatagtgtaatttaaaaagccataattagtcaataaaacacgttatgtgatcactgttaaaggaataaatgagattattaaaactgaaaatgcatagctatacttaaactgaactgagtatttagacaataaacactacttacatactaaaagaggtacagccatagagatttttccaacatcctcatctgtttgcatgatcttcttgatcctagcctgtaaattgattgattgaaatacgacaagagtctaattatagagagtaaaaggtaagctaaaaatttagcataacaacattttctgggaccaaaaactataagaaaattattcagttgcattagcaaacaagaaacgaaaacaaaaagggtaactcagtaagtcgatctacaatgcacaagagggtttgtatgtggatatgttgtatctctaaatataaaatgaatccacacctgaagaagaatgattgaaagataaatcttcctacactgtgcataaactaagatgactaataaatgtagacaaactttgtagatatactaacagctaggacacaaaattgtaaaccatgaggacaaaatattgtaattgcatgtgtttttgtgtgtgatactacaactaagcacaaaattgtaagcacgtgtatcttaaaataaactagcagtgataaatgtaagatgaaagaaagaatgcatgatgcaattgttgaacacgtttggacagctgatgagaataaatattacatcaatttttactagatgctatagaagtaaaaaacagagcagaaccaacttgaacaaaattgggagaaaatatgaaatcaaagaatgactctcttgtaaaaacgaacaaaatcatcaaactaacttgtgggaaaaattatgcttactcactaagactaaggacatgtgaaatatcaaataattagaagaaaaagtggccgcaaatttactttccactcaaacataattagaataacaattaaaataagcaaagagcacaagataacccagtaacagaaaagaaagaaagaaagaaatgtatcaccacaatccccatgtttaccaagaactcataagtttcataaattacaaccatttattatttacagctacacacttgtaactattctgcaaaacaaacaacttacataaccaccaaatcaccaaatagtcagaaagggtatggtagtagaggcagaggaaatagaatttaaatggtggtctaaccacaaattcattgccataagtgataattgcgtgagcatgtactgtacttctgagaaaaatatataaaaaacaattcaaatcatagacttgcatacccaaattgtcacaacagcaaacttcttaagttgaatctctctggttaaagaaaaacaaacttgaaattgggcaacactaaaaaggggttggttgagtagtcaagtcacataggctaggcttcaaattcaattctcagggtccctctacttgccatgatataactaacaatatgttttattgctttctagtctctacacattacaaggtacaaattatgggtgtctaagttacgtctaatattttttcatttctaacaaaattaaaataaaaagtggagttgaaagacgcagcccaaatatacatacatatcattttttacagagtaaaagattgtacatactaacaactgataagactctgttttaataaagcagcaaaactacacaggcattagaagttgacaagaaatcaaatcaaaaaaagaccctctcttacccaaacttgctattacataaaaacatattgaaaaccttaaacaccgctataaaacttatcagactccaaaaaagatttcctagaaacttgaaacaacaacaagaacaaaacttttcacttgttttctttactcattcaaaacttagctaccaagatatccaaggagaagtagttaaacagacaaatttacttacagctggaaaacgggtatctagctttttcttcatgttgggtaactgtagtctgtgaccatgaaacggcttaaaaacaaaaaccctaataaccaacgtcgttctcgccttctgtctggaaaactcacacagaacacgtatgtacatatacaagaaagatgaaatataaaggggagggagaatttccagttcgctcaaaacaaatttcatttcctattttattaatattattatttaatttcgcgtcaaaaaaaaatatatattattatttaatttaaaaaaaccggtctttcgagagaccaacccaatagacgtgccacggttctttcccactctgtctctcgtgttttcgctcgtgtttttttcgcccttatcctattgtctttattgcctcgttttttaaaagtttaatttggattttatcccatatataataacgtgtactttccaatttttcgtacttttaaattttatttaaaaaaaattattaaaattggtggatcaaaataaatttagtctaattttattaataaaaatttattttaaattaagttttttatagctgtgaaaaaagtggataaaattttatgag

SEQ ID NO: 13967 - DNA, 3939 bp, Cannabis sativa
cgacgctgaggaggaagacgaggatgacgatgaggatgatgacgaagaagaagaattgacagggaaacggcgcgagaagaagctcaagcttgttcttaagttgccttcaaatcaaaaatcctctctcaattctgcttcccagaattcgtatgcttcagattcgaatgctgaggaagataacgctggctctgttggtaacaagaagcggaaaatcaatgcgatcggagatggatctgggctctctgactcaaagaaggtactgagaaaaattaggtctttatttggtaataaaatggggagttcttgaactttttgaattacgcgggttgaaagcgccaatcgctttttgttttgaaaattataactctcttttgggtgacattgcgttgacatattgtgaaaattcctagaatttcgcacctttgaactatgttggttttctagaatttgaggaaaggggttgacttggtccattcttttggaatttcagtattgaaattttttggggagcaagatgccctttttttcttccatttttgtttaaatgtcgtaattttttttaaaaaaatttgattattattcttcgtttttgagtatttttgatttatcagcattaaatctgtttttctagtttactgagctaataatgattttaatgtcatatctatctgataataaaaaagttcaaatttgtcttttcttcttttttaaacaattattatatcacagtttggaactgtatttcccctttttcgaactttgaatgcctgtctacttagctttttcacggctactactttgcttagctgagttatttttttttatcttccttaaaatggaaataaataatatacatatatgtttgctttgttagttattattttttaatcattgggtttaaatccaatattttcagggtatcaagtccatttctggaacgaagccaccaaacaccgttcaaggtttgtcttataaatttatgatgaccattcattggttaaagaaatatatttttgattttagaagttattggttatggggtatttgcagggacaaagttggatttgggaccctcaacacctttacctgataaaaagctgttactgttcatcctcgagaggctccaaaagtgcgttcttttgggttcttggattgtgctttgatctctttgatgcacttttgtatgtcaatatgcttaactattttaatttgaatttcaggaaggacacctatggtgtgtactctgaacctgcagaccctgaagaggttagtattgttttctttttctgtttttggaggggggagggttgtagtgatagtgcattagcttcatgaccttaggagttgttttaattctatttttgaataacatgtttttgatgtatttgcagctaccagactatcacgaagtaatagagcatcctatggatttcgggactgtaaagaagaaacttactggtggtgcttatacctacctggaggagttcgaggtttgttttctattttgtggtttcctccttcgttaaatcttcttcttttgaatgtgatgttatataagtcatgccaaaatcggcttttgttgttttcccatctcaagattgaagctgctgtttttctacccagctgattgaatgggagattgagtcagatgatttggagttaaatttgctgaaactgttttgtgtattatgtttcatatgttctcacctctaaatctgtcgtggatgtcaaagttaataaaattgatttgaacagttgttgttagctttgttttttggtagaatttaattgaagttctatcttggaagtgtcagaaagaaccatcttttagaggtccaggctggtttaaggttcaaattcttgccccaatgtataatatatattgtagacacagttaagggacttgtttatgtgactacgatgatcctatcgttgcttgttgcatttcatatggctggttgaaaataccatgttttagtagttttgtaacacttttgtgtggcattggctcatttacttttaagattgtatctgtattcagtaatattgactaccaatatttgttatataatactgtagggagatggaaaaggtttaaagttacatctgagcttttaagcgatcagtttggtagcatttatttattttacagggaactaattttgtgatagtttacgtgtacgagcaaagaagagactttgatgtttgatttggctgacatgatttggtggatgctcagcatggatgtttcagttatatgtgcttatagcttaagaaataaaatattattaatctatgatattctgatgtttatttttacctggatcaacaatttgtgagtcttgttgatacgcagtctatggcattttcatgtacttgtctgggtggttactctttgttgatggctttgcagaccttgcttatgtgatattatattatttgttggctcactcttatgtaatgtatagatgggtggtgatatacaccatagccatctcattattatattttcgaagcattagttgcattagccattggctgaatgattgattttgtatttttttaaacaagattttctgttacttttgggtggacgaggactgaagcttgattttatcatcttgcagaaagatatatacttaatctgcactaacgcaatgcagtataatgctccagacaccgtatattttcgacaggtatagtcaaattttaaattttatgattccattgcctcaactccatatgtttcatcgacttttattattttttttgcaggcacgttctatacatgagttggcgaaaaagaattttgaaaatttgaggcaagacagtgatgataataacgaaccagtagtacctaaagtagtaagaagagggagaccaccaaccaaaaatttgaaaaaacaaggttcggagtatacttcagatggtacgcttgctactactgctggaggggaaaatgccactttgtcaaatcatgaaatgaggaaaggtcctcatctccaagacaagtctggtttggcagatatatctggaagagttcatggttcacgcaataatgacgtctatagtagctttttagctgataaacttgagaagaacgatgagtttacaggtttgaaactcgtattttagcaatttaaattgtccagagttattgcatttatattccagaaaactgatggatactcattttcatctaattgtaaattttatagggtctgcgatgaggggtaactttaagaatgggaaaaaacattttgtgcttgacgataacaggcgtaacacgtacttgcaaccacatccttctgctggtggtcgtgagccgtctgtgttgacaacttttgatggagaaaaaaaacagcttatgcctgtaagtgtctatgccaattacataagatggttttcttgaagaggaaaactgaatctcataatctcagttctttagaaccattacatcaaatgccatagtatttgctactgcattttcttttgggtgcttccttctgtcgattcgttgacttggtttctgtaattatcaggttgggcttcttgtcgagcatggttatgcaaggagcctggctcgatttgctgcaaaccttggacctgttgcttggaaaattgcttccaagaagattgaaatgactttaccagctggtgctaagtttggccctggttgggttgtagaggatgacatcctgccacaaaggtcacttcttttaccaggacagccatcggtatcccagccctctattgttgtggcaaattcatcatctgctgctacaagctgcacccttgattcaaatgttaatagattgtcagagaagcccgaaggggataacttgtcagagaggcaaatgccttcaaccactacctcaacgtcagacagccatccaagcaaatctctccccgtgtcagccgccacatcctctgcatcca

SEQ ID NO: 13968 - DNA, 7875 bp, Cannabis sativa
tatgttatttgagaaactaattatattataatttgcaggtaataaagtttgttgttatgaacagagttaattatgaaaagagtgaagagcgttacatataaagttttgatgctgcaacaacacaacagatgctcacatactttgagaaacaggtaaaaaagaaagtttcaaaaaaatggttaaagaagaagaaattaattaatgataaagttgtatccaaagtggtgtgttgggaattcaatattgtatttttaaagtaaaaaagtcttgttattttataaaatgaagaaatgaaatgagatgttgaacaacgtgcgtgagacatacacatgattaagtttatcatctttttgaccaacgtagcttgattccaacgctttgttataatttgagtaatgatcatatatggtttatctaaaatattcatcaaaatatgacacaataattgattagttcatcttgtgctgttgttttttttttatattttatggtgattttcacaattggttattgttttattgtattgatggaattcatgatgggcaaaagattactgtgattagcaccgtggctttggattctaagggcgattccaatactgcactatatttgttgttggtattactttttctctctaatactcccaccatctttaataataagattagtttcaagtagttgatatatctttttctatttacacaaccatggtttcatcatattgatcaccaatttcgtattacataatgtattatgtataattgcaacaaatatttgtatgttcatcttctcaaagattccagtgttgatttagggatgtttttcacagatctagctagtgcataaactatcggtgaagaaatttgaagaaagttgctgatttcattcagagtagtacttatcttccattatccaaaagaaggtctataattaggatgactagcaattgggattatctgataattgtatcaattaactacttctctagtaggctcgatatttatctgatcgtaacatttttgggcataatattccttctgatcttcagactctaatgtattccgaatgctaatttaataaaattacaatttcatttaaaaaaatgactacttctctagtacaatcttgtcattgtaaagttatgttaatgggagggagatacatccctttgttctataatttctatatttttatctaattttcttctatatttttggatcacaaaaaattattttttgttatccttgtagagagtttcaacgtcattcaagcataaataatagttttgaggtagtgttaaattggtttcttatgcttggacttcttcttcattctgttgagtttgattgtgtagcttagatctctggtttttcaaagtgtctcattatgtaatgaattaaaattcttaatattgctaatttgttttataattttttagagacgttcttagttcatgtttgacattaagctagtaaagtcgtttataaatttattgtacatgcaccataatgattgaaagtttattttcttatcattgttgttgttgttataaactatacttgttattaataaatcgcttatcttatatataagaaaaaactctttgatgttaaattgctcacacctattatatttaggttaaataatattttagatcttatattttataaaaattaatgtttaaattttttattttgttaaatgataaattgtacattatatttaattaccctttctacaattatttttgcataaaattgtcttcaagttaattatattaaaagaaattattaaaaattaaaattttaaaaaatataatatctattttatcatttcaaataaaaaaaaaaatagtaaaatttcctatccttattgtctgaaatagataaataaaaaattacaggtgtatcgttacatacagttatttagaacatggtgatgatggtcctgatggataagcaacaggaacttcacaataaatgaataccactaaattccctcatttatttttcttttttttattcaaaaattattttaatttcaatctgttaaaatggggagtaagtttttgtttcatttcttatggctacagtttatctatatttatgaacaaacacacaaatgttgtgttgtaaatattttttttatgtatggattagacaacactcttttcacaaaatcctctagattttttttttcttttctttcaaacttaatttcaaccgtaaccaccatttgccaccaattctatcctcaattcagcttcgtgaagcacaacaatggcggccctcaatatcatatcccagccacccacttcttcctttcttaattttaaaatcaagaactcttttgataacgggcctctctatgtacccaataagccaactttgtcttcggtggctaagcaactatccaaatctggtaaattctccatttttcttttcaattcaatcctatactatgatgggttttgaataaatttcaagtagaactcatgataagttgagaaaatttgagtaggatcctctaactatgaaacctaatttcatttttcatatatggaagttaattggcttattgaagttgtaatgaattatgctctgtttgattatcagtctattctcacatacatgtttgtactggtcagataaaacccatggcttaaacttaaagtagtaaaatgtgtgttttaaatttagagtatggtataagagtgacattttcccacttgtataaggtgtctatgaaaggtgcttttttttttttttttttaatttctttttaggaaagcttcaaatgtgaggtttacaatgacattggtcaaccatgagtaatctcaagatcttgagacatgtattttttaataggctcaaattattgaatagttagtgttactattgaaaagaagttgccttctttaaaaacatgatctgatctttctatatttcagggactattgcaggcagtggatgttcatggatgcaaggaagctccacatgtttcaacgccgctgctgccaatgacaggcggcggggcattgtatattctgtgttccccacaaaacctgcacaagtatcttctgtgcaggacctttatgagtttatatgctcaggtcctttgctagaaaaaatgggttttacacctgaatcagtagctgagtctgttgataagtggttggcttatggtttgcacctgtgtcgattatttcagctcggtgaatttgaacttaatattcctcagaaagtgaggttttatcattattatatacctgtgtttttatggtgtgaagatcaaatttcccaacacatgtctgggtataaggagggagaagatatacctcctttagtggtaaggctttttatattgtaggtcttactagtactaccttttttcttgttctgagtattgcttttttgggtcccattctgcttgtacatattttgaaagactttcaaagtaatgctagggagtcccatcattgttattattgctttatgtgctaaaattaatgatatgcttgctgaaagtttgtctgtgttgcagattggtttcagtgcaccacaaggttgtggaaagacaacactagtttttgctcttgattatctttttaaaattactggcaggtaagacatagaattataatagcttttgtgtacagttctaataaatttgatagtgggactgctgaagtagttttcaaatctcaggagatctgccacaatatctattgatgacttttatttgacagcagagggccaggtaaatatatctctcaggatttttgtacttccaagattttgtgttcttattttcttattcaagattgtgttgaatgtaggctaaactaagagaagagaatcctggaaatgctcttctagaggtagtaatctacactttctttttgttctatttatggagaaacggagttcactgataacatactaaatttctataatctaatccttcatattttagtttcgtggaaatgctggcagccatgatcttcctttctctgttgaaacattgacagctctgaaaaaattgaacaaagagggtgagttgttctcataaatttacagttcagttttcgttgaagtgctggtattcttgtgatcgatatataatcattagttcttttatggttcatattcttgattactccgtcttgggtaaactggattataaacagaacatgaaagcttagagattgaaatagaattagtatttttcttaaaggatgcatgtctaatattttgtcttattattggtattcaggtacaaagatgaagctgccgagatatgacaaggttaggcaacagagttcgattgttgtttcttgaacaaattgaaatccaaagttgctgatcaaaaattcttttgcagtctgcatatagtgggaagggggacagagctgatccttcaacatggcctgagattgaggggccactttcggtacgagtatttcagtttaaagagcaatatcaaattcttttattctcatgacaattttactcatctagagaaatgatcatgtgaatgttagtagtgcacttgtccaacagtccaagtgttatcactatcattagtttttgttaccacttttgaaatcctctaaaggatttaaagtttcttttgtgctttggctgtgatttaggttgtcctgtttgaaggttggatgcttggtttcaagcctcttccagtggaaacagttaaggctgttgatcctcaggtaattgaaaatcaaatgtttgagggtttgctgttgctatttctgtgtccattactgattcataatctgaatttggattctgcagctggagacagtgaacaaaaatcttgaagcatattatgatgcgtgggacaagttcataggggcatggatagttattaagattaaagatccaacttgcgtctttcagtggcgtttgcaggtttgaattcttcctgacatgctatatttatttgcattttactcatcacaattctcacctataaattttggaactcacaggcagagatcgccatgagagatgcaggaaaaccaggaatgtctgatgaagaggtgggatagttttttgacacacacaaacatttatgtttatctgatgattgttagaacttagaaagccttaacaatggaaactgaagtattttaaggataatttggcaggttaaagattttgtttcgcggtatcttccagcatattatgcttatcttcccaccctttactctgaaggaccaagtggatcagatccaaaacattatatcctcattgaaattgatgaagggagaaacccaatccttggcaactagtaatacataatgcttaacttcaaatcaagatccatttttttttattttctgctgatgaagtttgcaggagaggctgatgtagttgaagagggaataaatatgaaaacgtcctctcagttgaagaacagacccaacttactcttttttttagacatttattttacaattgtgcaggaatcccatttcatgatatacattcactttgaaaaatttcaagtaattgaggatcttcaagcatgacttggaggatcctcaagctagaagatggggagagtctgatgtttcaaatttcttatttgaaattcattgtggggaaagtctgtaaatgtactgtgatgggaatggaaataatatatatattgttatatttttctagtgttttatacataattagtaccttgtagtcagatcagaatatataaacaacttgtaatttatatatatgatgttttttcttattatttgacatctcactaaagaatgaaatcaaatacagacttattacaggaataagaaacctttgttctttccaactgtgatagcttgaagcagcaattatatatcttaatgacagcagcagcaataacaacactcacagcaacaaccacaagacagcacaaacagcctgcatcagaataaagagttgttttttcatggaactctacagctttaaattatatgaaaatgtatatatatatatattaccaggcagagagacaccctttttcttgttgtcgtttcttgacatgatcactgaatgacatcttttgctggggtggtggtagttgtggtgcactaactctatccatctctttcttttaagtcttttttttctttttcttcttatggttcattctgtgttctgcaactattgagtgatcatatataattgttgggaaagtgaaacccttttgcttaaattgtaaattttcagaaaatgaaaaacagctgtgagatggcaatggatgtctcctcattaaattttggtggttagtaggaaggtttctttttcattaaattctaatgtgtttcctctcttctctttactatccaacaaggtgtattaaataattgcccaactttggtacacatatgcaggtggaatggaactgtcacatgtttgcttttaatgttcgaacatggctgattgagccattatatatatcatcatcatcatattatgaaatggtatggtgaatagtataagcagaaaatcataaaatggcattggttaatttaaaaaaaaaaaaatccttagcaatgaacttcttgaatatataaataatagtaacaaagtattaagaatttgtcttgacaattttgcgaaaatgaaaataacaacatttttttttcttaaaaaaatatatatattttaccaaacactcctagcaacaattttaaccttgcatttttgaatttgttatacattttaatatgtaacatgttaattaaatttctttatttttcttttcttaaaaaaaatattgcaaaacattgttttattttctcattaatttgttatacacacgaacttaaattactgaaaacataatataaagattattttcccaaatcacagtatactcagtaacttttagtttctcattaagttacatttgctggttcctttatgtaactttttgtatttataccttattttaatataaatttttaaaagtacgtctttctatttttttttttaattttcgttcaaagtggagaaatataaaggaaagaaattccttccttatttttataaagtgtgaagattgccaactttaagtttgttctacgttttactttacagctcatatgtattagacaaaaaagaaaaaaataaagaggtgagatctttaacacataaagccaacttgtcatgggcccaagttgggctggagaaagcatttctatgggctgcaactgcaaagattattttttctaatgaatattatcacatttttaccaaaatgaaattcatcctctcaaaaaataaaataaaaataaaaaaatttcttgttccatgtatatcttgttgagtatgaagagcaagtattacaatacaatttcaatccaagtcaaacaacgaataaaataacaaaatgggttaaatcccattgatcatgattcatgattaatggggacaacaaacaacaattacacaaaagcttctcttatttatttggtcctaattaaaaaaaaaaaataacaaaactctcctccaacccaaatcaatagattgagtggtatttatatatatatttttatatatatatatttaatatttagtattaataaaaaataataataaaaaaaaaccatcaaaacaaaaaaagccgtgtctgtacatgatcatcttgtgatttaatttgatatagcttgatcattctttttcttcttataatattatatcaattcaactccggccttctaaattttgaagatctatctctttcgaactgcaaaaaccaaacgcaaaatcagcaaaaattacatttgatatgatttttcagattttttttttttttttttgcatttatattaaaattaattattattattat

SEQ ID NO: 13969 - DNA, 14291 bp, Cannabis sativa
ttacattaaagaaattaatttttaattacgcataaaattttaaatttaatattttttttattttttataaaatatataaaattatataatatatttatgtaaactctcttttttatttgtcattatcataaatattaaatataatataataaaaataaaaacacatataggatgaagttatttataataattgaaagctattggaaatataaattcttttaaatgagttagattttataatggtataagtttaataattaaaaaatatatttttttattagcaaacttaattttttattcatatatatttaaattagatatttttattgagttaataagtataataatactcacataatttgtaaaataatatagattcttacaaaaactaaaaatatatatcacttagaagatataatataaaataaaagtgatcataaaatgaaatcttatttgattggtgttttttcttatatataaagaaaaaaataatttgtttagttcatttaaaataatttatttagaatatttttttttttgagctattaaaaacttatagaattgtatatataaagttcttaaaaataaaattaattaataataaattatattttattatgtattacgtgaaaaataaaaaatttataaaccaatattaattaaattataaataactatttttataagtataaataataaattatatattcgatgaaaaatgtaagatattaaaaataaaaagtaaataaaaacttatagggtaagaaattaaccaaccacttataaaaatactattggataaatctatatgacataataaaaataatatttataaattatatgaataatacctacataatttataataatgtaggacatttaattctatatttgaagatgaaattttatgcatagttttgtttgtatgtagttatgttttaaataaaatagaaaaaattaaaaaaaaaattaaatatagaatgaaaaaaggaataatacataaaatactaatttttgtaaattttttataattttgcgttcaaagtacgaaaaaaaaaaaaaaacaacatgaaagtaacaaaaaattaacataaaagtaatgtacaaataacaaaaaatcaacaacaaaatagtaagacataaaaatacataaaaaaaaactcgtattttatgtaaataaaatttaaaaaaccgtaaaaaaaattaaaagtctgtacaaaatatatttttgtaattctttttgttatttttatatttttttaaaattatctcacaaacaaatttagtatgcacctaaacttttgttgtgcttttctttattttataatatatatagattagattaaaagttttgaggatgaataagaattatttttgggattataattttattttccttatatttatttttcaaaaaataaaaactaaataataattgtgctatttaaaaatatctctcaaaataattattttatatttttttaatcaaaattgtaatttatttagtcaacctaagaattttgtgtaagtgttttgacaaaataaataagatgaagtcattttgattccaaaaataattttattaaaataatttaaataaataatgattttgatttatttattgttattttttctttgccatttaattctgataattaataaagactgataattatttaaacagatgtgtaaagtaaaacaataacacagagatgatgtcatttcactctactgtataaaaaattgtcacataataaaaatagttgttagataacaaacatttaagtcaaaaagtattaaggaaaaattaattagataataacaaatttgtgctatttaactgaaataaacagttcttaagtatttcaaaatttataatacaaaatttcttatatcaaacgtaaaactaaatctttttcattattgctttgttaaaaaaaacttcattattgctgaacaaaataatattattattttttttttataatttcaaaatatctgagaattaggtaatttatattttaattgtatatatattttcaaagaaagagacgaagaatacaaacaaaggtagtccaaatgacatgtgtgtgtctgtatcatattttttttctttcaccataaatcgttctcctgcaaattctgcctcctcctatgtaatatttgctcttatatactaatttaatatattaataacacttatttttataccagattacagagaaaatggaaacccatgttccttcacatgcatgcagacatttatatataattgtctgtattacacctaagaaaaacaagaaaagaaaagtcttctttaactaaaaataaatatatatacatattcatcagtactagcagtactgttcactgttcaggtttaaattaaggaaaaaaaaggagcaaattattatgatttttaaattttaaaaaaaagactaaagggagatacattaaggatatgagaagaaagaatattagaaaaaatccatattgtacttaaatagcatgcatatgtttatatttaaaaatatatttgtaacagtcaatttatatataaatatacacacacataaatacccagatgtttttcaggcacttaattgcttctttttttagctaccataccagccatgcaagagttgtacactttacaaccaaaacaagaggtagagaatggcaaaatggtaattatctgaaactctaaactttaaactaaaaaaattaaaaataagtcctactaattaattattaaagaatcatttctatattattaacacttaaaaatttaaaataaattgataaaataatgaaatagatttatttttttttttatattaagacataaaaataataaaaacaatacctaaaacaaataatatttatataaaaaattaacacagaaattattagagagacatacatacaatatacatatacatttacatataaaatatatatatacctctcgataatctcacctaaaaaaatcttacattcccaaagttctaacttatctcccacattatcatcatcatatatatatatatatcattaaaaaaaaactcaacattaataatgaagttcataatgactaaatactaaaaatgcttttaataattactgacaagagtttcaacccaaagaagaagatcattcacctctgtttctcatcactgtgttagcttagctcagagctaaaagcttaaacctttgtagcttgcttttaatatataacttaaaaaaatcttctattttatttatttattttttacggcataaagaggttgttgccacacttgcatctccaagcttcaggataatactcgagaggaaaactcagaccgggttgaatcggtacatgaaccggtttacaaggcgaacacctcccacatttcgatctacatgtcggcggagatgaacccggtccggccagtctcttctctggttccaaaactccactctttttaacaattgtactactactagtagtagtaatacttcttctaattccttgcccacctaacccaaaaaaataataaaaaaaaaaaagacaaaaacagagaagaaattaataaatcactgcccgagtcaaaacgacgtcgttagtttgctaatgggtttcttcttgttcatataaacttaccgatgacctgtgtcggtacgagagctgacgcagaagcgaacaaaagaaaggtaagcgccgtaatagtagaaagccttagaaaacgacacttgtggtagttgttgtaatgtcgttggtggtgttggcggtggcgcagtacgcccatcgccgagccggagtacgtggcgcaggttagcctctgagaatggaagtggaaagaagaagagaagagaagaagaaaataatgaattgagttttcttttagcagagttgtagaagagagtccaagtcaaaaacagagaccaaaaagatgggttagagagagatagagatagcttctgttaatattattattataatattatgtcaggggttaaggagggagggagaaaatggagccctgttatatgagagggtgaatgattgaatccttgataattaccataaattcctcgcttttatgattatttactagaatgaccctaatatcgtttcaaggagggagtagattattggggggagatggtagagttgtaatatttgggaaaagagaggtggaattttggagatgaaaaacaaagagggacagacagcgcacgtgtggttgcgtacgtgtgggggatagtgagtaagaaaggaaggggaggtggggggagggtgagtgtatgagggtggtgtgtctcgtacgggacgaacatctgaatcaaaagcttaaaccataccccactctctctctctctctctcttccccaccattattgatctctttctctctctctctcctattaaattctggttgggccccacgttacagagagagacgtcgttgttattttctgatttttgttttttatttcaccttattaaaaaagaaaagtaaggaattgggtcaaaatagaggaaggaaggaaaataatataaatggtgatgagtgagtgagtgagtgagtgagcgagtgaggtgtagggagttgtattaaatgaagccgcatgatatttgtgtaagtgagggccaagataaataaatattaaatagatagaatagtgtttataaagtagagtagtagggatttggtaaaatatggaaaatatttgatttgataggttttgagtttttgtttggcatttaaagcataagaaatttttatttgtacatatttagcgtctgtactgtgcattttcttggtcagggtctggttttggattagacaaagtaatgtaacaaggtttgagaaaataaaaaataaaaaaaaataataaatgtcttggttttgctttgtcaatataaatgttcattgtgggcctcttggtataaattgagtgaggacaagttcctaaattgtaggcaaagaatagggctcttgaaattgaaaaagatgaagctattgggcccccagattctttaggcctgacttgaaatagtgggcttttttatccatttgagtgatagtggtggtaccatgcatgcttcttgcttctcttacacgattatgttgacactttgattgttgatagaacggaacttgaaaaagacacttcacttgaatactttgttaagagtatagccatttaaaagaagaagaaaaacaaaaaaaatattgaaaaataagttaacccatacattatttcactttatgatgtaaacttctcatcacttaacctaatggctaatgcattatttgcctaggcaaataagagggggtgtcatttcctactacttccattttatttatttatttatttattattactattattattatttcatggtgaacttgctcaaaattaaacacggactaaaactatctccaatggtaaaattgaaatttaatgttaaatctacactaaaaaaaatattatttcgctaatattttcttttaatttcaactactatactaaaaaaaaatatattttttattattatattattttattaatatagtaagaatattttaatattaaatattcatcaaatccaataaattatattagtaactattactgttacttagaatctctcctaaagtggcagttccggacgaaactaggtggcaatgggacccacactacaagatacgtcaccttaattactctcggagtctattatttcaaaagaataataacaaattagtcatctccgagagggtctagctggattgtgagcatctctcgtcttttctcctctgcaagagaagtatacctggagaagagtacgggaggactaatgaaatgtgacatgtcactcaaggacctagacacagtatatgcatttaatgcggcatggaaaaaagcatcagaagccttactttgataagcgtgtttaagagattaaacccatcatttcctaattttactagaccccatacataaatcaacgtctacataaatgagtcgttaaatcgtaaataagagatgagtcaaataccactaaacacttgtagacaacccaaatccatcataaaagtagccaattatgttctaaaatcatatttgagaaattgtgccaagtatacctttaccaccattatgagcctataaatacctcaatgataaacagaactggggatgggtcgaaaaagctctataataaatactctcataaatatagtgtcgtagaccaaggctcatgaataccccaaccacgtaaaaatctcctcttctaatgcttattaaatacttcatgcaactttaattattgactgccaaaaactttggtcaatattttagtactttcattcagagttgtaggaagcttacccaaaaaaggaagtcgtagatagcatcatagtataatggtgaagacgagaaacacttcacgtccacaacaactagatgacccaaagaatccaaaggaagaagaggcggcatctagggtggatgttgaaggagaaggagacactaatgatccagaatcttcaaactaagaagaatatgaagattacgatgaagacagctatacagaattagttgagctaaggtagaaggctgctgaccatgaggctgagttggcagagcaaaaagagcaaaacaaaaggatgcaagagatattgattgccatgaaaaaggtaatggaaaatacaggcatccaagtggatccaactgcaatcccgtctgtgcgagaatggactaaggaagagccttttcagcccaaagggggctagaaacaaaagaacagggaacctagtcccattaggtatcctccagaatggcctaccatgaagggaaatcttacaatttttcccaaaaataataaaaaggcccaggatccacgaaaaagtttgttctgatctctcaaaaggaaaaagtttataggggatagatttcccaaagagaaaactagccccaagatcaaggagatcggaggagcatatttgtacatcaagagccatgaaaataaaaaaggttctgtcaggaaagatccccctgtcgatctaagatataaactcaatgccaaatatgaggacctaagggcacaccttaattaaagaaagaaatccacgccgatctctgaggggggtcctgaatgaaggagtcctagccgaacttactatcctttagaaggacatagcaaggatcttttggaggcaaaaaggagatgactcagaatcagattgtgaggattgggagccttgtgcgagaaatatactagaagttgagctcctaaagaacttcaaaatgcttaaaatgaccatgtacacaggtgacacatatccaagtgatcacctatctagattcaacagagtcatgacagtcaagagggtcagcaatgacgctaaatgcctatgtttcccactgacattaggaggatctacagaggagtggttcaaaaagttagaactaggatctgtggattgttggaataaattgcaaactaattttagaaggcaatttggtgcagccagaaagataatctttgaagttagtggcataactaacatcaaacaactaccaataaaaaccttaaagaacttcgtcaagaggttcaaagaggaggcttccaaaatcaagaaagtagatgatggacaacaattagctttattgacaagttggaatttagacaggaactccattctcgaatgagttgcaacaggaaggtgcagctagccttcaagatttctagaagagagcccaaaaatatatcaacctggaagaatcccaaatagccacttttggaggatattatcctactggaggctcagggtatgcttctggattatagttcctaggtatcaaactccctgccactccccaaatgaggggcatgcctagtttacaattccaagcaacacctaggtacttaccaaattctatcatggtaccagcctattctaatatgggatgccaaaaagtggtctcactcttagagcatggatgcactatcctgctcaatccacgtcacttgcggcaagtgaagctgtagttcccaaagcttctcggagtaagcagtcatccaaaggaagcacacggagtgataacaagaagccaaaaaggcccaggtataatccctagtacacttagtacactgatctggtggacacacaagagcatgtatatttggccacaaggcaaaatatccactaccggaggccacctcctctatattaagatagctcacgaagggacctcaacaaaagatgtgagtactacaatgacattggacttaaaccaatgaatgcaagaatctagaggacgagattgagagcctgatacggttgggccacttgtataagtggatagggaatctcttgttgcacatgagggaaggacaaaaccaagttcaagtgccacccggaggcaatccctaaatgtataggctccatagggagcacttccccaaaactaaaaggctttgccaggacaacctgccaaaccaaataggagaatggctatgatctttggaggccctcatacccgcaatgagttaaaattgtatgccatagccttagaccatgatgaagatatatggcaagtgggccagctgctggcttaaagacctcgtctcatagaccaaccaataacgtttactgaggaagatgcccggacaatgccttttctgcaccatgacccactattaattaaaactcctattggcaacaaaatagtagctcgaattttggtggataacgggagttctgtttcgttcaaagaagctttccttgccattggcctcacataccaagacttgtccccaagtggttcataagtcactgggttcaatgggaactctcttatccccatgggaaaaattaggctctcaatgaccctgtgtcccaacactcctcaaagtatgtttaagtactgtatctttgttgcggtagattatccaacaacacacaacgacataatgggacgcccaacattggtggattttggagctgtaacttcaatcaggaacttgtacctcaagttgcttacctattctgtgggagtgggaactgttcgagcaaaccagagggaatgtaggaaatgatacaatgtagcccaccaagcaagttgtcctcatagtccaacacattaaagaagagaacctaatggaaatacatgatgaatcggatccctgagtaggagttgagaccactcttgaacccatggaagaagtggaagaaattaaaatttgtgattaagatccaaccagggtaattcgagttgggaaaggccttaatcatgaaaaaggaataaaattgtggagaccattaaagagtcagtagatgtctttgcatggactcacggagacatgacctgtattagtccaaacgtaattacccatgttttaaatgtcaacaaagacatgcccgccatatagcagaaaatacatcctcttgacccagtcaaatctaaagctttaaagtaagaagtggaaaaattattgtataatatctttataaggggtgtctattattcagagtggttggctaatccagtactagtgccaaaaccaaataggacatggcgagtgtgcatagacttcattgatttgaacaaagcatgccccaaggattgctttccatttctaaggattgaccaaatggtagatgccacatctagctacgagttgctagcatttatggatgcctactcatgctacaaccaaataaagatgcatgtggttgaccaggaatgcaccaacttttggatagataaaggggtataatgttaccttgtcatgccctttcagctccaaaatgcgggagcaacctaccaatggttagtcaatcgaatgtttaaaaacctgttaggaagaaatatagaagtttatgttgatgatatgcttgtcaaatccaaaataagtaagaaccattctgatgatcttcaagagtgttttggggtggtaagagaatacgagatgaaactcaaccccaaaaagtgtactttcgaggttaagtcaagaaaaattttaggattcatagtaagtcagcgagggatagaggctaaaccttaaatgatacaagctctgctcgagatgtcgtctctgaagaaacacaaggatgtttaaagcctgacaggaaagatagcagccttgagtcactttatttcccggtcaattaacaaatatatcccattcttcaatatattgaagaaaattcaaaagtttgaatggaccgatgaatgtgaggaagcattcaaaaaattgaaggagcatatggccaagtctctagttctatacaaacgtatctaggagaggatctttgcttatacttggacatctccaaaaatgcaattagtgcagctctggtccagaaggaaggaaaagtctagcaccctatctattacatcaataagagaatgataggggcagaggtccggtatcttttgatagaaaatttggccttctgtctactgatagcttctcgaaagctaggaccctatttccaagcacacctaatcaaggacttgacctaccatccattacgattctcaagtgggccatggagcttagttagttttacatccagtatgtcccacacatcgtaattaaggggcggggcctagtagacttcatcgcagaatgtaaagaaactgaagtaactgctcatgaacccaaaatgattgcccctgcctagaaagtgtatgtggacggggcctcaaataagcatggattgggagcagggatagtgatggtatttcttgaaggcttgaggcttcaaactgctttgcgatttaaatttctagcctataacaatgaggcaaagtaggaagccttattggcagggttgagattgtcaaaagtggttggggcccaaaaaatagagcttttaagtgactcccagttggttgttaaccaagtgcttggggagtaccaaactcgcaaagaaaggatggcttcttatgtcattgttgtaagagaactgctccaggcattcaaaagttacaagattgagcaatcctaagagaaaagaatgcccatgcagacttcttagcaaagttagcttcaaaaaaaaaaaaaagtagaaagattggggggctgcccattgagtaccttctgaatcctagcatcctagccaaggtagaggttgcggtcaccaaccaagaacctagttggatggaccctattaacgtttatttggctaagggagaacgaccctaagacagggctgcttcctggaaggttcaataccaaactcctcgatacctcatgattgatggcattttataccaaagtggtttgagtatgccctacctgaggtgtgtctttaatcccaaagctaaacaaataatgaaagaagttcatgaagggttctgcagggaccacactggaggttccaacctatctaaaaagatcttaagataaggatatttttcgcccactatgaagaaagactgcattgattatgtccaaaagtgctatccatgccaaatatttgtaaatatcaaagggcccctttaaatgagatcacattaatgacaagcccatggccatttacagtgtgggagattgatctgattgggtctctcccaaagggaaaaggtagagtcaaacatgctatagtcgtagtggactatttcacaaaatgtatagaagcaaaaccaatgaatttgatcactgcaaagaaaaacctagactttgtagtaaaaaaacattgactgtcgatacgggctacctcacaagatagtctcggacaataaaaagtaatttgatagtgatatattcacggagttctgcgagaaatacagagtcgtgaaaagtttctttgcagttgcaagaccacaagcaaatggtcaagaaaaagctgtgaataagatattgaaagtcacgctcaagaagaagcttctggcctgcaaaaataattggcctaaagagttgccacgagtactctgggcatacaaaactactgcttagaccaccaataaacaatctctgtttttaatggtatacatatgcaaagtaatggtcctagtagagagtacaattccttcctacaaaaggactaactatgatccagccaccgaccaatcattgttgcaagaatcactggatctcgtagaagagctctgggaggagtcataaatttgtctagctgcgtaccaaaggaaagtggcaaaacactttaattctaaagtgaaaaatagaaaattctccataggagacctggtcctaagaagggtctttcctgcctcgcaggattctagagtgggggtgttaggctcaaattaggaaggacctcatgagataagagataaaataggctctgagacctacaagcttaaatgaatggacatatcattaatcctgagagcatggaatgctgattatctccacaaacactatagatagttaagggttcagtatttaatttcatctttaaattctcaatcaagtagaacctattgtaaatcaataactttatgcaatatactatcctcttaagtttatgcaaagtgaccaaaaagtattaaactacttagtcacttgggggtagtcacttggagatctggggcacaacaagagaacatgtagtagaaggcctcaacaataaaagagaagaagaataactgaggaacaacaaaggaacaatcacaaaaaactaaaaatataagagagcatatggaactaaagaaaagaaatagaaaataatttacattaaagtttttttttaaaaaaattgggatgacaatgatgtgataatatacattaaaggatttttaaactaattggatactaaatagaattgagaaatgaatggatttattaattgagatttttttttaaaaaaaaaatgatagtgaaagatgtgaaaaaaatttgagaacaaaattgttggaaatgtggactaagtgaataaaaatacaaaggtagaaaaaccttaaaacaaccataaaaaacaataaatgattgttataattttctaaaaaaaattcaatcacaataatatcaaaacaaccctaaagtaatatcaaaacaactcaaacataaaataattttggaattttatgtatatcatagacaaaatataaaccagtacatacacgattatagtaacaaaagatattaagagtgcacaaaatattcaacaaaacattaaaaataataaaaaacatactaacatttgaaacattattttcagtcttaaaaactaaaaaagaaaagacataaaacaaaaatagaacataattctgttagacaaatcatgaacattctgagtcgttgttaacattttccacttgcttcttcagaccatagtaatagaataaaacagccaggcgatcacggttgacttcaacatcaaaatcatcaaaatgattaggcttactgttaataaaatactctgcaaaagcggctagaaaaactccacgatcgctgcaaaaacacaccagaaaacaaaatcatcaaaatcaaaaaaatgaaaaaaacaaaacaaaacaaaaccagaacaaagcattaaaaacttacgttgtattctgctcatgcaatccagaaataagggacaatctcaaagtgctccatagtagaaaaccttatttcattcttaagatatttgaaatctaacatagaaaaataatatggcagaataacagaaaaaggcttacaagcctcctttacaggtttctcgtacctaccagaccagagtgagttatacaaaaatatgcgcctctcagaaacatttaatcatccacatatctaatgctcttgctctttcatattaataggaaaaacgacatgatcaattaagtgccaaggagtagcacataaaatctttttcccaataatgtattgcgccacaatatgatccaacgataaaacagaaatatcattttgttaagcaacaaacctatcatatagatttgtgatgctagcactaaataggcaatcagatgtggtaaccttcagctttggctcctttgcaatcttgttctttttacaaagatattaaaaaattatatcaatatgctggaaaaaaaaacagtaagatattaaaaaaaacaactaagaaacaacacaaaaacaaacttaatgaaaatatgcaaacacatcaaaaataaataaaaaaaaaaccacttattgaagaagttaaaaagttatcacattaaataagtttgtgaaatcacatcttgttatcaacttcctcaacaccaaatcgaaatggaggagatatcttatccttgccctttagatatacattagttgttttcctaaaacaatgtaataaaaatataaaattagcaacaaa

SEQ ID NO: 13970 - DNA, 2535 bp, Cannabis sativa
ctgcttagcgaagtcatcttcctcgccaccaaacaaagatctaaccctcttcagatcaaattaacaacactgctttacagaaacacaaaattacgctcagaaaattcgattcaataaatcaaccaaaactccgagttcaaaatcagaacaacacaattacacaaaaggaaaggaggagaataaaataagaagagcaaaggaaaatagtgagaaaaattagagcgaaagcgagaatgaaaagagcttgtacccttgtacctcagaggtacagattgattttgtacagatcggaccgtttctcgaagaggaagaagacgaaaaacgaagagagcggttggttgggggagggtaaggggaaggtttcagagagctttctctctctactttcttctctttgcgaagctctcctgctaagtatttatacaggaaaaagggttagggatttggaggagagagaattggttgaagccgaagaggaaggaaagaaagaaccaaatgtatcagacaaattaaatagcgcgagccgattcacgagatgaaaacacgatatgggatatgtgtgaatcgcactgataagttgagtttataagttagtctacttatataagacaattgcttttgaatattacagagtgataagtccacttacttatactcgtaatgaatacgcttggatttggattgtttcaagattttttttttttttaagatatagaaaaaggtattattaattgctgtcattacttgctgaaaaaaaataatacttttttcttaataatcctaatcatcaactaagagcgtgggtcccacgttcgtacgatttcgaaacacgtatgacaacggggtgtcgaacttttttgtcaaaattcagcaattttgaagttaacatttactcgtgattgtcatcacttttttattcaactatatatatataaacttttgtaatatataatgtgttcgtttttaaaataagcattaactccttcccaaaaactaaaaagtatcacacagtactattcattttaaaaataaaccaatttattattcatattatatcatcgtgaatgaatgacaataagaaattatcattagcaaataataaaaaaaaaaactaaaaaattgtttgctatgcattttctttaataaaaaagaaaattaaagacggtcatatgtgatagagagtgtgaggcaagagtttatgtcctcattaaagatcttattaccctgaatctaaactgaaaaaagtagagatatcgattataagtgtactcacatcaaaccatataaaatagattctttaaaatatttgaacaattaaactaaaacacactatatatcacatgttttaaattccttatacatctacatttatataatattatattataactttgtaggttgtatgtttgtttatatatttaaaataaataaaatatataaaaataaaaaaaacatcgtcatatattttaaataagttgatgtatgttgaaaattatagggttccatctcaaaatcaattagtaacgagtggagtagtcatgttcttatataaggctcagtatttttacatttaatccatgtgggacaatattgtccaatattctccctcaagatggtggctatttttgcttaccaatcttaaatcaccttatcataagtagcgtcatttgttcacttatttttgtttattttacggttgggagttctatttgctcgcttattcttgttcgcggctgggagtaccattttgctcgcttgtggctggctaactctttgataggtgtggatcgaaagcccattagggatatggctctgataccattttgaaaagcatggggttccatctcaaaaccaattagtgaaaagtggagtagcccatgttcttatatatgactcaatatttttacatttgatccatgtgggataatattgtccaataatgtataatcaaatataaaagtttaaggaaaattgaaatataaaatggagctaatgaaagtgctctaagacactataactaatatatactaatcaacaccctatagtataatatattatgagttaaattaaatagtacatcacacatattttaattagaaatgataataattatgcaatgttaaggtggttattaaattaaattaaaattttgataattaaataaatgttatgagtgtaattgaaatatatataaaaaaaataaaataaaaggttaaatcatagttactttatatatatgatcattgtgtcccttattattggacaaccttgaaaatattttgaagatattcatagtagatcattttttttttatcaatgaccattcattgataataaagtcactcgatcattttaattatatgcaatattatccagttaattaaaaagtaactgacaaccttatcacgatatcaaaagtttaaaaacagttaactgtatatctcaaaaaaccaaaaaaaaaaaagaacaatgaatcatatcacgagaaataatcatatatatgctcttatcactgtattaaaattattgatcaaa

SEQ ID NO: 13971 - DNA, 8488 bp, Cannabis sativa
  modified_base (7970)..(7985): a, c, t, g, unknown or other
aaagtgtttaaataaaattttcactttaactcaaaaaaaaaaaaaatatagcataaaaaaaaactcatatacatgtaaaaaaaaataaaaaaaacccaaaaacatatagtattatttatttaaagtatattataccctcaattatcatatttataaaaattccggatcttaaaaactaaaaactaaaaatatgacccaataacttctaagttttttaaattgcttgtttaagattttggacactaaatcacattaaattaatgtataacataatgtcaaaaacacccactgggaccattaattaattttaaaaaatgtacggataccgactcacattcccttgcctttatattctaagcaaaaatcttatcctcaatccttttcaaaagccccatgagattccaaaacttaggccatcccatcacacattgttttgtttgtccccttttatctaatcccaataactcaccttcttaatatatctcaaatatatttcgtatctataaaaacttaaaaagtgcaatgatacaacaactgagatgagatgagatctccaaaaagtcattataaattgttactcgttcccttataccaacatggtctcaaaaaaaaaaaaaaaatctaaggtacaacatgtccaatatctctataccagcactttgccaaactaacaatataaaaaaaaaaattggttaataattgaataatggtcacactgtaattttagaatagcatgtgaccaacgtgactatttctcataattgttttagaaagttatttaataataaataatttcataatggttttattttcacaaaatacttttactatgtggtaaccatgacatggtacttaaaatatataagatccaaaatccaatgtttaatgattaccattaataacaataacacatagtgctggggttactaaagtgtcctttttaacatttctacggtgaaaaagtagacagttgtataaaactgtgttcgtttgtatacataaaatactctcttttatttagaagataaaggtctcatattgtgattggttcttagaaacaccaatcatctgagaaatagacattaaaatattctcaatctctttttgaaggttgaactctcaactgactaataaattagtagagtcaacattacatatgctttaattcatatttaggttctagtcaaataaatcagctcgatcggattagcttagcataataatcatccgaatattttaaaattgaaaggagacattattggtgtataacgtatttgctgaaaaagggccggtaggaaaaaataaaatataaattaatcaactaatgtgatcagtaaataaagtagaatagaaactaataaaattataggaaagttaatggcaattcattgacatgacttgattctaatctctctctctttatttttcttaatcaaactataatataaacagagtggcaaccatgtggagagaaaaatatctattcataacaatgatgaatcttctagcaacaactagaaaaacttttaagtggttataagcaaatgcgtgaagaataaacgatataaaagcttaaagggtccaccaaaaatcacaatcgtccaatcaaacttgagttggttcttttgtctttgtgtgagtgtattagagggagagagagaaagaacattgctctatgctaaaagggtaaactcagagagaatcaatcagaaagaagtaaataaatctagcaaaagataagtaaagttgaaccagttccctatctttaaaaacaatatcgtttgtgttgttttgtcttgttgtgtggattatctttctgtctcttcaagcaataatagtgctttcttacctcaaaaatataaagaaaattaataataaattaataatagtagtgcattcttttgcagccaccaaacagaagaaaaaaaaaacacacagacaactatggtcaaaaaggataatcatttactgcatgagattctaagctagtggttgtttttcaaaaatcagttgtgtaataatacaaacttgctttatacataattgttgtacctccctcctcccaatataatatatagagtttttaccaatttaccagagttatttactatgacaaatggctcacggacttgctcattatgcacttgtgaaattaattattatttaatgagagatttgatttaaaaatgaaaacaaaagcttacaagtaatgcacaccttcttactcacccaaattgaagcaatctgaagggttgaaaaaaatagtatatactaatcctccacagtactcctcaatagggttgagacattatgagtattctcttttgacaaacatgggaaaggaataaagtggggttgttgaaagctccaatcaaaagcagagagtatctagatatgattaccaaaacccaaaaacaaaaatgttcaaatccaaaatcacagattagccttttatgtcagtctaaaagatgagagtagttatgtttgctgcaaattgcagattggtagcctttttaaggaaattgtttgtaagcattacgcaatattattaatcattacatagattattaatcagaataggataaaagatcagtcatcatgatcccacttcccaggaattacaatccaattcacagaactagttataagatagagaaacttaaaaattagacaccaatatattaaacatgtataacctctaatccaattggtttaacacagttacaaggatattgaagatccagcagtaaaggttttgcataactacagtggtgaattcataaatgtaaattaaattcaagcttggttaaaaattaagatgatgctcaaagcctcaaacatctaaaagtgatacagaaatgttattcttgttaagtacttgtttcctttggatgtcagaataatctttcttcttattcaacaatggaatggttcagaatcaataagagatatatatagctcaattagaacaaagaactacccggatctaattctcttctgactagtttttccatctgatttataagtaccagccgattcgccttcggatgaagcatccaccgacttggtgaaagaagttgagagatcagcatagagatctaccacccttctgatgttgttgttaagttctctgattagtcccacattccggttcaagttgtctggtatctttgactcatggttctggttaatctcactaattagcaaccggttctggtccaaaatgtcctgaacttgaacaaagttcttctgaaatgtctgcaaaaccttcccatctacttgggtcccgtttcctatgcctctatagataccaccctccatttcaatgtactttcaatcagaagcactctttaacctgtgtatcagaaacaccttaaaattatgaaaaaaaatataaccatatatgaaaaagctttaccaaggctgaaaactaaatatacccatctatttctctatccctaactttaccaaagaatatgaagatgtaacatggagaaacaaaacaatacccaattagggaaaaaaatatgtgtgagaaaagaagatttaccaacactttcatatgcacaaggaattatacctttatactcaattcttgtatattttatcaaaataggggtaacttttttctattatctttctcttttattttcttttcctttcctttacccgtattctcagcaaccaaacaatagggtgtgcaccagagacaatgtacaaggaggaaaaaagaagattaagggtactgctatgacgtcaaagcagactccttttggcttttaccttgaaaagaggacctttagtttgggttgggttctcagaatttgcaactccagaatttgaatttgagagtaaaaggaatctcaacaacgggagttgcctcgcgtcgcctctaaaaccaggtcaaagcccaaaacaaaaccctattttgtggcagaagatttgattttgactagagggaaggaaatgttaaaagaaggaaaatattttattttattttgttttcacactcaaacaagaaataaagcaaaaattaagaataaagatgacagatttttgatagttaagatacatatacagttacaattatggaacaaataaatacagaacacagtgcatcgaggtagaaacaatcaaactaatttaatataaattactcagcatttgggtttgtcttaccttgaatatacagaacatggtgggaggaagagtcaaaagcaattatgaagagaattttctcaggaaaaacatgaatttttctcgagaaagtatgggaagtagagatataaaagaagaaaaagggaatctaaaaatatgtttctgggtgggactgagaggcccagaaatcatgaaggacagatggagcagagagaagaagaaagagagagagagagtgtgtaagatttgattgacagcggagacaacactctttcctctttctctttctatttgtatgtgtatactgtattttctctctatctctctatatatatatttgtttgttacccaagtgtaggccgtgtagttgtcctcgtttacttcgcctactattactactacctacaaactttttgatttcataataattaaaacaccattcatactacacaataataataaaaaaaaaagaacagcattgatacggggcaccatcaaaattcctattgagagttgataatcttgataatactttaatgttagttagccacattctttaaattttttttttttttttaagttatataaaatttactacttaatcgtactactaatagttatattatactaaagaggatgttagacatcaataactttgtttaataatttctaatttatattgagctgagatatttatgatacttagtactacaataaagtgtcgccacgtaacttgttagtgattttgtataatatttattaaagtaaaataagtaggacctgagttacatcaataataatattacacttcacaagagtcttaagcactataagtaccttttagtatttcttattcgtataattatattagagtatctcttaccgttctatttaaatatactttttagctacaatattgagtggctcctgcttttttactgaatttttctaatagtttttaataaaaatattattactttttattattttataaaattaatttatatttaataaatttaaattataaaatattattagcataatcaaatactaactatatataataaaacgtatggttggagcaactataataacaatagttttattttaattttttaattaaaaataaataaatagtaccattgaaaatgctcacacctttttttctctttagccatgaaataactttcattaaaaaagaatcataatctcatacaacttcgagtatcaagaaattaatcttatcaaactatataagttctctatctactcaaagagaatatcaagctaatctatgtgtaatctcattagtcgttcgacgtacatgaattaaggacacatcaaaaaattagacatcaaacttgctaaatcctctaacaaatgaccaaattcattaaggaaggaagagcgcttagaaaacagattgacaaccactaaacaatcagactcaattacaaaatgtaaaaaaagatcaacaataagaactcaatccaatactaccaataaaactacacattctgcctaaataactaactcgtatataatataatttatactatattctttgagtactcacatgtttattatagaatattcaaactcacacaaatttgatgttgtctaaattcttccaacaacactcttttcttttttttttttaatgaaaaaaataaagtaaataaagttatacaatttataactaaaacaaacaatatatttataatagcattctcaaaaagtgttatactatatgaaagtgtttttaaaagtaagaatataaaaaataatttagaaaaaacatatatatttttaaatgaaattgaggattttaaacctttaaataatgctactatatattaaagatactcttaaacattttttcttaccattcttactcactccaataaacattcatttaaaaatatctctgtatcatcaaatagtgtttatagcaactcttaaggaaaatttgattaattatgcatttagtgggattgatggtccttataattttaacttttattgtgacacgatgggctcaacgtagggtctgataggttcaatattgtcttgttgatattggacctatcaggctccatatcagacccatcgtttcacaataaaaattattatcggactatctcctttaaccttaaatccctctaatattaacctaccattgagcctacatcgaacctacattgggccaagcaaaaatcgtaatttcctccccccctccccccctcaaaaaaaaaaacaaatccaaatctaaaaatctcaaaaatcacatattctctactaaaaatacagatctaaccctaaatctaattgttttaaacctaaatcataaaaaaataaaacaattacagttaaaactttataaaaaaatgagagattatctttgacaaaaatattgtcggcattgggtggtgtggtcgcggtggtctatggatcgtgtggtcgcgaggttgaggttgtccgatcgtgtgctcttccgtgtgcatgtttacaagagagagagagggctgttcaaataagagcagtagaatatgattttaagaaataataacctattctactaatattgaggagcttaaattaaagagaacaattttgacttaataaatagataattagtgaaatttcccactcttaattcattgtctactgtcttattgggaaagtgccatacgaaatacagtatacgaagtacagtataccattaattaaattaaccgcgacatttgttggttgtcatttcaccaacggatatcatatcatatatcatatcccacttatttgtttacttatttatttatctcttctttgttttttttttcgaagaatcacaacttggcacttcacttgggttgggagggaccacctagtaaataaattggtaaattgtacgagaattgctagtgagcatctctcgtatacaatatgatatatagtattcatatattgttattggttattcattaataatttaataacttaataaaatacttatgtcatactttgtgttcttactaaaaacaagtttgatagtactttaaaaatgctatagggtaccaatatttaacacttatattatttctaaaaaaaaggcaccctatattatattattattaataattagtgtaattcaatatctcatttattttaatagtgactatagaaaaccgctaaccattttatattggttaaataacgatataaatacctaaagttttaagtttataactataataaacttaatattaataaaattgtaacttttatctagtttcgtcagtagagatttcattactattttaagtttaaacatgacacatataaactttaaattttaagtcattaggtttgaaacatatagtattaattatttttaaatattattttaataaatttaaaagaaagtttatattgattaaactgaacaaaaagttaaaattttattaacattaagtacttatattgttaaaaaataatttatattttaaaataacaattacaaatacaaaattttgtgtatttatactacgatttaccttttttttattttaaaattttatatatttaatagtctaaactcaaatttaattaataagcttttatgtaattaaattttatataattaaaaacaaaattaaaattcatagtaattaaagataatttgatcatattgatattgtaacttaaataaatatgtaaatgtattatattgtattgtattatattaatacaatagtatgtttgatattctttcaaaaaaaaaaaaatagtatgtttgatattgacttgtattnnnnnnnnnnnnnnnnttataatatattttcaataaactccactctaatattgactcctgagtccaggttcgaggttcggagtttggaagtctcgagtctgggtccgagtcccaagtttgaatctcaatccaaatccctgcatctgagtcagtcggagattgaggttgacccctagatcgtttattatttaataaaacacttacacctaccaaacgagcttggaagtgtaaactaaaccggaagaaatttggacttcatcatattggtggcactggaagaaatctggtcctatgcaaagccggagtcactcttattacactctggtactctcattcattccctttcttcttcgacccgaagcaatccctatggagcggtattctcacagccaggggcagagccagaataaaacacttagggggcaattattaaaaatttatatttaaaataaaatatttttatagaattgcacatcacaaaaattattaataaggacatgtttggatataattgtataa

SEQ ID NO: 13972 - DNA, 26220 bp, Cannabis sativa
gggtctcagatgtgtttcatagctcttttcaactgagggtcagacccgatgcgactgacagataataaaaaattttgtttaagaagagagaatcgttggttccttagagtcatttctctttcctatttctccgacattcattttttttgtattcgccacatcaaggtgacaggattcgaacctatggccctctgtacccaaaacagatgcgctgaccagactgcgctacacctcgtctcaccccccccggagcatatagatccacccgatcgatgaacacttgaaccgaactcgcccatccttttgggcacagggacgcgagaaccaatccgaggtttcaaccgctttttttataaaatgtgcctcctgcactagttggctttttggcttcctctttgactttcattttgaaatccggctcgctcccggttacgtgtctaaagacccttcgcccgtttagaagtggattcgaaccactgacacaaggattttcagtcctttgctctaaccagctgagctacctgaaccactttcctaaagtctgttttcttcatcgaatagcgccctaccttaccacttgactagtaagggaaaagccctttactaagaaaatagttagggctttttcgcttgttcgtcaagctttcgagcagctctttcgccgcctaatctcccaacatgctcaagaaccgacccctgggactggacggccggagggagcttgcttatagaaagaagataggtcggtcaaacaaaaacaacgcgcaacgggctctccgctcctagtaactaagtagtgctattctgtcctccgggggactccaccaagaggttctttctctcacgtaatttcgcccgcctgttccacttccgtgccggaggaaatgggattcgaacccatgatacaatctttcttgtatgtcgatttagcaaaccaatgccttaagccactcagccatacctccaagttgttgatcggaatttgatgtgccgggtttggttggttgcccgaagggctatctgatccgatcacctgcgtaagccgtagcgcgctagcgcgcgtactcttcctctatctatgagcgagactctatccagatctatggatctccccagcatcaaagcgagactccatcaaaatctgccactcgttgggcgacgccttcttttctatgagcaccccaccactgaatgatgaactttgctagtcttcgcctccgacccgaccaggagagaacacagggtcaagccaagcccttacccgcctgaatggaattcatatctccttcgtctggtcgagaagggagaaagcccggggaactggactgtgactcttctattacattacggagaagtccattctcgtcatgatcgatccacgtcctaccgtagtgcccggagaaccaggcttgcttagcttactaaggcgaagggttttttcgttgattgcacgagctagcccgccgttttcttgcttggtgcgctagtgcgcctgacttagttgtaggcgttttcttcgctgggttagattcccgatccactcatcttcaaacgcggcttccagtatcgggacaaaatggggttggagatcagagagaggtttgtttgaagagaaaaagtccctcttgtgccggtagtagggaaagcagctgagatagagagagctgttctcccttaaagtcctttatggatttcgagtcgggaatagagctgtggcttagatcccctgatcgagtaatggggtttttctctcgttcacgttgatagccccggttcagttcaagctgctgcgaaagaatttgtcgaaggggtggaacgagctttcctattaaaagctttaggtgaatccctaaagtagattagttcgatcagcaacacctgtctccgcagcattggaaccaagattttgcttggcatagttgcagtacgagggtctatttaactaactgaagctagccgagatcgagagctttcttatcatgcagctcctggattgaaaagaagcagctgggccaaggcttaaactgccagacacagacgagctagctggactattacgtaattgagtatagaaagaggaatcgtcttatgtgcggattgaagtgcgtgatagagatagatgcttccgtaagtttccttttttcaggaaagcgaaattcttttagtgttccagggggatcgaatgttaactaactgacgtattgtaatatcaaccagcgttcagaaccagccgagaagaaaaagaaagaagattttttgaaaaagcaaaagtactatgtgaaatcttaggggatttcctataactatatccatatcctataggtacagaccttttcttatatacgcaatttcttataggagcaaaggactgaaaattgataaaggacgaagcaactcgtatgtaatgctagtgattacggggaatagaccagttgctcctccatcaggataaattgtttgatcaaacgagggagttaacgtacccactgcttatcgcacttcttattcccgcccacccgcttctcttttccttctggaagtactcctttttccgacacccgcgatcgattgaaaataaataggctgtctctctcaaagtagtttgtttccctatcaaaggaatgcatccacccgcccgaaaagaggagattttcaaatgagatcgcaggtgtcggtttgggataatctccatcaaagttgttcgtcacctcgaggctcgagagacctttccttagccggaaaagaggtcgggcccggagaagaccttattaaaagagggaggtgtaggctattcaaccccgggtaggcccctcgacttaccgagagtggatccgggaaggaaaaaaaggtttgcaccttcctttgtttgccgtctctccttatttccgtctcagaggtagaagaggctcgagagacctttccttccttcgcggttcggtgaaccatcccaaatgtgtccttctcttttctcgaatccgactagagaagggaatccggtgacgaagaacaactaggcagacggaggttttggatagaggaatgggatggaggttcagggttttgctgctttgatggatggagggtttctgaataattccatttccgggccggatccatctttaatcagaacaacatttccggtaaatcctttaatcaaaagttgcttcttccttcctttctctccatccagattcggtaatcccctccccgtgggattcgataacgaatccttcggttgcttatcctctcacccgagcccggcgttccgaacaacaatgattcggaaagataacgtctatgaaagaaaattcgtaaagcttttgccctactcctcaagaaatactgcgagcggtattgtaaaggtatgggctttttcggtcgatttagctcaagagggtggggggacttcgactttctcgaagcagcacatgagacagaaggattccttttttattaacctagtgcggatgtggactccctaaaaaacctgctccactttgtacgaaaacatagtaatgcagctaagtgggagtcttacatgaacgcgcacttgatctttgacttggtccgccgcgatccgggttttcgttcgcaacaaggtagccgtagggaaaaccctatgggctggtctctcgagccttctccccccccacctgatccattaaaggaaaacagactcaaggattgggccattttccatatgtctctagaaagataggagctaataataacttttattacttatgtaactctcatttaattactccatgtgtaacgcccaaggggccttgtattctatttaaacagaggatctctcacattgatatacacatccttcacccaatctgctcaaagtattttcaactctttcatggtatcagagcactagctcttgggaaacgttcagttggttcgtgtgaagtgtggtctgaataccttgttacgtgttttctctttggcgcttgtccaccgctgtatccttctcctcagccacttagtgagtatcccgtccatcgcaaatttattatccataaaattgacacagacgaactacctactatggaaacctaagataatgtcgtttattgaagcacaagatcttctcagtttcgttgatggaacttccaaagaaccaaaggagtttcttgagactgatgacaaaggtgagataatgaaccctgagtactttattagaatgaacagaccgactactcaaaagtttaatgatgggcaccatgaccgaagacgttcttagtcttgtcgttggactaagaacgtctcgtaatatttgggtgtgcttagaaaaaacgtttgcccggaccgagaacttcaactacagtgtcaattgcagctatgtccgtaaagggttcaaaacctctatcttctatcctattgtaggccgataggtccgctatagcctatccgcccacagaggtacccaaactcgtcgccctctctagggcaacctctgtctgccttctaaaatgagctgtaccgagagaggaatagcctcttttgggttccccgtgctacggctgctgctacagcatcatatgtcatgatcctcttctctgagccgcacctggcatctcagttgttgttgttataaaccggtttttattggtaaatcattgaaaacattcacaaccattagtgaattcccacagcaatcccaatcccttgcggatgtgatgtgttttacatcgcaccgacgcgtgtttgcgtgaagctcgagagtcaacaaatggtttcactcctctgatgactcaagcagagttggtttctgattccctggcctaggcctaggtaaagggtgctttcgctttcgatataggaaacttgtatttctgctcgagtctcctttcgctcctctcacattcgttcgagtggcttcgctccttgacctgggctctcgacgcttatagccttgtggtatagttcagttcgtactcgcatcaagctgtggtctccgtccccttcgattattagtaggggctcgtgccttcgttccgtcggtataggtataccgtcaaatacctgcctcgaagtcccgtcaattgagtgccgtcagtcagtgttctcaaatcccagatccccatagtcttcggcgagtggaggacgaaggacgtttccgcttttctgtcaaaagagctcgtgtagttctcagaatacacctacttgcaggcattttttctaagaagttcttttaccagctgactgaaaagctttactaataaatagggggactggacaccgagaccgccaagattcaagggcgattaggtgtggcttgcttgataagggaaacagaagacgcgcccctcaaagccccattaacgcaaaacaactcgacccctacgtttttaaattaccagaagctcttagctactcagctatactataataaagactaaaaggggtattccttgacttaaagagtattcatattatggtctgcaagccttccaacatctgacttatatacaggtcaacatcgacttaagaagcacgaatacatatagtagctacctcgggagagggatgagagtagtgttatttagttccatgagggtagctgcctattgcaggatcgaagagaagggacacctgcaagcttctactgaatgtaaaaaaagtaaaggagatggaatcaactcaatagaattaggtattttatatgacttctgaagtgaccgaacaaagttaaggattgattcaataccgaacaaccctgcaatcatacaggacgtcaggataacaggaaaggaatcggtagcagccttgagatcaaaagaaaatccttttttctttcctttcaggtactgcaacggttgggtctggttagaggtaccttccattttgaaccttgccaaaaccgtcatggcccaatcatgtataggccgtaccaaggcctgatacaagggtgagccaatagggaataaccttttcttccctgctccctcgaccttcattcccatcctgccaagctgaggctgccagcgcattgtatctaaccacactgtggcaaatcgatacaagtagctaaacagcttgctataccatacaaaggcatctccgaccgaacggttaggcaagactacggcgctggggtaaacatcccgtttaccaaacaagacgtcgagagtttcacttaaccattcccctcctgcagccaaagtgatagcggttctagcatccgccggtaatgtgtggaagagggtaagctttctatgtggataggacgtatcaacaccttttgcatcttttataataaaggaaatatataagaataatattgtgttgggtcctgaggaccaggatggccgaagatcaaaacctaaatgtgccaggggttgatcatcgaagccagggcaataacgatgaaggaatttgagcgctgatgtagctaacagccgccttcatagtcgattcattagggtcgtcaccttctacccaactagtggaagtatccaccgttttctttgtctgttaagcctcacagctatgggacttcctaaagaaaactgcaatcgtagtttatcaaccactcacaagaccaccgagatcttcgacttagctcccaaaggtaatccacccggcccttccccaacctatacaaggggagcggaagataacgaaagggagacaaagtcctaactaaatcataacacaagaacctccgtctacatcataacacaagctacccattccatctattcagtcgagtggatccgattcgttcttatctatagataacgcaagagagaacttatgacttcgcggatggagagggattcgaacccccggtattcctatcaatacttcggttttcaagaccgactctttcaaccgctcagacatccatccccttcgcgcttcgcccgccctatctatccgcgcgctggcaggtaggggcttatctatgtgattcgctacgcttgcgcctatcggcggggactctattgcctgccggttagcgaaacttttccggtagtacgaatcgctacgcttcgcttgtttctatatgataatatgcaccttggttgctgcgctccctgcgggtaatatggaaatattaagagagtgaagaacgaatgatcctccaaacaaaaagagtgattgagtccgactcaagcgagtgagtgaaaggcgtggcaagagagcgagttcgactcgcgaacgatcagcaagtgaaggaccgatccttttgcgccagtactgttgcgagactggtacttggcggctcacgagcaacatatagactaaagtagcccatcactccctcgctcttttttgaaggccctttctattctctttctagtagggttcctccataagaacactgaacgcccagcttcgcagagcagctctctccccagcccacagcatagtgtggaatctggatcgtttcatcgagcaccatttcttttagatagaaaggtgttctgactctattggatcaagtcataacctacgccttctactagtatactactatggtatggagagactaagctctttttcagagattggactctctttactttgtttgattagcccctactagtaagaagctgttcccgagccaggttccctggatccacgtgttcctagtcgggcctaaatggatgaatgaagaagcgcgccctgtagtttctcagctctaagaaaagcctacgcctgtagtttttcagcaggctcgggagagagagcttactcaagcagtagcagtaagggtactagaagcgagctcgaactaccactaaagtaagtaagtaagcgcgagtggattcattgctcacccgaaccctcttgctctaagtatatgggacaagtgaagggaagctaagagaaagccaagcaagcccaataaaataggttagtaaataggcgcccttcaaaggatttatcctcccatcgttcagtcgactggtacaatcccaccttcaagttcaagagtcgtaagtccaacaccttataccttataaatagatcggttcacttcatctattttctttctttctagcagcaggaattgtgttctgccaaccttctccatggaggctatagcagcagaagggaatggtacgagggcgggatcgggtggatctacggctcggtgacggagtaccgcatgcacaaccgggggtggcgctcggtgtactgcatcaccaagcgcgacgcattccgcggcaccgccccccctcaccgaaccttttttcccaggattggacgcctattgacgaagctcaggattgtcgccctactgcttgaggtttggaacccactgatgtgaaagtacctctctcattgcaccaaaagagcccttttagagagttggctttgacgatagggcttgaatggaagggtcgatcggtccaccactaaggatctatggtaggtcaaagagcgcagagaagatttcccaccacttgtccttgtacgcgctataatatataggctttctatgaaagctcgtaggatcagctgacaaaacagaaaggctaacgcacctggttcatgtctatcgaagagggatctcagattgcgcttgaccggggtgatttttcttcattttaggtaatgaaggtggacagctcgtagtcttcgaaaaggaaggttttattcttgccaaactctgtcatgcccgtcctcctttgagtttctaaaaccaatatccccttctgtttttccgtcttcttctctgccgaaaggaaagacaaaggcgaggggatggggaaacccacgattgagaggtcagatcacaccatcctcattgatccaactcgggttggtatgcacacaaagagagaccctaccacatgtgtttcagtttgagagccaccccgttctctataggtcgtcgaagcccccgaccaagacccatgagaccttgtcgtcgatggagttgcccgatgatatgacttactgtctatggctccgttgctggacagtcagcgggaattccgggctgtccttgacaagtgatcaatccaaagagctccggtcgatggaagaaagcactcaacctcacctagatcttcctttgttgcacctcatcgagaaatcacactggtaataggtctcttttttttacttcctcctttctttaatccgcaggaggtcaaattcaggttgctgttcaagttagtgaagttctttcattgtaattagacctaacaagaacggaatcacgctctgtaggatttgaacctacgacatcgggttttggagacccacgttctaccgaactgaactaagagcgctttcttatcacagtagataacgactgtaaagaaaaggattctttttgtacccccactacatcttgcatgcatatagtttcattaaatgaaagcttttttatgtcctcaatttgaatcgatctcaatggatccctcgttactgcccagaggagaagtaataggtaggattggaacccgattttgtacccaaaacaaaggcgctaccaagctgcgctacatccctttcaattggtctacgatggtcattgtagagaatccctgccctgttttccacatcgttatttcctccatcgatatcaaatttctcttgccatttcttctttttttggtctttattgatttatatactcatcatcccgccgctcctaccaacgctcacttacttatgagcaaaaaaaaagggaactaaataatcagccctttgaataagcgaggctttcccgatagaaatagttgcatgcgagagagatcccaattccgtgtatccggtgttgcaagccctgccgccagcttccacccagacaaaaagcgtgagcgcctagcgcgaaaggttgctttactaaaaaatagaaggcgcgttagcgcaggccgttttcaataaggggcggagcttgaaaaagcgaagcgcgcctagagtagcagcctattacgttcgtttttcaggcccctttcctttctattatattagtaaagcgctagcgcccctatagagtaaggctcttctgctatcaatgaaaccgaaagaaagacaaaaacccagtgcgttttgtatagatcgagacttgtagcttgattctttactcattccatactgggaagaattgcaggaaatcgttcgataacacttcttcctatttctcaatgatatccgacgatcaagacaattcccgcgaaactctttcatttcactctatttatggccttcaaccaaagcaaatagcatttcctattgatttgtcccctggactggacctattctgattgaattatccaattatccgtcgctatgctgttcccaaggactagcaaaatcgaaatagcgaaattcttgggtcatctcaatgggttcagaaaccacacgtttctctggatcatcatagcgtacttccacatatccactcagaggaaggtcttttcgtaatggatgaccctcgaaaccataatctgttgatatacggcgtagatccggatgattgatggaagaaacaccaaacatatcccaaacttctcgctcccaccggccggctgatggaaatagactgactaccggagatattcgtgttacttcgtctgcactggtttgtacacgaatgcgtgagttataccgagtactcagtaaattatagatcacttcaaatcttcgttttcgagagggataatccactccacaaatatcgatcgaaacttgaacccttgtataggtatgcaatttaagaaagcacaacaattgaaatgggtagtccgtattggtatcagatctattcccatgttctgatctttccattttttttacccatttcttggggaaagtctcccaactatatttgaaaatgaattggttatccataaagataaaggaagcttttttgtagttccgcttcttgctctaaaaatgaagaaagacttgtcggaaatcgccggttgggttggtccaaccaagaaagacatgggagttgatgggctaagtaaagcttgagtcgagttaagtaaagcagcctggctacctataaagatctcccactgcacactttctatatatctgctttcattagaagcaactcaaaaattgaaaaaaaaaaatttttagtgtacaattcgtttacgttattacattcggtcgatcctagcaacgagcttcatgttggtagagaggggcgctttgtttccttagctccttatctacgtttttccagttacactaacgaaataaaatcgcgacttcctgaagaatgtgaactttatatataatataaaataatctagaatagaaatatttggtgaaacaaagagcgattcggtcagaagcagctaccacacactcaatccgatgaagaagcacataagcaagacgatttctctttccgtaaaaagccttgaatgcaaagccaaaccacttttgaaaacgaactctaaatgggtttacctttctagtggaatatcctgactataccctaatctccacccatcctttgccaccgcttcctcaaagaccaagaccaagtattaccaattcccatcgagaaagcaatctccactggagcgggaatagcactcaaagtcaccgtcaacaggctctccaactcgttcgtaacctcattggcttggattcgtctccgtcccaactctcttcccttcgcgtactcgtatgtccttttcccactcccctcgctctactaataggtatgatgaccagtaagaggaagcaacatagtcatattagccagagcaccctaaaccggcaacagcacgaccacccaaagcaataggaatagagaacgggactcgattgaacgtatcaatatacatttcctttccgtcaactaaagtctgttcgtttcctccgtaaaaatgaaatggcaataactcgtttcgtcgatcaagaaattcaacactggagtgcagcgcagggcttcctctttgagtggaagccccagcggaacggtcaactaagagtgagctattagaattgactaaagaagctaaagggggaacagtcttatcttaagagtaggtcgaatgaacgtgaacgagttggtcgacttgctaatcggcttgatcgagtagggcgattgttcgagtaggtcctatcggcttgacctcttttcgtcggtaaatcactctttgtcgtctgtcaaataatctatatacttactggagtgaccgaaatgcttcctgaaacaagcacgagggaacggtcaggaaataactcgtatcgggagaggaataggagacaccccgtatgagcttttgtaggagcaagcagaccgagtttcagaccccggataggagtccttctttattgacgcatacaagtaagcacgaacatgaataggagcgggcaatggaattgtatcacaatcggaatatgttggaataggcgtaatagcccgtctgccagctattggaataggccacccgtcttagccaccttattttgaaggagcaagtcttccggtgactaatctcccatcgctagcaagtccaaccggatcttctttctttctctggtttcaaaaccccaaccggtaaccaaaacaagcaagccagcttcggtagtggtagtagcttcaaaggaattggtagtatgtcttgaataggaaagcattcaaaatgtatgaactcaacccatgttcaagctcttgaacaatgaagtcaaaggctttcctttagagttcgatctggttttcatcattgtcgacagaaaagaaagaagggagtgttttaatttcctttgtttgttgaccgaatcccatctttctcagttacatgccgatattttgcctttgtttcggcttttaattagcctaaaagttcaagagtgggcccgaaccactccccctttccatttaatcactgacaaaacctacctttcaattcgacttaacgaaacgacttcgactttagaacaatcaatcgaacgggtaaggccaaggtaagggcctgttcataatccctattcaaattgcttgcttgactgatgttggtcttcaagcctgttgttccagtcactgtggctcttgcttgagccgagaagtacagaaggcacagaggtaagaagtttttagattatagatacgaaggaaaaatggacaggtttcaagtaaggcgagtaagagaaggttagagagaaccgttgctttgacataaaggtttgccttacaaaagaataaaagtcgaataactaaatatacgtgaaataagccctattcctcctttccaatggccaattcaccacttcacttatttactacttacttaataccggaaaaaacaagaaaagtagcactagaaaagcaaatagagagagtacaagacagaactaaataggtgtagagttcggagtagcgaagaggctttgatgacgaagcgaaggtacaaagtgaatttatcatggccctccgaatcatttttatgctatacgagcataaacaataaccatttagaatacctgcaggtcgagggagaactggtttgattcattttccacgtagggaagcataaaagtcaagctaacgcttcccttgtttgagaattcctgaccgtgcttatttaaggccttagcgtcgcgcttctccggtgagttagtagcagctgttgccggtcttgtgccctttcccatttttcaaggggcttggaagcttcgcccgtagtatgcatacttgaataccccagaaaggaaacgaatcgggcttcaaaacgtaagggtctagttaggtgagtcagcctctcaataagaaattcagcagccgtttgcaagcagctttttctaccgcctgcctaacctaattgaatgtagtttagaagaggttgggttaaggccggaatttctttgctttgctgcctacgtttgcttgtttcccgccgtagtgcggtagcttgcttgcccgatttcctctgaatggctttgtcagagctttctatcgttctttttgaagcccgctacaggttccgggggagcttagcctgggagtcgagccacttatttcttcatgatggaaaggattcgaacacacctttacttcatttgatcacttgcttcatcatctaagctaggtgctttgagagacgcggcttcccttacgtgaccagagaatgagatggaaacagaggagtcgccggaataaagtgggaatggaacagaagctcggggccagctagctactcttggaaatccgaaggtccaacctgatctatcccaaaaaccgtctctcttcgtgtcaatcagctaacatagagctatgaaccctactcgtatatccgtatgtaaggatctcgaaccgcccgcactcaatccatcccttttttccaatgctttcaatcgcgggccaagctcccagcattcctattagcccatggggaagatatgcaatccaggcagcagttgacgtgtagcccactccaatcgcctccgcctcccggtgaaaagaagttctcgtttgaaaggtccagttgacagggaacagctaggggagtcgaagggacacagctaagccggttggaaaaaggatagatagccatcaagtgctatgacccctggtccattcgtacgggaatgaaggcattgaagagcttcggggaaggaagcaagagctgcagaggaagaagatcagtgcgatgtaaaacgggggaggtggcatcagacctctttatctatcttatagatgtaatatgacttagacttctcatttatcctattagagctatccctcatattacagtactagagacaagaaggaaccattgaaaggaagaaatgaaaaccttctccaattcctctttacctgaggtacatatcaaagagggtataagcgtaagaaggggaataaaaagatgacgcaaaaacaattattattgggtgaaatacttaaatactagaagagataaagtaaggaggaagcattagaagtgccttcctcatagcacagtcgtatggcttattagagaagggaaaagacacaaaaggaactcatagccatagcaagattcaaaactgcaaacagaagactctaatcactagaaagaaggaagctaggcaggagccattcaaagcttcgccttagcttgactaggatagaaggagaaggagttataacgcattcgagcttctttctatatatagatccagacaaaaagacgcaaagatgcatcgtcaactcatctgtcctgcctttttgcatcttccgcttgtcttccttgaaggttatagcagacaaagacggaaaacattgatcgagttttctttctatatatcctctttctcaagatagataagcgaggtgtttctcactattggcaagaagccttaagaaactttttttagtggggacctagccttcttgcttttatctgtctccctcatgtagaaaggaaaggcataggtagctagtctgagtcattgcgtcctctatgagctggatgtaacgactttatatccagctaggacagataataactaattaactaattagagagtagccgtcttctttctctttgtagttgggatagcgggcaggattagaggaagcaagaacagataggctaggattagatgtatgtggtttctaaacgaggagctgaggataaaggggggtaagtcttctctttatgacttctcttgagccttcatgtactgggatagtaaaaaggacttcgaagcttcttggttgatagctcgatgtaacagcatgactttctggatgtttaacccagagatatgtagctaactaaggcagtctggatgctagccaagagcggaggctcttcaagaccttactctaacaagtaagcaagtaaactaccttgcctctcggataggatttttttgtttctctagttatcctagtgttgaatcattcgttgcgtaagaccttgaattgtctctttgtcttatctctatggatagagcaataaggaatgcattaaaagaggctcgagagacctttcctgtacttgtagttgattaaggaaggattcgattctagttttcacgtgcatcgttgaattaggttgatagggctcttacctcctcaatgtttataaaagaatcctaccggaaggagtgagtgaacgtagttgaacggtgcaagcagacaagatcaagtgttgtggtttgctgaatcgaaggaaatgttgccagctctttcgtcacagccattaagctaacaagaagacgactaagcctattcgcccccccaagatatgccgccttcgggacttcaacacaagggaagcgttagcttgaccaacacagcctaagagagagaaagaaaagtcagtaacggcggagtaggtcattctacttaccggttctcttttaccagccagcctacggcaacctgagcatctgcatgacgttctcatatgatcctgtgactgggcttaggcaggtttacagaagggtatcgtcaagacctctcgagaatgaaaggaaaggcaggaataagaccgaattcacttcgttcctgcgttgctcaactcaaaaaggctccacaagcacgatagaggagtacttaacgcgcgttgagcgagcagcaagttctattcgaccacgtgaacgcggtttatccgtagtaaagtaaaagactgctcctgctgcgaagtttaccgccccgctaacgctatgtgatccggtcaaggcgaatcgaagggtctttttccacttgacaatccccttccatatcatcatataggcatatataggattcacgactgacgccccgtgtggagagagccctaaagcactggttgcaagttactccaccaagagaagatagaatccgccaagggcattcccagcagcattagctagttatatgcaaatgacagccaaggaaggaatcgggtcgggaaagaagactggaaccgatgttccagatcattacgaatcctaagccaactgagttatctcgtttggcgtgggcatcagttgaagtttcagttgttgtaaattttcgatgagaaaggtataaaaagaaaaagaataaagttacccttttctttttggaaagacttaggctcaatcgcagcttaacaggctcgctcgctgcatccttcctcttgaaagagttctttcgaagcccctttatttataacaccttttttttcgttggtaatggtttcaggttctgaatggatgtcccaattgggtgaattcttaaaccgagatggattcttgcccgaccaaataagataaaggcttggcagtgaaaaggcttttccaagaagcaacttccttattaggaggctcccctattgatatttaatcactctcaaacaggggtagcgggtgggtacagaaagactaatccaatcttttaattcaacaagaagtaccaccagtgtgatagaatgcgattccgaatgataagacctaggatagaaggtataggatggaaccgaatcgagcctacggggaagttgctccttagaatgccaaaccaaattagaagcaggcaaggctttctatttttgtagtcggggaaagaatcccggggttgatgctgaaccaattcttccattccatagcccagaggaagcggaaataacattccatgctgcgaggatctgaaagagatcgcctgttgtacggttgctttagcccaggagccaacctagccccaaagtaggggcagctaactgtgtagatagatgctctttcctcttgcgggtcttccaagcgagatgctactgcttagattagatggttagctcagtagatgctttcttgtagctctaccttttaaaaagcacttctcttgcgttcttgagttagttttttgtcttgtagctactaccgatatgctatgcaagtggtagaagtggtgctattaattcagtgctaagcacgcagctcgcgcagggcttggaagacccttcgctagcgaggcggctattacagaggaagaagaagagggagggggtaccgaggagaacaactatggttggcttagaccttgcgtatactgctcctccttttggtagctctctcttcaagcactcttgccttaagaagggctagctatgtttcaagcactccttcttgaaagaacaactcaaaaaactcttcccattcaagcactacttgcagctacctatccctacaactactaaacgctatgaaagccatacaactgctctatagctagaaagtgttctcctcctatatataaagcagctagaaaagccatacaactgctataccagcaatgaacctgctatgaaaacgatatacctgctctactgacctgtggctctaccatttgtagagaagaaagaagtcacaagggaaagcttaaaagaacaactacttgataaggtgttgctaagagacaatacaaagtaatacagcagctattccagtaacaaacctgctatgcaatgccagctatgaaagtggatgtataggcctcctatcccatacccaatccaagaccctagtgggcctgtttgttgtcggtgaagcaagcaaacgtctcatttcgttcattgcgaggttaggaaagggagccaatgaatccgcggagtaatttgactctatgaattggatatttagtttaggtaatgccaaggttgattcaccaaacagaaggaaaagggtgctaaaagccccaattgcctatgtctacgggtcaatcaaaaccttttgaggttgaaagaaggagctgccaagaaacctcgattccgttcaagttttcggcaggttggaaagaaaaagaaggcgctttgttgtcgatcgccagatgtttttggtctcgaattcgagatgcggtgaatggtcgactgcttagttccctattcatcgagttgttcggggaatagcgaatagtcatcactgaaaggagtaatggttgagttgaaccagtgactaacagggaagacctcatgtcgtatataaaaaagaaatgaatcaagaaagtcatcgcttttgcccgcattcattcagtcttagtggcggtgcccgcgccatttcctattgcttgctccattattccctcactggcacatgctccgggctcctgctttgcctctcacccatcaacttaggaatgtgttgcgacttacttacttaatgaacgaatcttttcgatcgaagcaggagcatcttctatgtatgaatatgtaaaccatacccttgaattaatattcaaatcagctaaaaactctatccccccggtgccacaaatgggttcccacttcatcgcggaagctataagggcgagccttacgtgataggggcgaattcttgcatcgtttcataaaaccacttaacaattcaacatttccaccccactgctaatgtggattagtcttctgtaggataggcaaggcatccaggactattagctgggttctccccccattcaatactattcgaatctctctaggttgagcaactaggttgaacaagcaatcttgaatctacaggcgcaggagattcattcggggtctcagctagctgccatgtatatctcttcctggttagacatctaccccgactgggagcaaaggtaaggtttattcaggtgattgatcctccctggtattcaatacaaagcaaaaaagagggggcatctctttctccgagacaagcctctgcctctctcatcttttgcaaagcgccggttctcgcctcggctactgctttcagtgtatctactgagtcaggtttcatacaaacccggggcgttacctccgccggaatatatgcccaccaagcagtaaaccctatgagtaaacagatcaaaagaacaagcctcatgtcccttgtataggcgcacattataccttcgggcagtgagaatctctttctccttccggactcacttattgcattcactagtcccagctcccttcctggcgaggctctttgcatttgtccgcctgcttggaagttctttcttttctgtatcagggcttgaacattctctggtaactgactaacgttcttcatttttgatctcctgcactcaggtttcccaaaaaagagttgaatatgggaaacatgtggctacctattatatcttctttcatcggctattagtgccgacggcataccgaaaaaaagaaaaaaaaaaaaaaaggattgtagtcgatgacttatgtaaagcctgaggactttcatctaacagtccccaaggctagttggactcttttaatcctcctcgctcataatcctaggcttttctcatacacttagagatggacttgtggcctccactaccaccacctccgcctctaagtgactccgagaatgaaaactacttctttaaagcccttagactccatttaatacactctaaaaccactaggagaaactgatttcgcaaaagccagactaagaataatggatgctacgaaaacagagagagccctcgttctattcggatttaagccaagggtcctctggttcaaataagagttgtgcggtctcttattaagaggatcaccacaggggaaaggactcgagacatgatgatcgctacaaaaatgatgaacgaaagtatcccgagtcacccttactacttctctaagatcggaagaacaaagggaacttggtttatcgaataacgtattcctaaagatgaccatcaaagcgagaaccccattaccaagcaagttagtaaaacaaaccgcggatccctgcaatacgactacacaagcgcgtccgccagaatgcccccttaattctgctacttttttttacacaattcccagccaaaactgaaccttcgattcgtcccttcctctctcaatcgggtgaattgggttgagcacacggatagtgagaatgttctttaatcaaatgatgcacctatcaccgacttagttgcgtcttctttcgcccactatcaaggaggaatctcactctggaaagcaaggcaccaccctccagaactatagacataggttttagacaggcccctgcgtcaaagccgtatccgtaacctccaagccgggataagcaggcacgaacttccgtagttgtgagacgatctctgcataagcctgttccgacttcgattgacattgaggaagagggatttctacttggcttgatgtcctttaactactcatcaaggctcatgtacctagcctgttcatcattccattcctatcgttatgttaatagtaagagtatgcgtgcttgcaaaggaagtaagtgagtttccaggctctcattcgtccgacccaacctcagactctttcttcccgacctatttgactctctggccgcagttatttaggtggtatcccgagattgaagagatctcattcctcccgggaacacacgaaacaaagatatgaactaggtaaatagaaatggaaaagagatgtttccaattcatcaaaatcagaagctttttctacatccatatgatctactaaagtagatcggtattgcccatataataaaagcagatcttggtccatggagtcccaagaaggtaagaactccaacctgtccgatgcttcttcggccaaatacaatatacaagtgggacctgcactatgagcaagctgtgcgaaaaaccgcttcttttttccggtttcgcaacaacttgggcgaaatagggttctaccgggaaaccataaattttttagttttcgccattggttactggtcaagccactggcatggaataagataagaatctctggagatctttcctctccacttactcgtaacaggctttccctctgtagactacttcttccgaatggcataattgtcctattttttcctcgatcttcaaagaagactgactcctcctactcctccttctcctttaggataggatcgtcgttggtccttctttcactaatgatctaatgatctcaccattttctagtagttcgcgcgaacgcgcgagggactatcctttctatcgcttgcgcttgcttttcactctcaaggcaacggtctctctcttctataaagcgaagcaaagcgcatggcgctgaagtgaagaaagctcaataaacacacacgaacacgatgcagggcatagcataaatgagaccgctgatcatttcataaaacatatatgctttccctttctcgatgcttttttgggggtgactcaccaaccgacccagcagtgatcgatgacagaatggtacgaacaaatcaaagtcattggatttggtagttctccattgacttctctctttacccctttgcatatgttcctaaatgggtgtgcacccccacccagatgggcaggggccggcctcccaccctcttatgcagcatttattagcttagctgagttgggtggatcgtgcaataagcctctctcgaccctccctttctcatacgtctttatgaaagcctctcgcctttcgagatccggtccatcatcaactactcagtcagatcttcttgtttgcttgctttgacccttaacggatttgatcggcatttcgtgcctgcggaattcgaccttttatccgctggttgggtagagcgtagtaaggttagaggcgcaactagaagagttggccctatctttctatttttttctcaattcgattgcagtctccgaaatccttcttgatcgatggtccccattagcattagtgccaattagcagccgctctttttggaaggcgaggatctgaaagagatcgcggattccacggtagcagtagttctagctctacattaggagcacgggggctctatctatctaaaggaggtacggaccccttccatagtagggtacgatgcagttgaaaaacgtaagcccaaccgggcttacgttttcttgcttttctttgttgaaccctctacggtctaccctctttctcgatatcccaattctagcgttcgttagcagaagtagagatagggggagataggatttattacaacatttatgtgaaaatgacagaagccgctataaagggaagaagcacatcctgcaccttcacctgcgaagcgctacgctcctgcttacgaaagactgaaccaaagaagggatgggatagacatagccatctctccctcaccccgcagctcaaactccgcatcctgatccagatccagctacggacttactagagctactacgcatccggggaaggaaaaaacaaacctaaaagagggcataaaagactgtctgaatcttcctaaagtagcagaagacatgaaagtcactaaacagcgctttaaaactattcaatgtgggcatataaacaataaaagaaaaagaccgaaccagcaagactaatgtatacttatacctttgagaggtccacttatactattgagaaagtctcttaagctaccgtaggttatataagattcaattcaatctaacaagcggactacctgaggatactacaagatctttagaaaagaagctgagcctactttacgcacttccgcactaagcaggcaaggccaactacacaagcaagaaggcatcgcctgcggcttccaatccaatgacaagcaaaagacgaagaaggaacttactataccttacccccttgtgcccatagcttgacctcagccttgaactacctgcacggatgccttcccttccttgcaaagcgaacctagccaagcaatggaaggaaaaaggactaagaccttcctcgcgcacagacagacgaccatctttagcgaagtccctccttcccctaaagcatccgtttcgtcaaagaaggactacgcaggcacactgactactctgattgggcgtggactgggaaaaagtagcagctaaaggaaagctaaaaggtattggcgaagaagtaatggagggtccgaaggagaaaaagagggaaagctaaactagctaacgaaggctcgagagacctcgccctagtacaccaaccaggcaataccttgacctcagacctcacccgagacaggctgccacagactccagaagaaagtcacaccgctactctaccgaactcgagcggtcaggaagaaatatttcttatataataaatagatgtttctttaaccggatttctcttccaagagccaatgcgaccagaaatgttttaaaacaaaaaaacaaatggaaacaaaagaaaaaagaaatgtagccggggatgccatggtttaagctttaggctccatagaatagacggaacttttttttaggtattagggaggggaggacaccactcagcacctaaggtggggctcaatgcctaacaaaaacaaacggccaaaagaaaaaaagggggataaaaaagagatgtatggctgaggggagaaagaacgcatgcatggagattctgtctatcggaggttcgagaatctatgaaaggacatctaaggctaaggaagaattcaaggaagtccattactgagagaagtggtgatctcgtcttgcttgctgggagagaggaagcttccggaccaccttttccagccaaatagcgagcgatcactcagcaatgaacactaactgaaagcggccgggaatgagtacctatcccttacgggaatcgaacccgtgtcttcgacatgaaaagacgatgtcctaaccactggacgaaagggaccaaaaagccattcttcatatacctcagctccgagaatagaagtggttcgttttgtttctatacgcaattcaagatttcgtttgtgttcatgttgtcgatttctgatgtgaattcggcgggtcgtcccccctcccctttctccgatcataaagccccctgatccctttctttgtctttcatcccccctgaacagaataagtaaggccccgttctttctaattcaaaaaagaaaataggggcgaagcgcccaagtggcgaaggcctatgcttaagtaagaaagtacgttaaggttaagaagtaacttagtctctctataaagaaagggaggctaagattacgaagtaaggaaagctcaggttatgaaatcccttagccgttaattaattaaaatgttgtagtagtgaggcgtcggtacggagttgcgtcagctgtagatatagactaggctaaggaacggacttcatctcttcacttacaccttacacttccgctgagtctaacgaggctcaggtgcggagccttccactgtggaccgagactacgcaaaggtagaacaccatagaaacttcgctgactttatcataaacctggctttcgctacgctcaataagaacccggaatagcgtaaatcggttcgtgttccgcttctaaagtcagtcatctttgcccaagtgtgaactgcagacgactgactctccagtgggttccattccttcttactttacttctggctcaacccaacccgaatgggaagaagaggatcagccaaacagcggtccactttgtacatttgctgaggcagaccaatcaggcattttagaaaaggctcgagagaccaccgaaggaggcagtaggaatgaaggaggcgggaagctaccgcttctggaatgcaagcttatccttgacttttttttagagctattgaaataataaaaaaaggtttatggatgaagtaatcggagtgacaaatggttacggttgcggaaaccggagaaagtcgggaaccgtcggttaccttttgaatcaaagtagcgacgagccgagtactacgactacaggggggggagcaaagcttctacgacagcttcgcttcctcgtcgcttctttctggcgactagcttctcaagtgggtggcttggtaagcaagctaccttcagcatcggtaaaatccctatcaataataggccggaatggtggggaagggggccctccctacttcaatggaaaggggggaatcgccgtttcacagccgctcctctacaactacctttcgcccaacatgatcacgaacgaagacagagaattgcgtagatagaaggacgaaacaaaccaacccacttatcctgatcggaacgattgaagaaagaaagagaatgatggcccctttcgcccagggggcatcgtcggagaacaatgtcggggacagggtgagaaccttccgttggttacgccctttaagtgttggttcttccttagcttagatatggagatagatccagatagagatctatatctttctatcgatagatagatatattgagaaatggatattgatctggtttcaagatctatgaacaagagatccctaaatatccatttgaaaaaaaagagatgaatagatagggcggagccagctgaaggaaggtcgcgttagcgcccctctttctaaagcaacaagcgagaaacttgactttgagaaagaag

SEQ ID NO: 13973 - DNA, 6958 bp, Cannabis sativa
  modified_base (1030)..(1035): a, c, t, g, unknown or other
  modified_base (6248)..(6251): a, c, t, g, unknown or other
  modified_base (6642)..(6644): a, c, t, g, unknown or other
ttttattattttagagatattcatatttatgatgttaattcaacatacttgttagtatatctagatcctggtaaaatattcccaacactattgacagtgacaggtgaggacgtgcgacgtcattggggaaggaatgttagaataggggcgtgtccctccaaaaggtgatttccgttttgtagtgtacccttccaaatgttggtagaggggacagatctccaaatttctcaaaatcatgtcagaggcgtaccatgtagacaacttttaagactgtaaattttctcggatatccttccagtttccatccccgaatgacccttgaaggtgtttttgtactctgagattcttttaagttaagtaccatttgtgatattactgttatatttgggaaacttttgaatccgattcatatgagattcggacacgaagtccagacttatctttatggatgagaaaaactcgttagtcattttgggccaaataatgagcgtaaagcctattttatactctttttatattgtcttcttttatttttaccctcttttttaaagtctatcatttttacctcagtttttaaatattgtattaattttaccccagttacttcaagatactctccatgtgactctcttatgtcatggtattttgggtacaatacatataaaaagaagtatgtttcaattaaatataaaattaaaggtaaatttaattaattgattaataaaagtagtatttttaaacaaataacactattaaaatacatgaagcttataaaccaattggtatacatagacgaagaactactagtttacaagtaaaccaaacaaaatcacatctatgcaactaaaaacaaaatgcttttagactaattggtatataagcatatcaaaccacacctaaacagacttgcgtaaagtaaactcacagtcggcctaggcccccaaactttgatattggcttaatagagctaggcccataagtgtgagggtaagttggttgttttcgtctcattattattattattattatnnnnnntattattattattattatatgagagaaaataactcagaatatgaagaaatatatttataaaaattatttgctgaaacttaacacaaaatatgaacaaaatgtattttattgtaccaagctcacacacaaataataatataaaagaaattatatgatttaatattctacattattatcggtactttctatatcattttcaacaacaccatcgacacttttctttattatcaacattgttgttaatgttaagcaaaaaattataaaaaacacacaatgttgttactattgagcttttaaaaagtatataaaattcaatctatgttccctccaccaagtatttaggctagcagtttttcaactagggttacaattcatgccatgatattgaggtctcaaatttattgaaaaattgctgacacaaatatggctcgtgacaccaaaatattataacacagacattaacatgattaagatacattttgtgtcgtgtcgaattcgcaaaattctttattatatccgtattgtgttagcgtattgtaagttaaattgttattttcagtgtcattatgttatgcttgggtcatttgaacataacccgtgacatgaaaaattaataaaacacgaacacgaaaacaacttgtataaattttgtgtcatgttaaacgtgtaacatcccgtatcatttttgtgtcctatgtagcatgatcgctaaacttatattaaaatagaagtaaaattacactatggtgacaatcctaaggtacaattctcaaaaagcgcgataactttctcgttaatttttgcgactaaaatgacgagctatagcgatcacaatatattatagatatttgagtattttttatgtaaaaagtaattaaaactaaaatattaaatataatttagtggttatcttattaattattgaaaaaaagtgagaaagtaaagtttttttttttgaataagtgagaaagtaaagttagaattcgaccttgtgtaagaaaatagaccgatatttataagaaaaatagatcacccaatgtagagcactacctgaaaattaggatccatatttttggatgtttttcaatatattagttggattagccagacatgaaagtattgctccgacaacaaccacggtggaaatctaatttgtgagaagagaatagagataacatgtttatcacataaaaaataaaatattgttttgtttttaaataaatggaattggaaataataacaataataagtgaaataaaaaaaaaaaaaaagtcaaatacaaatatacatccatatatataacaccaaaatgtacaaagcagcaaaatctttatcgaaaaatcgaggaaagaaaagctgtacacaattctaatccagtactttttaaggttaaataaccccccaaaaaaaaagctgtacaccatcactctctttcattttcactcttctcataaaagaaataataataataaaaaaaaaaccttcaagaacaaattaaacaacccaaaaaaatcaaaattaaaagacattgaaattatttataataataataataataaaagagtaaggtaaggagtaaatcatctcttccaacttcgactcctggagaatggatctctaatcccaccaacgacccaagtctccttggcaatatcagaagaaatcttgtaaaaatcagtgtcgtatctcatcaccactaactcattattctctgcttccattaaacacttcaaactgttcttgctaatctttttctctcctactatttcttcttcttcttcttctgattgttttgctttttcttcttcttcttgcttttcttctaaccaacttttcgccggagcagacctacacctcatgagcatcaatgcattcgccgggggaacagcaacttcacagccggtcgatcctttttcatcctcttcttcttctattttcatcatacgatcatctttagaaaacccattgttattactctgttcttcctgtaaaaccatataccatttggagaacactgttctagaagcttcagactcggtacgattagtttcaccatcatcatcttcttcttctaattcgtcgtcttcttcttcttctaattcgtcctcatcgtcagtcgttatatcagctccattatgaaacgagccaaaacatcgaaaatcaaagcgaatgtttctgagacaagtgaggaattgcataacatccttcttgatcccaagagcctcagaccaaccaggccgagctttcttctgtttcctactattgtgcatcctctcaatctcttccatcaccgattgccagctcttacagttgctcgtcttgtgccggactttgatctggccggcgcaggtgactttcggtgaagtgggttccgagacaagctctgttcccgttgaagacttgggtttagcccataaaacaggactggcttgaccattactacctctggtgattgatttcttaaggtgatgatggagatgatggtggcggtggcggtgatggtggttgttggggtcagaggaccttgctggactacaaatgggtttaggcattagggttaagtgggcccgagatggaaagcaaaccaagagatctgctgcagcaggagctcctttggtttctcttcctttcattttcttctgcaaaaaaattttgtgtgtctttagatcttgtgtttattccaactgagctctgttctgttcttttgggatggtttttaaaaaagaatgaaagaaagaaggtattattgacagctttctttctttcttttctttttctttttctttttgggttgaaaaaagaaaagaaagaaacaatactttattttatgtatctacaatccttttttgtaatgtggtcacaagagaagagagtctcttataactttcattcttttttctcccactctttatttaaatactattattatatttagataattaggaattgtcccgcccaactaaaatatacttggagagttttgtttcttaattttcattttgttataaaatgtctaactcaattatgaaaatcatgcaaatataaaaattctatgatgtaccttttaaaaatattagagttacattattaatatatagaaataaattattaatatatagaaataaattgttaaaatgaattatttatctcattatcaattgattatgaaattaataacatgtaccttaatcacacacttcttagactaaacaacggacctaaagcctattgagctttagtcgtatgtcacgtctcttgtccagagatgcgggtaacaccaataaaatacatgaaggatataaatcaattagtatacatagacgaagaattactagtttacatgaaatccaaacaaaatcacatctacacaacttatgaatctacttctctagttatattatttttattttgttaaataatttagtgatataacactaaacagataaaaaacaaatgcataataataatctaaggatgaataacaaaaatatatatatttagagctaatttttttaatattaattgggtgggtagtttaagtattaaattaactttgaactgcaactatatatgtgacttataaacatataagcaaattgaatcaacaaaatttaagtgaaaagaatattagcaagtattttacacagtgtttgagataatttaaaaaataaaaaaataaaataaatcattggacaaaactcttggagagttatagacttatacttgagatatggtaaaagatgctatttatttttgtaattaatattcctcactcttcattcctatcttaacaaactatttcttttttaaaatataaaaagaaaagaatagaaagttaaaggcttattaaaaaaggccacgagctgtgtttcatgatccaatcataacatcaacttgtgagccctttgccagttatattagtaaatgccctttcgcctattggctagtgcctagtgcttaagtgccaaagtttccttctttctttcttattattagtaatagtagtagttgttgttgttggtagctccttactatattttattgttattatctataatctatgggactatgataaatttctattttcttttgttttaatttctcactactcaaccaactcaaagtgaaagaaaataaataaaatagaaattgatttgattttatttgtttagtatacccaacttaaagtactccacaaactcaatatgcataattatgatgatcattaagatgaaaatgaagaaaccataatttgtatagaagaagaagaaggaaaggaaagagttgaaaagttagaccgaaagttttgaaaagaagggataattaaaagtgagggtggcataatgaatgaatgaagttgcaattgagagcagcaacagcaagggtagaggtgggccccacctaatgagctctactattactatttctataccttgcgttaggattaaactttctttctccttccttcttcctttgtccttccaccaattcttatcatcattacatattattattactattataatattgtactagtagtagtatctctcgtttaaacattttttattctttagaaaaatagagatatcgattaaacatggccatcttaaagtgatgagaggcacatgaacgacatttgaaacgagacattttttttaataaaaattaaaaataaattttaattaaattttgacacaatatcaattttaattcttttatctctatgtaataaataatatttaattactaagaacatctctattgaagtgctatatatttagcacatttaaaagaaaaaaaatgtgtttaaattatatatatttagaaaaaaaatagataataaatatcaattttgtttattattaataatatcgttaaaaatgtacattaatattttaaaattaaaagtactttaatatatttttatatatatatataaaaccttgaacctcaaggctaataaaagctccacttaccatatgttctacacaattttcatgtaatttgtagagttaaatatttatttattataaaaggtgattaaggaaaggatcaaactttgaacctcaaggccaataaaagctccacttatcatatgttctacacatttttcatgtaatttgtaaagttaaatatttatatattatatgtttttatatgtatatttatttattttaatttattttttgggacctccaaaattgtggggcctnnnnccgaggccccggctgccccaccctctagccggccctgcgattaaatagtaaatgtgataaagtttattgtattggagcaaaattacttgaatcatacaatttgtaacacttaactccacaaatagattttttttttgttggtaaaacctgtaaatctcacttctgttatattatttacaactctattcaattaagtgccaatatatattgttgacaaatatacttgtatacacataataaatttttattagtccacatcattttgatagtttaaatactataaaataatttataaataataaaataaaataaataaataaaattaaaaagtaaaaacttaaaaattgtttttcattttcctttcaaatgacaccaaggcaatatattggtnnncgggaatgaagagtgatattgttgaatatgtttcaaattatttaacatgtcactaggttaaggctgaacatcaaaggccagcaggtttacttcagcccttgagaatacctgaatggaaataggaagatataactacggactttgtagtggggttgcctaggactattgggttatatgattccatatgggtgatagtggatagattcaccaagtcagcgcactttttacctatgtgagtgacttatgttgtggaacagtatgctgaattgtacattaaggaaatagtgagactccatggtgccccaaagtcaatt

SEQ ID NO: 13974 - DNA, 7201 bp, Cannabis sativa
tgaagacaattcctaacacgaatagatacagaaaatgtaaacgtcataacacatttagattagattattattaaattttattttgacgaaaaagttatttagggttctatttgtactattttagaaaatatagagttcattttgtcatttaacaaaaccgagggtctagttggtaacttttgtaaaacataaggtctaaaatagtatttatctaaaaagtatatatatatatttttagtgagttattttaatatatatttgtaattaaaaatgatattttattttgctttaatggcttagccaacttacatatataaatattactcacaaaatgctttagaatttgaatcctacttgtattaactattaaccaaactagttattattgttattattttattttaaatatataatattttagagttattttaaatatattttatactatgaaaaatacaaatttgcatcaattgtgttagcatattatattatgtagaaaataaagtatacgttccccctttccttaacttaaatcctaaatacttttaattacaacctaggaatgataaattataattagtcagaactttttcacttttagttacaaattttattgtgactaaaagtaaaattttttgtagtgtttattattttcctgggttttcaaaagtaaccttttggttacttatgatgctgataagaaattaattagttatttttatgcaaaaaaaaaaaaaaaattcttttttaaattatataatttgagatacaattcagttacctctaaaacttcatttgtaaacatcttaataatcaattatctgtttttaagttatattatgctatcttattatttaaaatacatttggttaacattaaaatttattttcgaaactaataagttgtcatataatataataagctactatttttatttaccgttttgttactttgaaacttatgtatttatttctagtttatattaaattaatttgttattttaaatactcttacgtcacttattttttattttgtttttgtaaaaatatttattatgttactttcaaatctatttaataaattaataagttaacaaagttaaaaacaaaactcacataacttattggtaaaattaaaaaacatttagattgctaattaattactttaaagttagatatcttttaagtttacagtagaaactaattagttttcatatagtataaaaaataagcatagatatgaaataattttatatagtttactttatagtaatatttaaattaattataatttcaataatataccaattaattggtttcttttcataaaatgatgcactttaaataaaaatatcaccaggcctgtagataatttttaatttttagattagttattttaaactatatgttcttttttagtttatattatgttgattaagatgtacttttatgttatatttttctttttttgtgtaacaatatttatgttactttccatactatttaagaaactaatgtgttacaataaagtaaaataaatcatatgatttatcagcaaaaaatttagacttctaaattataaccaattagttattttaaaattattttatagtatctttatattatttaagtaatattactttaatgtagaaactaataattagttaatatataataatttttaaaaagaataataaaatagtaacccgcaaatttgatcgcatattatattttatttaacattaaaatttagttattttttgttaactaaaagaaaaataaacgaatcttgaatgtggtaattttgacatgtaaaaaatatatatttttccatcgtcattataatgaaaaatcactatatagtttcttatgatacctaaaatgaagtaactatacgatgttatttttccatacacaacacaaaaatgattcattccttattaattaccctactttattgaaaaaaaaaaattagttgcttgagatgccaataaaaaatattgtaatattgtaatttttttatggccaccaatgcatgatattttgattggtaaattaacatagtaccaataggttacttgtttataaaatttaattttataattaattgtatctagtgttaaaatgtaactaatgagtatataattgacatagtaagtaattaaatatagttttaaaataagcgagaaaatacatgcttctcatatataaaaatgatcacattgaaaagtatgtcgcaatggtacgtctattttttagcctacacaactaggggtatgactacaattttttttttttttttgaagttggggaataagattttttttttttttgacataaagttggggagaagatagagaaagaaagatttattttatacttctagaagcctatgttcaaataaaagacaaaaagaaaagaaaaaaaaaatagctgtcaattaagctataaacattaaaatgtataataatttttaaaacggtacgttaaaattatatatgagatagtcaaaattattatcaataataacatacaaaaaaaaagtttgtagatgtaaattattatgagagaaaattacattacatacaccttttaattattcaaaatctattatgtttatcttttttttcaatcattctaccaattttacccttatcatttcacgatagtctccattattctctaactaaaatttttcctcaagtttttcacaaacctacacatccgtctctaaaaaaaaacaatctattatgtttgaaattgtgtcttagttatgtgagggtgtaacggtaatttgggtataatactcataaaaagagatatatttgaattaaattttatttaaatgtaaatttggttaatgtatattaaaaaaaggtatattcttcaacttttagatagggattattttaaaaaaaaaaatacaaaaataaccaaaatactgttgtacataattttaaatatttttacgatttttaagattttattacataaaatacggtattttgttgtatttttatgttgtacttttattgttttattgttgattttttgttatttgtatattatttttttttatgttgtttcgatattgtttggatgttgcttttcctattattttcatgtaattttcttatgatttttgtgttatttttaatgaataccgtaaaaatataaaaaaaatctctaggcgtattaaagtgtaaagaatttatcaaaaaaatagttcatgtaaattttacattcatatatatatatatatatacatatattaatcttataacgaagattaatattatgtcatataaaaattatactatatttagcacaaaaaattattttgtgatatatttgcatcaatttttaatatgatctgcttcgatgcacaattacaaaacttgattcaaaattcaatgttttcaccgaaaattaaatataaaaactaattaataactttattatgtaaataataaaatataaataaatataaatttcaacaatcaaattcaataactaagtttaacaataaaatattaaaaataatgtaaaataaatataaaaataatgtatttattgtgatgtaaaatctgcatcaaatattactcttattatatatatatatgtgacaaatttaaattaactttagtacaatcttagagtaaacatttgacaaagtgaattatattttagtaataaatcactaattttgcatctctcttagtttgaaaataattataaaagaaaactaacattttacaaaaatatataacagcaaaaattttttttttagtaattattcgtacatatgggccgggtaaaaacaaaaaggggataatttcaaaaaaaaaaaaaaaattacaaaaagaagaaaaaatatgaaaatatagttgtataaaattttaaatattttttatttttaaaattttatttatataaaacaatatttttagatttatttttatgttgtacgtactttattattttattattggtatattatttcttatgtgttttgaatgaatgtaaaaatgtaaatattttattaaaatagtcttttatatattttttccaacaaaaattatatttataatttttaatttaaattaggtatatataatgacaataatggtgtgtgggttggtgatagcaggtgaagcagagatagtttgggataaaaaagaggttaatattgtagaagaaaaagaagaagagaaatggaagataccgtttgcagtaggggaaagtgaagaaagttgcgacatatttagtgggagatgggtttgggatgagtcaagacctctttatgaagagtcagattgttcttatatacaatcccaattaacctgtatggaacatggtcgtccagacaagaattttcgaaactggagatggcaacctcatcgatgtcaacttcccaagtaataatccacttattaatttctctctctctctctcatataattatatatcagctaacaaataacattaggtacatcatgtatacacctattataattaattacgcacgtaatatagcatacattttaaaccattcaaaattattacttaaaacgggaccacacatttttgtatgtgtgcatggtttgaaacattactatttactacatcattaatgtgtgtaattttggatatatcaatcattatagtgtttagctaatctcttttactaatcaaaactaaatcatcattataataagaataatgaactatacctagatcaaaactgaataatatgtacaaaccaataatagtacaggcggacggccacgcatgttaattaattaatgaatacatagtactaaaaaaaattgatttatatatgttggaagagggaatattaatccatgattagttagttaattaattaaggcgtagaagtggaatatatagaataataaataatttaaggtttttgttgttgatcaatatataataaatgaaaaggttcaatgcgtcgcttgtgcttgagtcccttagaggaaagaggatgatgttcgttggagattctctgaacagaggtcaattccaatcaatggtttgtcttgttcaatcactcattcctccacatgccaaatccatgcaaacctttggctccttgatcgttttcactgccaaggtactaactaattaataataactttaattgttattattattaatttttgatgctataatgatattattaattatgatggtaatcaattattaatatctatataatatatatgtgtcctgattattttattttattaggagtacaatgctacaattgagttctactgggcaccctttcttcttgaatcaaacacagacaatgctatcgtccataaatttaatgaaagaattgtgagaaaaggttctatcaataaacatggaaaccattggaagaatactgacatattagtgttcaacacttacctgtggtggatgaccggttataagatgaacatctcgtacgtatatttatatgcatacataattaattaatatgttgctgttctttcttatttattttatatagtatttattaaaattttcaggcgaaaaccttttgatgacaaaattaaggatattattgagctgtcgactgatgatgcttatcgtatggctatgaagagtatgttgagatgggtacggcgcaatatggaccctaagaagacaagggttttcttcactagcatgtcacctattcatgacaagtgagtatattatatactaaatgctaattattatgccagtattttgggatgatttaagaaagatattttagtgtaaatcatctaataaaaccatgaaagtttgagagttaattaataactcgatctttttcaacacaactttatatatgatgtgttttgttgaatggggaatcttgagtcatcgttttttggttgatttggtcgatcggggttaattgaattgcgtataaatataattagattcttattgatcttaccaacataattatttcctagcataagtatctttttttttttaacaacaatatatataaattaaggtgattgattgtaccaatactctgttttgatcattattattgtaggagcataggttggggtgggaaagcaggagggaattgctacaacgaaacgaagataatagaagatccaaattattggggttcagacagaagaagtatactaaaagtgagtggagatgtgttgagtaagtcaaaatatccaataacatttctgaacatcacacaactctcaagctaccgtaaagatgcacacacatcaatctacaagaagcaatggaatccactcactccccaccaattggccaatcccattagctatgccgattgtgtgcattggtgtttgcctggacttcaagacacttggaatgagcttctttttgccaaactcttctacccttcttctgcatcatcatgattcatcattatttaaatccactctttaattacttcatactattgtattaattactggaatcacatttcatcacttcatatgggatcatgtacagtttactctttttttttttttttctttctcatttgatcaagtgtaaattaatttaatgaaaggagaaaagagaagaacatgataatttctacatagaattattttgggtttgagcctaatcgattctggaaagtgtactcttctttgtcagtattcctctattcacttatttataagatagtagttaccatacaaatcataattggcctccccatactaattataatagatataaagcttatgaaacatttgaatctatggtggctgaatgttaaacatttgaatcttgttgttgttgttttttttccctgtgattcatatactgctgcttttatttggtatgacaaggttccttcttagaaattgcagggtctctttagcgaagtcattctcatggggagggtaaattcagtggtggcccaagctaggggcaagaagggcaattgcctaaggcccattactaagagaggcctcttttttttttttttctttttttacatcaaaactacttcaaatacaacatacaacaagttataacaactataatatatataatttcaattagtccatatctccaaactcatgcattcacaatattcataataataaaccatgaaatgatacttaaatacacaaagaatttatattcatgcagtttaatacataaaacta

SEQ ID NO: 13975 - DNA, 2895 bp, Cannabis sativa
gaatttacttgtattattgtgataggacaatggaaacttgacaagcaaatttcatgttaatatgatcaggcaaatccaaagcatttattgttggctcacctatttgataaaccatgcttcttaggcttgctggcagttcaggtaagcaatatttgtttctgttggctcctccaacaattactattactaaagcctgttcgataaaaccaaattctgccttttgcttgtaggcggatgacatatctggttttcatgccaatacacatatcccaattgtgattggttctcaattgcggtatgaaatcactggtgatccactttataaggtaatttctctttcttcagtatttaatgatgcttgcatcatttttattgcccagttcgcttcttagtaattgcttagtctcttatataggacttcctttccatgtaaaattgtattgaacttctgagttctcatttaaattaaaatttcaaataattcagtgggtttaataaatattattagtgaacttcatttagttagtagaaggtaaagaaaacgagagtcagtagtgatctatcattgattgccaggacattggaacattcttcatggaggtcgtgaactcatctcatagctatgcaactggaggaacatcagttagcgagttctggtattattatttataagcacattgagttttaattatacattcataggaacccttcctttcacctgaatcttttatttatagctacgagaagttgctatacttctttcgttgtgcattgctagttcttctagactagttttaatccatctctaatttttctttctttgatggctgtactttaatctgctgtgagcaggtctgatcccaagagattggcaaacactctacaaactgagaatgaagagtcatgcacaacttacaacatgctaaaggtatccgtttcagtttggattataaaacttgccaatgtacatatattgcaggttgtggtaaaaatatgcttggtaattcaagtaaagttcatgtttacaatcttcaggtctctcgtcatctgtttaggtggactaaagaaatggcatatgcagactactatgagagggctcttacaaatggtgtgctaggaatccaacgaggaacagaaccaggagtaatgatttacatgctaccactaggtcgtggagtttccaagagcaaaagctaccacggatggggaaagccatttgagtcattctggtgctgctatggaacaggtaaggattgtgcttagtacatcatttatttacttaaaaggttcagctgaaagtcttcatcttgatctttttcaggaattgaatcattttcaaagctaggagactcaatatattttgaagaagatggacaagttcctggtatttatgttatccaatacataccaaattcccttgactggaaacttggaaaagttgtgcttgatcagaaagttgatcaagttaactcatgggatcctcgccttcgagtgactttcactatttcttcaggggagtcaggaaaatcactgacattaaacttgcgagttccaagttggacacacttaagtggtgcaaaggcaaagttaaatgctaaagaaatttctttaccagctccaggttgagtggattacaatctccaatgaatttctagcgttgcatcgtttgtgaacttctgacattttaacttttggttatttataataattcaggtaattttctttcaatcactaagaattggaaccctggtgacacagtcacacttgaccttccaattactctaagaacagatcccattaaaggtagtttcattgggtagccacctttataaattcacatgtttgccaagtttttcaacataactttatatatatatctatatatgctcactaattttgtcttgggaataatccagatgatcggcctgagtacgtttcaatacaggcgattctttatggcccttatctgcttgcagctcatagcagtggtgattgggacataaaaactggatcgactagctttccttcagattggataactccaattccttcctcttacagtgattatctggtgtctttcacccaagaccttgaagactcaactctcgtcttaacaaactcaaacaattcaatcactatggagaaacttcctgaacctgggacagattcttctcttaaagctactttcaggcttatcttaacagactcaccttcttcagacttatccacaaccaaggacatctttggaaaatcagtaatgctggagccatttgattttcctggcatgattgtagtgcagcaaggagaagacaaagacctcacagtgacagatgcctcaactgacaaaggttcttcatcaatttttcgggttgtttcaggattggacggaagaaatgagtcagtatctttggaatctgaaagcaagaaaggttgctttgtgtatagtgtgaataatgaggcaggtgggagattgaagctaggctgcaacttgaggagctcttcaagtactggagccagctttgcaatcaatgaaggactcaccaagtaccatcctatcagctttgtggctaaaggggcatcaaggaattaccttttgtctccattgtttagctttcgagatgaatcttacactgtttatttcaacattacaacttagatcataataatactagacataaaaactagccattgcaggcagttgtttattgaaagaaagccctgaaataactagcatttaattttcagtcgtaaatataaatatatataatttatatttctgtttgatgcaagctctgaaaagattagtgtttgtaatgaacaagttgtagttgaggatttggtggttggtaatggtgaaccatggataggaatactgttgtactaaaaaaaattact

SEQ ID NO: 13976 - DNA, 3167 bp, Cannabis sativa
tgaagataattcttaacacgaataaatacaataaatgtaataaattttttaataacacctctagattaaaagttttattttaactaaaatttaatttagagtactattttaaaaaatattaaatttaatttatcatttattaaaatataaagtgtaattaataacttttaaaaaataaaaaaaaaaaatagtaaaagaaaagagaatgaagggtattttgggtagaagaataaatatttgtcgtattaatggatgttagaaaaaggaatggcggggcatgtgtgtgggacccactttaacagtatctaatgacgtggcgccacattcatcgacattcagattcatccataccaaacaccacacaataaaataattaattaaatttattattttaaattaaataattttacagccatggcatgctcgacacgtggcgcaaccacagcgattgcggacccggcttccgatgacactcccacacatctctgacacgcgttcgtatcggcgcgtggaagcgtgctcaagctccttgcacacacacatgattggcgtgattgaaacgacttctggtggggtcgttttggtggcatttgctttctattttaagctaacaccaattttccttcaaaataattaaaatatttatgatgtgatttattaatttttttttttaggagtattaattacaattttttataataattttttagttaatttttacatttgaaattatatgttttttcatttttagttaatttttttttaaatttttgtataatagtatttattataattatagtatcatctctattaatttttaaaaaattatgaataatttatagtactgaaaatagagtttttaatattttaatttttacgtatatttaaaaaacttcaaacatatttttaacactgtaaactattcaaaatctttctaaaaattacagagttgatgttgtaaatacaaaaaataccattatgattgtttttttcaaaaataaatatttcaacatgtgttttcgttacaaagattaataataacactcctcttattttttatcccaaattcactaattttttattaaaaataaaaaaaatcactaaataaaagaaaataaaaaaagttgtgggggtttttttggttaaaataattaatgtgaagtaattatgaataagtaaaaagaaaatgagagaaatgggagccacaagatctcttagtcttattgcattaaattattttttgtgcggcaatggttgaaacacaacataatacctatgcctatatttatcttatgaccattctctcaatgtttgtgtattgccaataattaacatttttttataataattaattattataaattaaaatatttatgattcaataattaattcttatattaatagtggtaccttatcctatagtattattagatatcgctaatactttttagtattttatataaataaaaataaaatttttatagtgagatactatttgtgttcctattatgagcatctttattttttgttaatccaattattttatatgatagagtactctataatttacattactaaaaataatctaaatattcagttataatcatgttctcttgtgcaattaattattttaaactcaattttttagtattatgattattttcaattttttaaaaatttgtaaaatatataattaaataaaaaagtttagaatatacttttctaaatattaaaatagagactcttctactaattatgtataaaaaaaaaaaaaattgaaaagagtacatgtacgtatatagttaatgttttcactggctaaattaatgactatgggatataaagatgtttattactgagataatatcttataattggttttttataatttgtattaaaataaaataagtgagatttgatattcaattgtactaatagttatattacaccttacaatagagctagacattatgggtgctctttaattagcatagaacgagcattgatattgggtaccactgatgcccaacaccttttatagataatgttttacgattggttagtaaaagttattttcttaagttatatgaaacttgatacttaattataccaataacggtatgacacctaggatgatattagacaccaatagtaccttttagcatttttcttaatagtatagttagttttgattgcaattattaccctaaccaaacctcttacatactgccactaaaaaataaaacaggaacgattgggttgaattgcggactaagtcattctttttaagacattcgcaatactacccacgaatactatttcattgtagcaaatcgtcgaatacaccctcaaaatagaaatcgcagatggaagttttggtagtaaaaattgagttttctttttctcggtatgaaaaagtgtgtttctccccgtaaatttaatcgcatgatatagaccagtggaaccttttagcatttttcttagtagtatagttagttttgattacaattaccgaatcaaaaataaaacaggaacgatattaccgaatgaaatttttgggttaagtctgaactaggttgctctctttaaaacgttcgtagcactgcccaggaacaccattgcactatagcgaactgttgaatacacccttaaaatagatattgtagatggaaaaactaagtttttttttttttctcgatatgaaaagatgtgtttctcctattaattcaatcgcattatatagactaataaaatgaaaaattataataggaagaagaaccaaccaaccagctcggctcggctcggacagcatgtatgtatggtgggtcaagtatgtgtgtcctcacattttcacacaaaacttgatatcccttgggactctatcccaagtcccaaaattataccttgtatacttttataagcaatgactcatatctcacgtgagactcgttttattacacacttagaatacttttattttgtcaaaaattcataaactttgtaaaaaattccaacactatttattactatttaatattgatttgtgtggacaataaatatatatatttatatttatataataagctcttaaataggggtgttcgcggtgcgagtgatgcggtttttaactattttttcaaataaactcgcacatgcagtttttctaa

SEQ ID NO: 13977 - DNA, 9262 bp, Cannabis sativa
gagccaagtacctacgaaggggaaatgattcctaatgccaatcatgaaggtactttctaatagataattttataggaccttttgtgatcattgtataatataccaaaatgttgcaattgttaacgattctcttatatgcaggtgataatcacaatcttgatctcaatctggggatgtccacctcttcatttggcacttgtcagaaggaaagtgaggggcgtatccagttccaccctgggcattatgatgtacacaacagaaagcctctcggggtaactaacaaaatcctgtagcaaatgatgaattttttcgcactttgtcttgcattcgtttgttttccatgtactaactgatacaattgacaaaatttagcattctattttcatttatccacctttttttttccatcacataggaatgaccaaaaaaaaaattatgaccaatgtaacattgtataagccattttgtttatgtactatgccttctggttttgtagatggagaaccatagcaatgcaacactaggcgatccatctttcaaagggctcgtaatgacatcagaacaacaaccgctaatgttaagcggtgtataccctagtttctttcctaatgaggtaaaatttcaattacccttttgtctgaacaatttctctatccatatttagccaaataatgttattataacagtacaaagttatgactagaaccgaacgagtcatgaaattactcagtcaagttataaattaggcaactaatttctttgctccttatctataatattaatggaccattcatttggaaatggtatagcttcaaaaattagtgtctaaaagtgttcataatattagtaatttaattagttcataataactctttagcaccaacatcacggatctgagaacaagccattactatagtacaaaaattttcataacatcagactgcttgttctgttgttgatattgccaataattcttctggtaattacattcactctttagaaccttttttcttgggtgatgctattcatattatatgcgaacaaccattactatacttataactcaaatttaaatcctaatatacaggaaagggctacagacaagagaattgcactaggttcttcccaaggacgtcccgcgtggcaaatgcatggccaggttactgcaaacccagtgccactgttctctactgcagcatcatcaggattctcattttcggccgcccctccctccgctgccattctttcatcaaaaccactaaacccgggagcccataatctctgttttacttctcctaacacaggcgccaccaattccccacaatactattaccaggtaaagcctccccaggcaccgccataggaggaaaactagatctatccccttctctcgaagattaaggcaaactcttataactatactactagcccttggtcttcctattctttgtaatattcaaatagtgattgctcttaaactatcgcccattggatctgacttttctgttaagccaaatatcatactctactactataatacctataccatgttggatatatcttggtgcttaaaactttaagcattgctaacttgggttttctccccctatatatatatttgttatgtgtttttggacataacttgtgaaaattgttcctgaatttgctatattgatccttttggatataatgtttgaagattatttattgcaatgcataagagtggtagaaagaatttaccgttaaccttactcaaatttacttgttatgaatttcagaatcttcaggtgattattttgttccatttattcaaagttgatttggctaacaaaattagcctcactccctcacaataaatatatgtatatgcactagtttcttataagaagtcctagaaaggagcttgaaaatatcttaaataaaaatgttattttttcatctctggatatatttgtatttttcttcttcttcttgttattgctcttttaaattttcttctacaaatctcctttttcaatagtttgcttattcttattatatttttaagagaaatatcatctatttttggcttgagaagtacccaatgtgaatgcttgtttgtttagttcagcacttactataacagaacagtttgacagtgtacacgtgtcactccatgatttgcctgactaattaattataaaataattttaaaaaattactaacagttttaaaagaactgatttaaacaaaataaagataattgatgtaattaacttcacataagataaaaatgaaatatttatcctttgtttggttaaattatatagtgcaaaaaaagttgagaggatatatttttataaaaatctagtgttgaatttgatgagattttataaaatttagatgaattataaatatattcaagagcaaaaaactttattataaaactagaaaaatattttcccataactctctttgaattgatatgctatgcctatgtgttgttccaccattgaagaggatgaaacccactatcactatgatgacgtggaccaatcaaaacgaaatatttcgatggcagagggtggtggagttgtttgagttgatgctcttttggattttcatcaagtcatttgttgttatttgtgtgtgtttttcaatgttttggcatagttttgtttgttttatattttaggttttagtttgaggttgttttctttgaatattaatggtgttttatcatatttgtcttctatggaatttggcttgatttctttactcattttagatctcaactcttatgctcattgttgtgttgtgtatttggaggttatagataatatatacacaacaatggattagtataactcaaataaacatttgtgtttgctagaatttgatattgtgcatggggttttatcttaaaaattaatcgacaatgagagaagtagatcatacatcttatatatagtatttaatttcaactctatattattaatgcgagacactctaagagcagtgttgatacacttttgatatgactaagataaatttatacctaatataattattatatgtgtcaagaacttaaatagaagaccatacatctagttggaaagtctgtcaatataacaaacttattaacatatttaatgaacatgttaatatgacatgattgatttgtttaatatatttttcaaagagaattgttattgggtactagtggtatctagtaccttctataagtgatactctacgattagttagcgataatctttaaaaattatctttttaagctatatgggacattctacttagttataccaatagcaatataacattaaggagagtactagacactaatggtactttttagcaattgtcttttgtaaaataaaagtactcaataccataataccacaatacgatcaaaaaaagtatcacactcatacttattattattttttttttgaataaatcatgaaattttattaaataatagtttggaataatctaatcacgacatatatacgactaaattgtttaacaaaaaaaaattaaaataaaattagatgaaaaaggttggagcattacaattaacattaaggatacttatattttgtttcatctaccactcagaagacacagtagtagaaattgttgtagctagtttaacctcgtagcctgagtactcaactattgtgtaaggtacgtaactgcactactaataacccattcattcgtaaaaaaacttgttattttcaaccactaataatagtgacttaatgaagagtcattgaagaacaaagaagaaccaacaacgaaacaaaacaaaataaaatcatgtcacatagacaagactaaaacactcaaaattatgtcacatagacaagactaaaatactcaaaagcatgtcataaagacaagactaatcgcagtagtaaaaattgaatggcagtaggaaaatacaactccgatcaagctgcacctaagcccacagaaggccggtgggcctagccagagaaaaaaagcaaccttcgatagctataaatttaggaacgaaaaaacctaattttttcttttagaatagataaaaaatatatattagtattttattttattttatttgtttgagagatatgaactgttatttaataaaggtcctacttattttttaaaatatatatatgataaaaaaatatttttagtatgatatttagaagattgggttggagataaaataaatataaaaataagtattgatagtgtgaaagatagaatataaagagaaggataagttggagatgacgtaaacatacaaaacaaaaaaaatcaatatttttaataatattttaaggtcgtatatagtatttaaaaaaataaaaacattgttattaatagataaattagacctcaggatcattataaaataataagtttgttgacaaataaaaaatagacaaacaattaaattaattgtgagtaaaatcttacttagtcatattataagccgcatgccagcataattactaattttagtagggatacaaataataaaaatacaaccatcagaatatttagaaaaattttaccaagaagaaaagtaatttttaatctcccaacgacaacacttagttgagagagttgatcccaccctaaatttactctatacaatgataaacttgtgaccgtttttgcactatcaagggctaagcaaccatgcggagccacttcaaaataacttattttaatatccaatccgaaatttttgaaaatgcagcaaaaaaatccttcaataattaaggtttcaactcatttgcaacaaaaaaaaaaaacagacaagtattatttaatcaattaatatttttgaagaaaaattgtataaacatttaatatttataattttggttgtaaaagtcatatgacaatcatttcaatgcttgtgtaattcgatcttttgttgaggtttcgatagatgacacttgttttttcttttattttttatttttttgacactttatatgatagtatataataaataacatgcaaaatttccaaatttgaaatgtttttactataaatggaatactattatatatttaataaaagaaaattgacatgggattttggagaatcgtttgtcctatattaattattcctcgaaaaacgacaaactaatccctcaccatgatgaaaagggcttaggatgtgggcccaagctcacttgaataatgttcattataaacataatgggccaacctcaattttgttggagtcggactttgggttaggtttgatgcttaaccggtagggtttctagttggtggggattttaaaccatctttttttgtttgagattttgtttatctacaaaatcaatagacaaatatttattttgtggtgctggttgagacacccaataacacataagaaaagtgtggttcatctacattgaatgagtttttcgagttacgtgtcactttcaaactaattagaaagactaaataattatcgagaggctcgagatgaatagcagtatagcattagtgcaaaagagagtaattattttgtatttatcacgttacctatgttagtttatcaatccaattcttacattgtaagaatatgcaagaattgccttaaatataagtgttccatctactctagtagtatcaggacttttgtgaaggtccccaaaaataaattcgtgcgaactaggcccaaatcggacaaaatcatattaatgtaggagttagggtgtgcggtccaacaggtggtatcagagctaaatgttcagaagatggaatagtaaagctgcatttgcattgtgtgggagaagtcctcaatgtaaccttgcgattgaagatttgtatgatgcattgtatcaaaagtatacctaatattatggtgctcaagcggcgtgtcctgttagtaattactctagtacaagatggagatttatgtttagtgtcctgtgtcgaaagtcttcctcacaatattgatggtcagatcacaagttccgttagtgataacggcagtacaagatagtcttgttggaggtaaggtcacgagtacgtcatccttcatttgtgaagaggattgttgagatatcaatccaagtaccacatcgaaagaataggcaattcttccattgaatataagtgttccacctgttctattaatatggggcattttaaaaatgtgcccaaacaattctatgtgggctagacctaaagcggacaatatcttataaatattaaagttagatgagattgtaagccaacaaattagatgaacagactccaacaatctacttaatcatgaaaattgctcaacctacactgcaatacaaagtacaaagtatagtgtaattgattttatttatttatttaagagtgtgttgtaattaaggagaataaattttcatcaatatccataattttttttttctattgtatatatttataattaattgcatatatatttaatattttttttattatataaatgttaatatatatatatatataaaaaaagtaaatacactaactataatctcccttctagaagattaaataaacccaaagttaactacatgattaaattgtaattttatttttattatttgtaaattacatcactttttttattaaaaataaaatctccattttaaaagtgcatagctaaaatgtaccaataatgtttaataatacttagagattgtattttgaaaatagttagtaatattttataataattattaaaataaattatgtgagatttaatacgtaatgacaccaatagcgatgattcttttagcatttattttttaaaaacgatctagacacgtgcctactcttcttacgtttgaaaccaacctgataccattttatattgatttttaaattatagagtattcgaggactattaatggagaacttgagttgatcttaagttgagtgaacctcaatacaaattttgttattttaattgttgtgtatacaataatttttcttaaaaatttcaggattatttttatatattaaaatatcaccacgtgggaatattttagtgatgtaatgagtgatacttaatttgtgaaaaaaaaaatatcacataacataaaaaatattagggtaaatactatttttttatatatataaataacaccaaacatagtattatctaattatattttgtaccttgtattttgcaatggttaccgattggaccctctgttttgttaagtaataattcagactttatattttttaaaatggtacgaaatagaccctgaatttaattttcatcaaattaaaacttaattataacctgatttggaggtataattactagactgattacaatttttgcatttgttcatgctaaatactagttttaggttagttatattaaaaaaataaattgacaaaaattgagttcaaaatctatcttgtactaatttaaaaaatacaatatctaaattatcatataataagatagagagtcgaattaatacttttacaaaaatataaggtctaaaataatatttattcgaaatataacattaaaaatattatattaaaacataagtaacagatggggatatttctttaatagaatgttaaatttagtgtattttttttattttgaaaaatgacaattgttattgctttgtgaacatggataggataaagtgtgaagtagggtccatatttgtgttcaattgaggattgaaagtcatttttgcagaaatttgttggaaattactgaattagtaatgctaaatgaatatgattgttacgcatgtgatgtcagagagaataatacaattatacaatatatttttttttaataattatacaatatattatgattgaatatataatatgagaaattattaattaattataaagtatcacattaatatagtgttcggatttcaaatagtaaaagagtcgagtacctttgtccttaattacctctagtttgggtcgctccatacccatactattggtagctcccggccatttggttaggcccttatatttgttcggtgatccctaagaccgaggacgaaaatacatttggttgagagaaatgagaataagaaaaaatatgtatatatttgaataaaacttaagatgcataataaattgatatatttttttttcatcttgtaattgaatggccattagaatgatattccattgctttaaaatataatcaaacaaaataatagaataaaaattgatttacttccatttcattactcccaaccaaacgcaactttcagcccctattaaactttgtaatcttcttttacacgttattttcaaactaattcacatactttttcaaaatcataaatttggcaccccacctaaattattcttaaattttggcctcctatcccaaacctccctccgtccctactgatagggacgggatcaacaccacgtgatctcctttttcacataatttatttacctttagaatatttttgaaaaaaataagcatattttgggtaaataccattatagactctgtgttttacaaacgttactaattaaaccttttgttttgttaaatgacaaaataaaccctgtattttttaaaattgtacaaataggacctctaaactgattttttgtcaaaataaaacttaataataatccaatgattctgatctagagatgttatgataaaactgattatattacccgcatattttccttgtagagaggtccaaaattgaaccattttgcttagctaggtaaacaacttcatgtaaaatggcattattgattttgatattgttgtttgtatctttaatgtggcaccactaactaagacagttaatgtttatggcccactgggctgggctctaaactaagaagatccacataattgttactaatactttgtcctaataataatgacaacaacaataacaacaaccagtaccacttctcttatactatagtccacatattcatatacatatacatatgctatcttttaacgtttccatcatgaaattttcatagccaaaacaaaaacataaagagaaaattccaaaacaccaattattttctgagagaaaataaaccaatcataattcattcataactgatatttttgtaaaggatttcagatatttcagaaaaattggttacatatgcaatcttataattatgtttgccgacatgagaggtcccttcctgaaaaattaaatacaaaaataataatataattattttgttgggaaattttataataa

SEQ ID NO: 13978 - DNA, 4657 bp, Cannabis sativa
atacaaaaactaaaaggtagaaatgtgtactattatgaagagaaaaccataacaagaagacaaaataaaactttgcaaaataaataaataaagtaagaacaagaaagaggtcaagttaattagagtattgagcagggaagccgtagaacaatgatctaggtgcttttctttccaaagtcaacttaggctaaatactagactcaaacaatggtgttaagaggattttatgaagatagactaaaatttctttctgcaatctaaagttgaaaaagaatgtttttcctgaactaagtgttggaagtgtgtatgtatgcatatacaatatgtgtcaacacgtgtttatatattattagtgagtaacatacaataaatcgattacataacataagaaagaaataaaaagatgcctaccggtaatccaccttcagcatcaatacttgtcaacagattcacattatccatgtcccagaatttcaccacaaactcatctccagcagccaagaacctatttttcgtagtatcaaattgcacaatccccacggatcgctttccaagaccattataattacgcttgacagctccttcgctttcattccattcaaccaagtatgactctccttctttatttgttccacatgaaaacaacctatcaaaaatagatcaattagtctcatgtggctagcaggtaaaaaggtacagttgcacaagttactgttctatacctcattccatcagcactgtatgccatagtggtagctgaatgtcctggcgcatcataatcaactcttgaacccatgttatcatataaccatgcctttattttcccatcagttgctgttgagaagatgaactgggaaaaaggaattattaagccaaaaagctatacatacatatatagtcaacctatgttatatagtcaacatatccactagagatatttaattttgcaagaaataaaattgaaaataaattaatgagcatgaagaaaaaattggattgctaattttctgagttaaaatatataattcctcgtttattaattgagttaaatagatatataaaacagaatgcaaagttaacttcactcctctattaatgcaaaaaattttaaattgatggtctagtaagcaacttatggcaacccaggttgtggtgacaaaaatcgagatagaaacttgagtaaaattcagatggcaaatactgtaatatatgcaaatgaacaaataatagtactccatatatagtacttcagttaacagactgagaagctgaaatttgttttgcttcattttatgaaataaaaatacagaatattttatctaattaatttaaagttaaaaaacaacaaatctatcttttgccttcaatgcactgcttacgagggttatcttttcgtctgtaaattcagtgacacaagcaaatatgataaatgcaaagaaaatcacctgaatattttccttgtgatgtggacacacagaatatacaattgattcgtgaccctcaaaagtatactgcttagccccagtagcagcatcccagacctgcacaagcttgaatgcttaataattgcatcatgcatcaccaatcacatcaaacattaataaaaacaaaccttaatgaccctatcctctccgcaagtaactacacacagctgcttgtttggatatgaaaatgcaagatcatttacactgccagcatgagcctcaatctgaaaaatcaatattgaaacgatgcttaagttgtaaaatataggatgtctataaggcttctaactctctactggttactaaatttaaaaaatatgtgtacttatacacataacaataacataaataaaacaataatagggggacaaataagacaaaataatagcagaaagactaaacaaagattatctgacagcacaaacctccaggtgatttcgtaagtcatcaccaccatgatacgagtatatgtgcacaatgtgcttggagtatgcaacacctgaagcaaagaagatgatttagacaaataacttaaaacccattttctgtctttttacataaattttcatttgggatgaaacattaatcttgtttttattattattattgttaatatttttcttttacaaagaaacaatagttttgtttggttacaaagaaacagtactgatacgctcacagagtataataaatcaacaaaaccactagaattaccaaatagggctccatcaggactccacactacacggtggactgatgccgagtaatcattagccagagaagcctaaagaaaagcgaatttcacattaaaaagaagtacagaaaaataaggctacaagtatctactgggcatttaaagttaaactaaattaaattactattacaacaacctacctgcagaggcattgagcaagatgtaaggtcccagaccttgaaatttctcacagcaatccgttcatgggttgaaagttcatagatcatgacatcaccaatgtttgttccaactaaaattgaatatacatgttaacaaagtaagcaaatagagaaatctgattttcttttttttttttctttttgggcattaaaaaagacttaaaaaacaaaaggttgcattatcaaacaggaatagcttaccaagaagtagaatttgctgcactgggtggaaatccatgctcttcgcacccgaacccagatttagagtcataacaacagaccttggtaagtcatcagaagagtaggaactctgggcgtggctctggttggggtatgaaacaggcaatatatttactggtagattattggcctgtcagacaacatagggctagttgtaaataaagaatctcaaacataaacttacaataagggattgcgtattatagttaaccaacatgaagccaattatagatttatagggaatcatttaaacacaaccacgctagaggcttcaaaacaaatgtcctccacctccacacaattacctaggctacccatcattaaccacattgtttgatatgaaaataatctgtttgatctttgatcaatacaatttaattttacttattagataaaaaaagaaggaataactgaaatctactccaaactagtgagaagaattcttcttcattcattgcaataactaaattcaaagtctcaatctcaaatgtctagaactgcaatttgcaagcatcttataccatagtaactgctaaaaaaatcaattaaaaaacagaaaagcaaagcttcacttatggattgggaattacttcatctggtattccaaatggtctagatctctttagcacatgttcagaatcggcagtttgataatccattgcagagttattggtaggagttctagggcgcttcaagattgctgtataagaatgagcaaacatattcagatcaaaaatgaaaaaaaacaataaacatatagtggaagcacatcatcaaaaatgttacaaatgggagacataataagtgtaaatgatataagcatccattaaaaaatatatattcataatattaataattaaaaaatagacaagacacataaagacgattttaaagggagcaaatcacaagaagaacgtacagtaggtgatggacaccaaaaagttacctgcattgttagtcacagccaatccaataggcccagcagacacagagggatgggcgccaggggatggatttgccatccaccctgcaattgaagttgagagagcaggtggagtgggctgaaatggctatatagttcatgtatggacaagttaaacatctatatatttatatacattcataatgtactataaatttttttcaacttcacttacaccatgagcactgagtggtggaaaacctccagccttttgaacaggaccccccattaagggattagtgacgggggatggagccctggcaccatttggctgtccacagctgtggtctgtaaataaggtctttatgtctgggttaggcctgggatttttacaaagctgatgctgccagtttaaactgcaattttcaacatttaaaaagaaaaaaatataagccagtattataaagcagaagaaacaaaaaatagtctcaacacataaagataaaactaatcaagacctttgattaatcagtgtacgtaatctcgagttcttcaaggtgggaaattgaagcttctcccgaaatagtgggttagcttcaatcaactttttgagctcagcaagcattatacccctagcagacttagtatcaccatatttagatagctgttcattatccctgaggtcgttggattttagggttagatttaaaataaaaatatagaccagaacagaaaacccatcaacataagacattgcaaaaacaagacaattaagagttaaaacattgtaaatacaaggcacctacgtcaccattacacgaaacaagtgatcatacctaaaattttccagagttaacagctgcgtgatttccttaaaaagctcttcgttgaatgctgaaaacactttcaaatccttgactaatatttcaacagccttagctcgatcccgcctacaattgttttacacatcagcaaaaagagctactatgtgtaaccaacaatacaatcaagcaaatgaataaaatccaacattcctgattcaataaaaccttaaaacacatacttgtctaaagcttcc

SEQ ID NO: 13979 - DNA, 33991 bp, Cannabis sativa
tggggagaaaaatctgacttgctcgttcctaggttcttttctcttattgcatcaactaggactgctaaaagactcccaacatttactgaaagctcttaaggttagtagcttcttctattgatgtgattccaataggataggaatactggcagctaggagaggataagaaagaagcataaacggacgttagaaaatgtcccgatgaacttttattcgcgcactttatgtcgctaacccgtggcggacagagctaacaggtgacgggaaaggtacctccccatttctaacctcgggagaggaggacgttgatcgagcttttccatgcctagtcccagtttcgaaagacccagagcgggctacggatctataccaagcccgttacgccataattcattgaggttgatcccgaagttccggtctatcccgtagcagtagtctctatttattcaccccaagaatgaactatcctttgtttcacgggatggatttaattaacacgggtagacccgaaaaggtcttcgcaagcataccgctttctgttcaagaatcggtagcggttttaaggaagactaccgagctccacgatagataagcgcctatcatctctatgcgaattctgaccttagcttttcgtctttgattagtattagcgaaagctcgctcgacttaataatagctgtcttactcgacttgcttactagctgcctttctgactaatataatttttttacttgtgaatttagagttctaaactgagtacactaggagaacagtagtttccttttgtttcctttttatgaacacggaatgatcagcattccttctctggaaacccatctatcttcgtcataaccaaacttcatatctcgaaccaagcccgaggagcgaagccactcgaacgaatgtgagaggagcgaaaggagaccatatatcgccttttttttttcacctgcccttcctccccctgagctcgaaaacctggtggaggtctccatgaagaaaggcctttttgacatcgagctgatgcagtgaccaagatctgttagctgcaactgacagaatgactcgtatggaattgagtttagtttggccacaggagcaaacgtctcgagataatcgatgccataggtttgtgtgaaacctttcgccacaatacgagccctctcgatagagccatcagctttgtgtttcagagtatatacccacctgcagccaaccgtccgtttgcctcttggtaacgtgatcagttcccaagtgtcgttcttctttagagcttccatttcttctatcatagctttcttccactgaagatgattgagggcttctttcaaattggaggttatcttatcgctgaaacgaaagctttaaaggaaggaagcttgataggacacaaagtgattaatagggtgagaagtccaaaatatcttttctttcctcaaggcaatacagatcagaaacaacagaaggaggaagatagatagtattgaaagacagatcgatcagatatctcttttaacgaattgcctgattgcgacagcttatcgagacttgttactagactaagcaaattccctagaagagagcttaaagagggctgaagtttaaggaaaagagaccatagaaaagaagtccggaactccagaacgaaggggatagattgaatactgaaatcgtgtttcactactgaaagacggaaattagtctatcgaatagaactatttatgagggtgtgcctatagtaaataattcatgaataaaacattcacacgttggtagggtttatagcaagacctgggaggagcatctgaaacacgtagagactgttctagaagctctgcgtgagcaccagcgcccatacggagttgtggaatttcaaccagatttggaggatgactgtgagccttcgaatcagatctattcggctttcgcaggtaggcagctttccagcccatctttatatgttcattttgattcaactcatgctaatttcgaatatcggaagattatccaccggataataaagctcaaatttgaactctcaacagcccccagacgaatgcaagcagaaaatgatcaaacatcgcaaggtagtttacttgcttacttgttagaggaaggtcttgaagagcctgacatcacggaaaagacaaagcagggaatagcttcaacggcgaaattcaaaagggagaatcaaaggttaagaagtagaggccttccatctctccccctcgcccggctcattctcaatcacgatagtggcctcttggaactttagggctttgaatgggcgagcttcgtaaagggctgtctcggacttcattaaatccaagaaaaagtatatatgattttgctccaggaaactcaagtcaaagaggacgtaatccatctgtaaaaaataaaaagaaaaattagaaaaagatgctggcagctgctatgttccttcgaaaagtagagatggtggctcttggattaataaaaaaaaaatatatatatatatatggctgtcccaactcacattggaacctagaccatcactatagaatacgctccctagaccacaacttggaatggatggctcataagtctatgctccagcatcagtttctcacaagcaagactattgagcttagattcatccataccgtttccaacctaccttggtgcattagtggaaagtaaaatgaatgccttatgcaatcaaatatgaaaggggttcttactggccgaaaataagagaatcggtattgaagatttcgcggatcacgttgctgattgtgattgggttgacctcccactctatggcgcttctttcacttggtctaacatgaggaaagggaaggaaatggaaatccgatgcagactggatcttttcctaatctactcagatggggaagaccttctgcaggacactattaaaaaagcagggaccacattcgcttccgatcatgacctcattcttcttttctttttcgaacaacttccctccacggtacccttctctttcgaactgatgtggttatccctatcgaaatctagaactaaaagttgtgaagcaaaaaaatgcaacattctattgacttgatataatatatttctctattagtaatacatcctcaaaagaggaaaagctccctaaccttaataataaaagaagggctaaagtaatacccttaagataaattcgatttctattgttattttttttttattatactgaagaatcaaacaagaacttctacatgttacccttcaaactggagaatgaatatcgatcattccctgtttgcgagtgagaagaaaaaggagggcctttaccaatcctttcgcgaagagatcggcaattgatcttcacttctaatggttggtgttctgatgatttcggcaatcaccttttccccgagaaaatgccctacctaagtaaggcgacttctacatgctttgttctctcatagaagaccgacttggaggctatgtggatagcattctgattctcacagaacatgtgtcatggggttctgtgaccgaaatcccaatttcagtcagaagagatcccacccatacaagttcactagttgttgatgccattgcattcggcttcaacataggatctagaccttattaagtattgcaaaagaaagggcctgcttttccagggaataaattatcctatatggttggtggattttctatcagagagaaagcctgcattaataccttccttcagctttcagaggtaggggctgcatctgaataggtcctaagttgcccggagcaaggatccttttgccaataaaagaatgccttttctagggctttatatacctgaggatcttttttagttcatcataatgtcacttctgcagagatagcataacatacattgacaaccaatcccagcggaagacatgttagtaggacgaaggataggttgatagatgaaacttccaacttatcttctgcccctctgttatcgaaaggaggatcatcaaggagatctcaattctctaaagagaacttgtgattttgcccccttttctagttgtaaggtcttgtccaccttagggttacaatgaaaattctcaaaattgcttataaagatggctatctttcttcaagtgagaaatcggatcgagaaagcatcgcccaaaggtgctcattgagccggtcaccgttggctaagaaccatttctcacttgtgatgtgaagccttcaaaaattccaatattttttttgtgttcagtgaggatatcgagattgggttagttttgagtcttagtatgagatgcccaagataaaaggaacgaggagaagaatcgacaaggattccatggacgaggaatccataacatataatcgtgaatcaaaaagaaagcgtgacgagaatttggttttttaagaaatgttagaaggtgcaaaattaatgggtgccggagctgctacaattgcttcagcgggagctgctatcggtattggaaacgtcttcagttctttaattcattccgtggcgcgaaatccatcattggctaaacaatcatttggttatgccattttgggctttgctctaaccgaagctattgcatcgtttgccccaatgatggcctttctgatctcatccgtattccgatcgaaggttgaagtgcagtttcataaagcctccttagtcagtctaagccgcgctgaagctttcacgaggaggattaaaaagacaagtgttaacccttggcgtgggtggacaaattccatcgtcgtaaggcgtaagggggaggccttggtcaatcaatggcagtgagttgattttccaagggagggggagtgggaagtgggccccctcacatcaggttttttcattgtagccggaggtctacaagccaacggagccagggcgtttccgccccccggatgtactcacgggcagcgtgaggaaccgggttaacaacgcgattagaagaaatgggagttcgccgggcctctcggaagtgttggttcaaatctagctcgcgaatcgaacactttggcagtaatggttgacgttgcttgctttgtgcgtacgattcttttattcaataaggattttcgtagcttcaggtgaggcgatcaacatttcttgaaattgggaaaaagtctcctacaagtgtggtctttctcggtcaactggaaattgtagaactgtagcagctctcgaaatcggtcggtaggtccttcctctatttcaagagttctagtacttgcattgcggtccgtccattagttcgatgattcttcttcgcctttaagtgttggcttgttcaatcaatctcataggttcctatggctcgtcctataggaaaggggatataccataaccatagggaagtcaaggaactataaataagctttttctgagcgtatatagtggtatagtccaacatgcgcaggagcaagaaaacggatgcgccttactaagcaagaaaggtatgaaatctttgttcgctaggctttcgcacctttacgtagtcttaatccacagcggacgttcaacaccttagcctctatagttcggctaagctatttcataaccttagtgtagtctcaatccatagttgatcgtaccttagcgtaaatgttgggcttcgttccgtagtttcatttattcaaaagaccctaattcattcaaatgcatctatatcagcatccacttcaaccgatttgggatgggttctcccgagtgcgaaactttttttatgaaatcactaatataggagaatgaacaagaacgatttagaatggtgtctaccttgattgaattttatacgagcatcaaatcaaacctgtcggctatttaatctctttctgatcctcgctataggaaatgaacccgcgagcggcccttctctaatcaagttgcgagcccccttagaagtagctttcttttctccttggaagtagcttccccagtcctatgacggtaagtaacagggagatagcatccttccttattcttcggattagtgggaggctggctttctggtgggaaatctttctcgactcacttgaatactgagttccatcccagaaagctctttgaaatcctttctagtctggaaagggaccgcgaatctagccaccactttctctatttaaagaaaaagaaagaggtccttgattgaggaagataactaaataccttcaaccgcgttcccttactatcaagggattaagccactatcaaggcaggaaagagacattagcatactagctatcacaaactagatgcttacagtcctttttcctctcccagtgcagtaagtaataaatacatctagaaagaagatattctctagcctagaggaaagagaacaactaggatgaaaggtattactaatcttgatatagtgacacaggatgatagaatgtcactaggataagcgtccggttagaaccatgggaagattagaatgacctcactaggaacctcattaaagatagatagctaccttagagagcttacacagtcaattgatctatcctaggttgaggaatccgggaagaaggctttcaagaagagattcgctcctaaggaggaaataagggactcatatcgaaagggagaactaacctatatctgagagcttgaactggcctttggacggaagataaatggcattagagccccgatcgatctaaaagattagaacaaccacaggaatgaggaaactcgtagagggatgttgattcgagcaggcagcaatacagcatcggcagctttctgacactcatactgccaatcagctattaccttctggctttctcttctagaaacggggcttgaaagagctaattcgttcttagctgtcctagcttcttagaaacaaactaaagggaactaccggacgatgttagataaaaagaagatcgacttattcaactacagccttccttgcttttgctctttcttacagcaactatacgacatgttattagatttaactattgatcaacattggattgggggatagagtttgcaaggctcatggcaggttcgatccctgtctatcccattgaagtgaaagtagtcaagttgactctaatcgcgtacgccgagcttcgatggattgttgtgttaagtcgctcttgtgagagatagggataacagagacaaggaaccaccgccccttcgggtagggcataggtggctacgtcggaaaaaccctggatctacaagactgacttcacgctctctagaagctcactgcagaggaaggtaaagttcttattcctagaacataaaatcaaagaaaataaagatattgttcaccgggaaataaatggacttccagagcggaagggaatacttaaccacgcctcgagtcccagtctcctagtggtgggatggtaaagggcaatgtccggttctggccaagagatgtctttgctccgtcccccttcttgttggttggcacaagcccttgtagtagtcagtctttcctccggccggatgttagagtaaattccattgttggtttgaccattaagtgaatgcaaatataggtagaatttgaatcaacgacctaagagtcttcttttgcctatcgtagttaccttgatgtgagaaatggtcctcctttgtttcaagatctgatatcgagaaactcctgctcatggtgaactgctcatatacatactaatatgatcgctaccaggtcatcccactacacaccatcaagcaactactactggaagctatcaactcgattctctctattgaacttttacctctgtttgctgggttcccgtgtagtccttctcatatagggggctcaatcagagctggtagaagccctcgcggcagggaagtagaactcacctttcataaagtaacgaaatctggtaggagtggatacaagactatgactatgttatgtctaaaaaaggaggaatgcagcaagaaagaatgcggtactaggaccggacatagtatctaaatgacaaaaggcgatatttgatccttcacttatggtcatccatcgggtctatctgtcgtctaactgtcctgtataggtccctaatcaatccctggtgcttttcttttggttgaacgtcctcgttcctaatctgccttcacctaatgcccgagcctctacctctcaaaagaaagaaggagtacgatatgtaaggcataaggagatggatgattcacctcaagagctatagggaaatgttgattgtgggctaagccgaaagcaagacgcagaagcgctccaggaacgtaggcccgggagaatacttcctttctccataggaatgggtgcactctgaattggtaggtgtcgtttttaaataatggctttgtgatccgcgagtataggttgaacttatgtcagggatattgggacaaaggggcactcagaaagtgttaaacactatatttcatttattaacgatcacctctcgggtgcggtagagtggacgattagcgaggactggttcagagctagagtcggctagcattcttttaatttaacttaataataggcacaagcttccgtcttgttggttcgaccaaaggcatcgggtaaatgggatccaggtaaatggcttactgttcggtcaacatttcatgattcgtaacagccggccgggactgaactaatttacgagagaaggttcaatggacctagggtagtgcttcgtatggtatgtatgagatgggggatcttcaacaaggtattcgccctatgacctttctttattctttattgcccccacctgacactatcgatacgggtcggcccttacttgcgcttgcgtagagctcgtaccaggccattgcacccgcgtacacccggtagggctataaaagacagatccgaaagggattgggattgctgtgggaaagaagcgaaatcgaactcctccttggctaaatccggaggggtccgatataatagaaaccggcgcacaatcgtccgttttttgactttttctttcatatcaggtatttgaaataggtttattccgcgccatccatctctttcccatcttactcaatcaacaggatccaattccctactatctcccccccgcaggcaggcgaggtccttgaccagaaagattgatagggaatgattggttggaaggggataagcatccgacctagagatgctttctagcttctggattcctgatttgtcacttccccggtcattcattctgcttgtccttccatcgagaaaagaagttgaaatccctgcgactgatggccgctccagcatccgatccaactcattcaactgcaggcagccattgcttcgttcccttagcgggaatccgattcgaaccattctcttgatggttcgagtgaatgccttatcggaaggacgattggcttcgagtgaaggccacccattgaagcagagatgtaaacccttgcggaagaattggagtgaaaggcaaaagagttgaccggtgcccccctggttccctacttgccggttatccattctcgctttcctttctttaactactggtctcgtgttccgtacctctcccttggcctgggaatgatagaagaaggtatggaaagaggaagatgttgagtaaagcgtgattgaatgatttaatttacggaagacacttttccccagaaaagccagatggatccatagttggagagagagaggtccctttcccggatccacggaacgaatggaacttctcgagatcttgacctctcgctccccttttccagatatccacattggaggggcggcttagcagcggcaatacgaagcactcgtccttccatgagcaattctataggacagacccagccattcagtattgatgtcgggaccgggatcagaaaggaggtccctaccggcggtaggagaaaccataaatccaggctcttcaagacctcccttctcgcttcattccttccgaagccaagctaagccactgagccatctattcaaatcattatttctccggtccggatcggaaggagccggccccgggccaagaaaaacctccctctccttccccttctttcgttcccttcagtcgagtgttgatgatcgggactaaagactttatggatgtcgggacagacaggggctagcagctaaaaggcttgtagtttgggggctggggaaaagccaaacagaaagaaaaggtacggaggaacagaaggtttaaaccttcccatagtaggctaaaccggaaagagagagtagtcgcgtcaccttcaagctctaagtcaagaagtcaagcagcaaagaccgctactaataagatagaaaagagctacctttttctcaccctcggtgaactttcctttaaagacagacagaagcgcatccaaccccgttcttttggcagcaagtcagattcccttctacgaggatatcctggaacgtgccacttacttttagggaagtcggtcttttttgcttacagggtcaaggaagagatgggccttgaacagggaactccaaaaaaaatcgatgattcttggctgggccactaaataaagagttttggttttctcctttttgggctaattcttgtgaaagcagcaaatccttctctaagtatggaagcagttagttaaggcctaccatccgatagttctttcgttacgccgacaagctaatagctcttccttgttttagttaccgctctgtgggaatctcatttattgatgagaccccttattctatgacaccagaatgaagttcatcccttggcttgtgtacgagcatttcattttttttgcccacggctgaactcgcttaatccgcatatctggaactctttgatttgaactactccgaatccggcgatgaactcacatttcgccctgggggactcttgcttctgtcttcctctttctggcatctggtggaaatgttatctcgatcgatcagtttcttctactctatgcctactaaaagcttaaccatgccctaccaccaagaacagattctcgccatcggaagaacttcttcttcaacaaaagaaatcgcagctcctagtccgacagttcgctccggatattgttggaaagagttccggcatactactctattatgataccgaacccttggggaacttcactactttgagagtagagttaggccttttattctgctgtgcctgggcatgagtagactgctttccttatctgtattctgtacattttcttgtctaagatagaaggtcttccctcatcacctgtcccatttgaaagttcttccaatagtcaatgagcaggaagaggtttaggaagttgagtcaagcaagaaaggcaagtccattgacttggctacgatagggctatgattcccatcgagaaagaagagtttacagctaccagcaccgattcgaactaataagaactacctcaccactacctattagtagtccttcctccaattgattcaatagaagggcttcttcctccaacaacggggctaatgccgactctgatctttcctttgcttctcttgagccgaatgtgggattgatcctttctatgggtgtgactaattcggccatttaacaaagaaagacggactctcctgcttgaactgatagctatttcgaatcaagcttgagaaaagataggcttttgccttgttcactcaaagttctttctgaaacagaatctaattccccgtactaacctaacccaccaagaccggagaagcaactggatcgattcctaacaaaagaaaggggaagcaaaaggcaaagcagaaccggggagaccttcagttccttcgctcccaactcttagaatagaaagaaagtcaaccaatgccttagccctgccttaaagcaacaagagagaagcccggtaaagcctaatccaagaatactgaatcctggacgggagaggcagctaacaagaggctagcagcccaactcaatagcagtggagtcgcgaaaagaccccatttcaagcgctgattcaatagcagtcttccaattagactgaataaatcttagtgtggttaagccggggccagggtcagaagttgttccatctccggggatcaggcggagcctctacgctttcttcctttgctacagctaccgggtattcattaaaaaagaatgcatttacctttctcccctgggaggagaacttgaatctagctaggcttgcagacctcgtaaggggtataactgtcagaggaaagcgcaacgaagaccctctttaagagagaaagctccccgccgctgaaagagaccgaagaaggttcaactagcgcttagagttcgggaagatagccgaaattagagcgaacgaaaaaaatctgaccaggcaaatcctttaggtccggtttcggtccatctatagaagatgcctttgcagcctccactggaaatcgggaattagctcaagcgaaggtctctcgagccttctctctaactcccttcttgagacaggattggcggtatgaagaaagagttggacgtagattattagcatcccgcccctagaacttaagaaagagcctttctttttgaggaataagaaaattattaccttaagaacagggctttcaaaagatctcaaatagggaagtagtccttgaataaatgaaccctatatccctctacttctccggaagcagctaattttcttcgtcttttaagggagttcagttcccagaggtcgaggatcaagaggtgagggaatccctgactgttgaacgaaagcttgaaggtgaaggaaagtcaggcaggttcggatttaggcagaattaaagtcaaaacaacaattatgactcgtcctcaagagtggacgtagttcagcttattagatagaaggagaagggagtacgcttagttaacgaagaaatcattttgcaataacagggaatagcaagaaaatgggttaagaaaagcaaagcacgggttcagaacaaaagaacagaggaagctctgatcggagaagactgatcactttcaataagacattgagcccataatctaatcccttgactaaggcattcgtgaaaactagaagaaattcacatatataagaaaatctctacggaagacatggaatagcccagcaagtagaaagcactaatgggtgactgaaagcgcttaggaaggacagattcactcttttcctgctaatccaatcttgattcaagtacaagcaatgatatgaatcacctgtgcgactaattcttgttttcactttcatttcgaattcaagaatgaattaaaaaaccctaagtaggaattgaacctacgaccagtcagttaagtactgacagctctaccgctgagctagttgggtggcttaaggcattgagttgctaaaatcgacatacaatcttcttctatcatgggttaacctccatagaagctacataaccatcgaggttatggtatcgaacgaaccaaacaaagaaaaaataagtccgaaactcccttccggaaaaggttcagtagatctaccaggttaccggaaatgaccaaaaagtctttaactgctaaccgagagtccttgcccatgcggggaatcttttaactgaactataagacatgaatttaaaggaaagaagagttatgatccgctcaatcttgtacctagtaagaaagtacaatccttggggacaatggtaagaacaatcataatcactatggcactcgcagaatccatctcaggtacaggcttaattgtaatttaagaatagacaaaagataatggaaggaaaatctttagggagattttacaactaaaaatgaggttgagttgctgagaataatggaggaagggtaagaaggaaaaaaagaagccgacctctctttcaagaatctaaaagaacctttgctttggcctttggcggatcccgacgtctggtttggttcccgatcatgcgtgtatttgcccatcacttgacttacgaactggtcgttcgcatatgtcactgatagctaagcggctagctctcgaatcgatagaccgccttctttctcagtcgatggggtgacattcctctcatttccgaatccaaaatgattcctggatttggctatctatcatcatcaagaggtttttattactttatttgtcatgtcacgacagttgctttccggtttgcatctctgcagcacaagcatctggtacaaagcattgcattcaacaatcactgttgtggcgtgaaagagttcgtcactggatcaacggatacattcaattcaccacggcggcattaatgagaaaagaagaagtaccacgatcatgaaggaatagctcgacccacccagatgtatactcaagttgattccgacttcgacgattgccgaatcaaaatgaaataaatacactagaatcttagctacgaaagcagatgcattgaataatcccataataaaaaaaggctagtccccgaaaatcccgttcctttgtcgttggggcttacaattcaccttgtgactcattccttcggtcgagcgttcttcggacgtcgatcaatctatcacaggccgctctgtcattgtctgatttctggttgtctgatcacagtcgaaattatgtatctacttatagtttttttgccccttctcggtagttccgtagcaggttttttcggacgttttctaggatcagaaggaaccgctataatgaccactacgtgcgtttcattctcttcgatcttatctctgattgctttttatgaagtcgcaccgggagctagtgcttgctatctaagaattgctccatggatctcatcggaaatgtttgatgcttcttggggcttctttggcgaccgtgaagtcaccgaatgaattgccgagtagatagatcagatccggacgcggctgttgctccgcggcgatacggactcgacccgctcctacccaccccggggcactatagcatgtcgggaataaggggggacatactggacgtaaccactcccttggttgggggctgtgccgccctgcctttcgatcgatacagagttgagtaggccgatcacgaacgctacgggtgtgggagcgatcctggtcagggaaggctaagacggcgcctcgcatatgggtagcaagagggcgcttatgccccgacggtggggccttatggggaagggcccagcccaatagggacagcacaccccccacttcaagcgcatctctgtatcgactgaatcactctaagagtctagtcggtggaaccggtgaaccacgcgagctggttagatgcgtggggcagagggctcgtagtacccccttttcttgatccagccttttcttcgcttcggtagtgaatcacctactaaaaaaagaggcaggcgcttttagccctatttgagactactaaggcaggcggcggactctttcatgttggaagggaagaaggggcctaagcacggcagatgccgtacacttgagtggcaaaggaaagcgagatcgtacctgtttttccaggcctgttcggacatacggttcccgcggaagatcaagttggtgagccgtgtgatgggaaaccttcccgcacggttcggagagcactgaattagaatgagaggttcaccaccacatcattgcatgcaaggggagctcgctcgattcgcaaattggtccgactcgtaattcacttctgactccgtgttcgatagcccgaccgtagtgatgttaattgtggttacatccataagtagcttggtccatctttattccatttcatatatgtccgaggatccgcatagccctcgatttatgtgttatttatccatttttactttttttatgccaatgttggtgactggagataactctcttcaattattcctgggatgggagggagtaggtcttgcttcatatttgttaattcatttctggtttacacgacttcaggcagataaagcagctacaaaagctatgcctgtcaatcgagtaggggattttggattagctcctgggatttcgggccgttttactctctttcaaacagtagacttttcaaccatttttgctcgtgctagtgcccccagaaattcttggatttcttgcaatatgagattgaatgccataactcttatttgtattttactttttattggtgctgttgggaaatctgcacagataggatcgcatacttggtcacccgatgctatggagggtcccactccagtatccgcttcgattcatgcagctactatggtaacagctggcgttttcatgatagcaaggtgctcccctttatttgaatacccacctacggctttgattgttattacttctgcaggagctacgacgtcattccttgcggcaaccactggaatattacagaacgatctaaagagggtcatagcttattcaacttgcagtcaattaggctatatgatctttgcttgcggcatctctaactattcggttagcgtctttcacttaatgaatcacgcgtttttcaaagcattactattcctgagtgcaggttcggtgattcatgccatgtcggatgagcaagatatgcggaagatgggggggcttgcctcctcgttcccttttacctatgccatgatgctcatgggcagcttatctctaattggatttccttttctaactggattttattccaaagatgtgatcttagagctcgcttacactaagtataccatcagtgggaactttgctttctggttgggaagtgtctctgtccttttcacttcttattactcttttcgttcactttttctaacatttctagtaccaactaattcattcgggcgagacatcttacgatgtcatgatgcgcccattcctatggccattccttcaatacttctggctctcgggagtctctttgtaggatacttggccaaagtgtgacccgttagcccataagtaagtactgtgacgaagcggctgttgctcacccgacacgatcgtacgaggtcacaattcacccaacacgatcatccggggtgaacaagaattggggatcggatgcgggcgaaattcccgccaatggctgagatgttcagtcgactccctccccctttgtgggggtccggacccctacgagtgagcagaaaagggaggaggaaagaggccctggcgaaccgtcataattagtgaacaagtgtaagctttgctgcccgacagtatggagtactgaccacaccgagggacaggccctgaagcgaaggacgggaacgagcggaatgaatgtgttccaatttctggccttgcaccgaccatctaatggaccatggactaaacggccactgcctgaaaggactatgtccaggggaccgccgccccccccacaaggtacatctcgcgcctatgggccgctataactatccaagaagacactcgaaactggagggataaacaaacccacccggtggactgccgagctacaagtcccacgacacaggagcgggattctctaaaaagccaaggtcgcgggtggccaagagggcccacttggagacttgggatctccgcaggaaatgcgaaggttgcttaaagccggccgataggcgaaagagaatcaactagttctgatctgagtaggcaactaatagggaatactctaaccctgggaaccggggcctggccatccttcgtttgcggtcgacgtttcggcaaagtttgtccgtcgacagctgaatgtttcgatctggttcgattcatggtcgcatctgcaaacgttttcccgtgggccgacgccccccccagtcctggcattgatctatatcacttcagaagaaacgatataaaagtacttaccttctccttggtgagtcgaagtggggttccgtcctcccttgccttgcgacctaggtattccttttctggtttcccagactttttgtaaaaaggccccagtcttccgtttttcagcttttaaaaaactcctgctcgagctactcggctaactctggttctttcgaagaagaccttgatttgaaaagagaaatcaacaccttgcttgatctattgaatgatcaaacaatttttctttgaatactcaaggggatttggaggaccagcgaggcgaggggaaagagcgatcgcaaatctcacgaatcaattcaagagtaaacgtatgcggtggctcctaaacgaactttctcctacatctgatcgcaaccaggtctggtcattttattaataggttggggcggaggggtaccttttcttttctctgtcccgctatacagggcttgattacagtttactctttttcttgcatttatgttgatttgcctatttcactttctggtgctgtgacttctgtaagccctccttcagatgaagcggctaaagcgtgagtctctactgctccgaaaactaaggattcagagaggtagacaggaaatggggtctcacagagtcctctagttccggcccaacttcctacttagttcctacggagacgatcttttttcctttccttgtggacatgactactatttagctgtgcttgattagtcctcgcatgactcttcttcacactgatttcaatccgattcgtcgactctattggccggatatcaataccttatactgatcatggaagctagtgtggccaatgcgtcagcaaactgattcttcgtcctcgacagagaatttaaggtaatccgtctgaactttaggctgatatcttccagatactgatggtagggaatgagcttctgatctttggttttccaatcaccagttgtctgaaagatgagttgtgacgaatctccgtatacatcaatctccttgattctcaagtcgagggcgcgcgcttctttgaagcgcctgtgatacaatacacgcagaatattctgcgatattgtttgtgcaaaagaacctcaacttgactttagaaagccttttttttggcgagctttaagatagcatgtagaaaggggctgctccaactccatttccgttttgatttactgcaccgtcaaagaacatttgccaatcatgaggagtttcgtcttcttcttcgcctaccgcaaatagaatagcttcgtccgtccccttactaataaaataaagctcatagtcaggcacgggatgggatgattgagtagatatttctgctattgcctgccccttgccttactcatttagggcttctgggtgacgtacacaatatcgaactctgagagtaacatctgccaccttgctgtacgtgagggctggcttttcaaagagatacttcagcgggtccatccttgcaatcagcatggtcgtatagttcaacatttagtggcgtaggcgttgcgaggcccatgtaagagcacaacaggtcttttctagaaccgtataccttgtctcataatcagtgaacttcttgctgagatagtatatggctctttccttcctacccgtttcatcgtgctgaccaaggacacaactcatggatgcttccattactgacagatacatcaggagaggtcgaccaggcgttggcggtaccaggatgggaggattgagtagatatttcttcactttgtcaaacgccttttggcaatcctcgttccttgtgtctatcttttctgaaaggcggggtattctttctgagcagtttaaagatcggctcacagatgggtgtgagctgggcaatgaacctgctgatgtattgtagcctgcctaaaaaagccctgatttctttctctgtctttggtaccggcatgccgataattgctttggcttttgcaggtcgacttcgatttctcttcggctgacaatgaacccgagtagcttacctgacgaagcacccaacctcctcccggctttatatgcttttgcggatgaagacgaagactgtatttccgcaatctgttaaacactttcttcaaattcaatatcttatcggcttccccaattatctctcctccttgtctatttgacttcccagctggattgaaaactggttgtaaaatgcctcaacatcaaaagctgcaaaggacactccactccaactgcttagggtaattcattccatgaggattaggaaaggcaagaaggggtttagcaagatagcattcatttcaagagatagagtttcagatgtggaactctttgccagaggatcttttctttgagatgctaagaatcgaggggtggcccgccttaacccgaatctcttcattcgtctttactaggatgtttctatctttattcgtgcagacttgcacttttgagcatagttttattctattatatttgatattttctggcagattaagattcaccaagccaagagtgactgagtagccaaacaaacttaaagatacgagaaaaaaggcgggtaaaacgatgataaagaaaataataaagaaagcatggatgtacagaaagagtccgaacccgacgaagtgacttctcgggctgcctacgtacctcccccgccaaggagcaagaaaccttccagtcgaataagttatgaggtatgaattcgcatccttttccctctttcttattcactgcgcctctatatccatcaatcttttgtctttgtggtttaaagtagcacttctaaacttttttagaagtgctactcgactgtcccttgcaaataactaagttctctttcctttatttccaatgtagctctttgatcattctcttttttcctataaagaattcgaattcccctatataggattatctttgtctaaccttcgtggttatttttaaacttgctgtcttctcgcataattcacttgatactttattgtttaggcaatagatgtagatttcgcaattttagttttcgcatatgtgtggcgcactgaacacatagtttccggaagttgtgtagaatgcgcgggggcgccttagtctggttaaaacttgaaatcggtttttgggttgaattattcagccaaataaagggctaagcccccgtttcttccaaaagacctgagtcaaggtaattacttaaagcgcatgaatagtttcaaagagaaaaaggctaggccatggctttatcatattaggacgggatcctgggataattaaatagaaagagtacccgaatcctccttcactcgtatacttcctgaatggagttgacttgtagagctaagctggtaagagacctaatcttgctgttgcattcgctttcttcacgagttagattcaaaaatgaagactaacaactattaagaacctgtacgatgattggctagaccccctatttaaatataggctctgtaagcttcttcttcctattcgaaaagttcacttacttaaatagctttatgactgaacagaaagactgaagatttgtgactttctttactgagacgagtggtcttcaaactctatcttaactcattctatatattccttatgggcgtactacttcccttcaacactcctttccactactagacttgcttaactagagaaagcgaaagatgaaaatagcaaaggaaagtatcagcccttgaatacgaaagtacgctagttgagataaagtgttaaattaaataagtcaaatccttccttactcctagggtgatttttcaagacctggctcgaatgaaggaatggaatagtgaaagtagcctgtctctgttttattttcggattccgaggatgagccggccgatcctaacatcatttatgaggagccggacgacgtttttattcctcagataaagatgtctccgacgctactctcccggcaagaaccactttttccattgttaattttttggcgggttcggtcaggagggacaaaagagagatgctttctatcagtcaaaagcggataccgcccccccatgctcccacggtccgctccccgaggaatagaaaggggggacctggggccagagcaagttgggttggggtatagagccgtaagcgcggtggggggtgacagaggacgtgctcgtacggttcaaagaagggtatgatcaactcgttgattgttgggaactttcactcctctatattcgaaatatgcctttctaggagcattacgatctgcagctcaaatggtcccttatgaagtctctattggtcttattcttattgtgcgccttgtgagcgcgtttggatccgcgaaggcaatcgctcggatgttcccctaacccaacccgggaacggaccggagggaaccgcagcatggggagtgtccgcgtctcgtcgcaaggctcatttttagttgtgggtcatagggcgggcagctttatctgatcaagggccggggcacaagggtcctggtactatccaggtgcgaagaaccccggaggtgactgcaatgagcagaaatctcactcaccggcctaaacgacgagcaaacactcgaacgtgagagcaagggatcacccaacgaatggacgagctccaaggagggagggaggcaagaaccatgctttcagagaagtggcggtccgaatcttatctgaactgcgagaataactgactaagccgtgccataagggtcattctccaaacgggacggggccaagcctttaggttttttaagtaggttgggtgacagatcggccataggagtactccgggatatacaccagggcaacaaatgtcgagcatacgacgatgccgcccgttttcttttcgtggaagtccccggcagaggaaagggctgtaggtgatggcgcgttccgcttcttatctagagagaggcgctgaaatcgttcctattgggtcgtgcgtggcagctggtatagatgaataaaggcgggccgcttgaacgggacctattctcttacaacataggcggcaaagctgaataggaaaggggccgagctgactgatgagtgcctttttagcctttagaaaaaggctatcatgtggagctaacatggctggctacatacaagtatagccaaatcaagatgagacgggacggagggtcagaggccgcagcgggactaccataggaaagcccgcccccgctagctaacatagaaagaattctattcccggaaagcaatagtctccatgtgaatctcttcccgacccggccaggccgaatcgggccaccccttgggatgggaatggcccagcccacatgcatcatttgatgaaagcactccagtcgcctcctcgaagtggcttgtcaaccacgctttccctccctcaaaacaatgctcctcaccaaaagcccttccttgggttggggcaacacagcaatgagtagttcgctccaggaccccaccccctcgagagcaggatgccggccgagatggagctgggagccaacctatactttcctggggcttgccttgccccaacatctaaataaaaggcgggcgccgaaaaggaaccagcccagcctcttcaagaaagctttgcttggtaggcgctgcctattcactcggacaatgctctgaacacgaaagtgtgcagttccgcccccttctcccatgctgagtcacaggcagcgcctcggaaagcacggacgagccacatgcagggaaacttgcacgtgtggttctggccggggaccccggtatactgtactaatatgtgtaggtccccgtaattcgagtgagattgtcatggcgcaaaagcagatatggtccggtattcccttgttccctgtattggttatgttcttcatttctcgtctagcagaaactaatcgagctccgtttgatctcccagaagcggaagctgaatcagtagcaggctataatgtagaatatgcgcgggatgcgatccttaatagtccactgttggcggaagccaatgtcccggggtcccggggactcattctgactgaaacaaggggtgggtctttaccaactttaaaatattcgattttagggaagccaaaaaacgtgagcgcccctacgcgagccttattgaaaaggccccttactatagaacaaagcaagggattgagctgcgtgttagcgcatccgctcgttagcgctttctatttttcaataaggacgtttaggctttactaataacatagaaagggcttttcttgcttgtttagtaaagtcacgcttttcattttgataggagtaggtgcttgctggggcagggcactcttcattcttcatttgaaactaatgaatgtcgggtcgggccttgttctcaaaaaaaaagggagttgggtaaagcaaactccctccttggacgagcacggggcttagtcaagtagaaccgggttgcgttgcttgatgctccgatcgaaaacaaatcagtggggccatgccggtacgactgaatatgcgttagaaaggtcaatcccttccctacgacaccaaaaaaaaaccgggccgaacttctccccgcccgcttccatagaacaatatcgtggcaacgtagacctaagtggtcatattggatccttgggaaccatcacaagtacggccggcctatatttaaacgagaatgccgtgtcgtccagcggagcctagaagaaggtgactcgcgcagccagctgactccttttcaatagaaaggaatagccaaatccacccagctggctggtcaatctcagagatcttatcggccggcaaaccggagacggacgacccggtcccgaccttaccagcaccggaggtgtactaatcaatgaacccccgaaacctactttcttttctgacaaaatcaaccaagcctaaccggtcacgacatgttgttgatattgattgagtttcagggactttcgctgactgaatccatccataaacctagacccccttcgtaaccaaagcgtcacgacaacatccaaaggtcacctttggattcttaagtaggggggcaagcaaggaggagcacgtaggaatgccgaccactacataagccactagtggctgagagaaagcgagcagcaccttgtataggttgggctccgcttgaagaagcgagcccccatcagagaaagccattgcgcgctagcctagctagctggcgtttttcagctggctgttatgttagttgtagcgcgccttccctccttctctcatttcggaaagatttagcagtattttcttatgatgacctggtcgagagagtacgatacatcggtgtaaaagattgagtgggatctgtgaggttggttatagtaaggcctggccggaaagtgttcttgcctctatcattagctcgggtagtccccgtttctggtgtttcagtcacctttcaatggctcccttaattatgtgcgaggagttgccctcttgagtaatgggaagcgggctagtccccgaaaatgcccgttcgcttgtcgttggggagaaaaatctgacttgctcttgtttaccttactagtagccgtactgttttccgaatgattgatataaacatgccccactctatgttgggcgtaccctatagttagttgtccttcctttcctgaactattcaaaccttgtttatgggcccgggaaggcgttccttatgattacaatgagttcttttctatctcttagcaacactataagcaaatcaaggtgcaaacgattcagcgcaaacaagctcttctttcacccccttttagccagcctattggacctagcaaggaaagcaggaaagtaagaaagaaagaagggaatcaggtaatcctactgctactaagctgctactaagtaagactactctgtcttagggttaggagttaaagcgcggcgtaacgggggttgtcagcgtaacagctggtgctcagagataagctgtctgataggaactgcacttctacttgatttattctatgctattcccccctctctcacccaagtcctagaagtgaatgaggaatgattgaacttctgcttccgcactgagacgctaaagcccttaaatcaaggaaatcccaatgcttctttcagtagttcaatccgcctttcttaccccggatcccgctcaacatgagccgaagagaagtgcatgaaatggtagagctaccattggtcaacaagttgcgtagacttcagccccactttgctttcacgattttaccttgacattccataaatgaattcatctttcgctttgcactgaccccattcctaaagtccgtggtcttcgatcataaactatctctccctctcgataaagtaagatcctcgaacctaaaatctcccacccattgcagcgttggaggccttccggacgctagctttaaagcctaacctatcaaaagtggaaggtcagaagccagagaacgttgtcgagagagagcgtaggatggaaatgggagagagaatcgagattaaaggtatagatcagatcgagcccgagatgcggatcatgagcacaataaaataaagagcagccaagatatgaaatggatatgcaatgagggagcgctagccccaagggtaaaaaaaagtatagctacccgagctgtcatgagttcctaaactttatgaaaaaatcgcctaaactcaaaaacggagtggatctgagcccccctcttaaggggtggggggccgaggcaggtaagaaaggtatgaaagccaaactactttcaattaagggcaagcgggactcaaacccagcaagcaacggacctgccaagaaacggggcagtgcgcttgtgcgagccagcaccccttttgactacaatacaactaactatatatacacaattgtggttcgtgcgtcggtacttttctgtactccttgcgagctctaacctgttttacctcttttatatggtgcaataagcctctttctagatgtctatattctctatacaaaaaaaacccttaattcatgactttcactctttcttgttggtggtcttccaagccttcggaagctacagaacttggagatccctggaccttacttaataaaataggatttcgaatacgaagctttagcgccgaaagatcttacgtttttcagtcggggtccggcttttaggtggattgcctactttgatacaaattattaagggattcagtccggtcccactaacggaacaagaacacattagcgtatgaaactgagctgaaagcgcgagtacacgatctcaaaagcggcaagttcacgttccgcttcctcaatctcgaactctggcttttgggatgagctccccttaccatacagtaacacttgtagaggaagggcttgcccttgttgctatgtgcccgacccaccgcttagaaaaaaatttcaagcataaaatctgacgttttctcggtataggccattgagtgagtggaagggctttcctatttggctgaaaaagcctgttcgttatccatattgatttccacccgccaccccccccttggctttggctttaagcttcatccgccgcagatgaagtagatgaggcaagggccgtggtgtgcgctgacggatcatgtaattgcgtatatgacgattgatgtgagattttttagttccattgtccggtctctcaaaggaagaaagatgggaatgtcaaacaaaggaatcgaaagatgagtagttcctttgatgaggggcccctggtcagggagagcaaataggagtagttgattcagactaccacgtgctggtattgttacgactcacttgagacattccatctttatacgtggccgggctgctactagtaggcttcgccgctacgggaatttccttgaggaagaaagaaaggcagtgacctctgtttcagtcgacatccgctatggtgaccgagccagtgccagttgactcaggatcgacgaatcccacaggaactatctcagagacagctacttcgacttctctaccttcagttccaccaggtttgttttgccgcctccgggccggcgacaaccaccgaacaggctctcctacggatgtcatgaactacctgcgaggtatgaatggcaagattgagaatattgttactgagatgcagtcgattagaacgaccgtgaccactcgcggttggacaatcttgaagtgttgcaaggacctccagcggctttttaaagttggctgcaggctccaccttcgaaggcgacagggccttcactacaaccaggagttccggtccattccgtagctccgacatcccaacacgctgagggttcctcttcaaaggtttaccctaaacctataatctaagtcaaaaatgggaagagcacaactccctttggacatcatctgctccggcgaaagcagtttgatcatctatggcagaaaccgactcagcaaccaaagttatggaaaaagatccagcaagggcagatcctttagacgattataaggggggtaggtgattcggctacatcaactactcaagcatcttaagtggtaacatatggtccagcaacggaaaccgatgacgtgatataaattttctcgcctaaagtctccggttccggtctccaacagtggaaatttaaacgaaggtaatctttttcgaataggagctagcagcactcgatgaaatgaaaggagttctaagtcaacgacagaagtttgattatatatcatcgtccgcagcggaaattggatcatctaaagtacccgatggggtgtgaaaagcctagttattgtaaaagcccccactcaaggggaaggaaagacagatcagtaccacccctctcttcctattctaaaaaactcttggcttaacaaacattcttgtcccgcacgaagcatatgaaattggagatcaaaaaaggtatggcggttgggcctcttattcattcagagatggtccttactcagcgggactcaagacaaagaagtggggaagagggtctgggggaaagatctgtactacttggggtattcgtactctccatttaaggaggggtctcccgtgtgacctcggtcacaaaggcaaaggactcaaacctctttttccacaacaggagctgtatcagagactgagtaagttatagcagtctctgtttcatgaagtgtcagcgcgaactcttgttcatcctctgactcagcaagggaacggaaagcaattcaatggcaacttgaagcagaattccgtatttatgctatgtaaattcaagaatctctggcctcctggcaaagatccttcctcgaaatcttttatctcttctcttcgacccccactttttaagttagggatcgggtaacctattaaggtctctcgagcctctttccacattcttatagaaaactctcctctagactaggatttcccctggctaagagaaaagggcttagaaagctatagaaaagcctctaaaccccttcttagataaaggataaagagaagacgaagaagtcatagtcggctctaagagtagagtacagctactcttcttattctcttaaatgaaaggggatttagttctgctagaacaatcgaatgcttatcctagatatagagcccaatgagacgaaattcacttttttaagtaaagtactttccctgtggtaagaaagaattggctaaaattcacatagaaccgatgtggacaagtccaattgtagatcatgctttgacttcaacccgattcctcaaccaatagaataggctttcgggcgatgaatcttggcttggttttccactctattaagaggttcccatcgagaaatttagatgatccaatttaagaagaacttccccctgggtctttctaaacctggaggaagttaatcagaagaggttcttcaaaaagggattgacctaaggcaaagttgacttatcctggaggaaggtgtctccggaagagaatacgctgatgccgcaaatccggtgttatagaatctgctgctcttggtcttgttggaatatccgttgttggaggaagaacaattaaatcagaataagctgttaatgaatttcctgaagcaagggaagctttagcttgtgcacaattgaaagaaaagggcgcgacgcgaaaaggcctctttcaaataggggaatgggaaagtttgggcgctggcaacgaatcatttacgagaatccccccgatctaaatccttctgtcgtatgagaggccacagcctagatgaatgcaaagccaaacctgttctaaataaaggcaaagaacctttgcaggaggatactatgaaccctaatggagccaaggagaaaccagttgcaggccagggtgagacttcgaaagctgctgagagtgtaaagccagtcacacgaacagatcgaaacaaaaaatcaagaacagcgtgggattgggaggttttcggttgcgcctagtctggatgaccatgaagtgcaacgagttaatgctgctacgaatgaggaacaagccctttttcttgataataataatcagaatggcgagatggctggtgatgttgaatccttggtattaacacaggtatccaattctaaggtgaaagctagtgtgcccgtgcctgatgcaagggtagagaaggaagatacaaacggaagtttgaatgaaaaaaaagctcttgaacctgagaattctggtgcatgtgataatagagcgcaggagaatgtagatcaattggatctcaacaaggcgatcagatatagagagttgaacagcttaaccatgtcagatgcaggcaagcgtattaactctaaaactgtgatggatacgttccagttgatatcgactgcacccctcaaacgtgtagatgatgtgaactctcgggaggaagcggttgaaaagccgaaaagattcaataatgaactacaggccagaccagatttgagaagattataaacaatactagctgctactgaaaatgagtcggcacaaactcttatcgaacatcagccattgaaaaaggtaagtgactctgaatcttctgagaatgagaaggctattgaatctgttagacctaaagtcactaaaactcaaaaaaagaatagtgacttgccccctggaggtcttactaggtccaagaaaaggaccatggatggttcttcttcgttccaaaatgccctatgaaacattccattgtatggaatataaggaatattaaaaccaagcgtccgccaccttaagaagttaatcaaggattatcggattagttttcttgcagttcttgagccaatgattagttttgctaaaaaaagatcggcaggaaattgaagcttgctaatgttaaaaaagggtggtctacgatcagggaatgcctttattgttaaagagaattggccgtagagagagcgcctatctctcataagagaagaagagctaccatttgaaagtatatgagtaggactgaaattccaagcgctcctagctcagaaaccacacacagacaaacacatggaggcccagtccaactcataaatcatagactaacaaatatacgtgacatacacaacctgcgtgaagttttcatcttaatcaatcaaagcactttgtaaaatgctactttaatttctgcaacaagtaacagcagtttcttatcatacactcttattctttgaatgaatgaatcaacaaaattagactcctaaactagccttctctgtatcttcaaagacagaagtacacatcacaggaaaaacaaacccaaaaacagaagcagaagaggaaatactggtagatggctagcagattagcagcaaagtaagcaactagttccttttggcacaacagggtaacagggtaagtggtcaactctatctcattctctctctgagtatcttcataccaacatacctgccaaaacaaaccaacaaattatcaacccctctcacagtcatcaatcctgcaacactcaagcattcagataacaacaaacacttaccgtccaagcatcaaaagagtagcctgggtgagttataacaacctggtgatacagtgaatatcgaaccatcaacaactcggagagcatcaatcccaataaccctgaaattgcgatcaactaccttgcccacaaggcatccaccatggtagtgccatatagtactcactgtgcgacggcaaaactctcccatcagccgatcatttgattgatcaacgggctatgcgggccccacgtatctgaaatctcggcccccaaaccattccctgaatttgaaatcctccatggaacggctcctcagtacatcaccgatcttgcgggtgccattcacacaccgctccacatcacccggattactaaagtagttgaaccggacaattgggttaaccctgacatccgtagatgccaaccgcagtgaacccgcggagagtggcccagtaatcttttccatcagggtggccacagtgagatacagtggtgaagctgggttccgaatgaaaacagagcgagcaggggaggcaaaaggtatgacattggaagctgcttcaaggtaagcccctgaattggttatgcccacgacttgtatcagagagtgctccaatggcattgggggcacaattgagatgccatttcggggattatcatagaggaactgtccgacataaggcaagtgatgagccacaggaattccccacgatgagaggtacggcctcggtccaatgccactcagaagcagaagctgtgggcttccgagagccccagcacagagcatcacctctcccttttcacgcaccattgcatggtggtatcgccctgtttggtcgcgaaaaacaaccccaattgccgattgcttcgatccagaataaggcgaagaagaggctaaaagaattctttcaacacttgcatagacagccactcgaatattcgaagctttcgcatagctgaggagatcagcagcactgtgtctacgaccagaactgtcgaatgtcgaaccaccaatcttggtacccactgaatgatccaaagtaaacccattatagggatcaacaccggcttccaatagcccgtctctgactgccgattgccaattctggagctccggcctaaagacgatagccctctcaacccactcataggactggttcacactcggaggtcccaattcacccctgaccttccgtagaattattgatcggctcgactatagaacccggcattgatagcactactgccgccaagaacccgccctcgggcattagggacgccgtcttcggaggttcggcttgcttctcccccaccttttagcgttctgggtccctgaaaaaagaaataaaccagaaataaaaaagaaagaagagaaattgggccatgtttcccgggggagggttttttaggcaggccagcagtcttctacttctagtcgactgctctatgacgggcttccctgtttcctgggctctactcgctcgtctacgctccgacccagcaagtaataattgaaaaacgacgtttccttgaatgcattaagatttaaaacttgtcgtcaaaaaaaaggcaatcaatcagaatcaagaaaaaaaaatggaaatagtgaatcaagatctagatggatccctatctttatctctatccacggggatacccggaaagaaatctatctatgaatcgatctagactatcctctatccggatagatatgtccctatgagcgactacgccgatctttatatgttttggccacgtccgtttccgctccgaagaagaaggtttagatctttcaatcttatgtcgtgagggatgtgacctatgttaggtccataagataccacagcttttagtgttctatgattcacctccgaataatgagtaggtagttcaatccttttgattcttctcttcttagtaaactgatggggggatgcggagaaataggtcgaattactatataaatcagagttgtcacctataggactgcttgttggataaggaagatttcggtttttctcgttccttctcttcgataagaatagggatttgaaatgatacaaattcctcttcattctgttgtgctccgcgaaggaactgcctaagcatactttttcggatccaaacttctttgttctttctaagtcttcttcttgcatagaagaacgcaactgttgcaaaaaccgggattttagtagtaggcggcatcccctcttagttttgagtaggtggaaccattctgttttggttcttctccacattcttaccgggtgattcaggaattttcctatgattttttcaactgaaatttctttatagaaagatctccttatttcttcaccgcggattctcgcgtcattttcttgaaaagatatta

SEQ ID NO: 13980 - DNA, 4290 bp, Cannabis sativa
ccatactacaataaagattcgtgcacttgcgagttgataaatgtaaaacgtaccacttttggtcacaacacttgcaaatcctgccgatgccaccaatctggcaaatcttgcaaaccttgtaaattctgccaatactactaatcctgttgaccctacaaacttgttgaatcctaacaatcagcccttgccacccagaacagatctagcagtgccttgaactgaaggcctagttaacatggaacaacatcaacaaaccattgctaaaaccgctctacgttaccgcgcaggagaaacatggccaggaattggtgaactagctattggtgagcctcacttggaccttgaagatgatattgagttggctaggcttagagaagttataggccaagtcacccaaataagacaagaagaaacacgcactgctggttgcgatggtttttcccaacagacacgcaaattcctaaggttgatggatgaccatgaggacatcctccaggcccatcaggaggagctaatcactataaaaatgaggtcagtgacctgataagacagttcaataaaagaacttccagaagagccaggatctaataagagatcctttgcaaggaaggctcatcaacaattcagacagggcgcgtatggacaggttgacaatgggcaaactgtccaaccaggtccctcaagcacaaggaaaaccttcccctacttgtagttagtcaaatcttgccaaacaaaccatatggcaggactagcaagtccctgacaccaagaagtgttgggggacgacccgacattcctagagtagaagcaagctggtcggtcaagtgcctaccaggttgcactatttataggcacacatggggtaaagggcataccctttacctacctaaggtttagtaccccatatgctatcaagaatagtactgtgagaggacgatttgaccattggctggttggaactttcttcatcgtgtggtgtacagttgcttgcagagagtcttatccgagcctggacacgtgtcgcgcaaaggtctctcctttgtaaaatagtctctaaccaagtcgttcgggtaaaagtacactagagggtacgtatgaccactaccgtgctctagtgtaggagacaagatctgatcttgtgtcaaaagaaggtatgaccgtctgtggattgatatgctgacgtgtctaatccgttcaaaacccttatcggcctctaggttcttaaatgagggaagttatttccagggagcatcgcttgccattcctttccaggtctgggaaccatccttcttggtttccttgggtgatttttgtaatgaccgtatccttccttttgattatgccacgtgtctgataaacaaaaacttagataacaagaagagcttacaagagaataataacctaatatctctaaaaaataggagatacaactatttgttccataataaaacaataaataataaataggttaattatccccaaagaataggtgaatagttgatattttccccctattttagtgggttgttgaagcccaaatcgcaacttggattgttgtcttggttgaaggctgcacaccaagcgcctaccaggttgcaagttggccggacaagtgcctgctagggtacaagctggccaacccttcaattgctggagactggctggcctagtgcctgctagggtctggccgaccaagtgccttccaatgtcaaggctgcacatcaattgcctgctagctttggcaagtgttgtccaacctttgcatgtgttggccagccttagtacgtgttggccagcctttgtacaactttccttgcaaagctcaggcttccttagttgagtaggccctttttggtctgacagtcaccctttggccggccagcttgtgctcaaaccctggtcggtcatacaagctcctcctggccgacctatgtactccccttggctgaccagacatggtactgtagcttcttgatagcttgcttaactccttttgcttgttgcttgatggttttgtcatgccttgcaaggagactttgtcctgctatgtacaatgttgtattccacgtgtcctcagtcttggcttacatggacataccacgtcaggtggacaaaatttgagataacaataatagaccatacaataaaatagaaatatactgtataacacataaaaattaaaaaaaaaatcaacataattttaaagtaaaaaagattttaacaaaactaatatagatataccattatctttaagtaatttgcttctaattctaaaaataatatgaaaaatgaaatcttaatgttttttatgtgacaaaagacaatataaataatctaagtgctctagttagcactatagggaagcctttaatggttgataaggtgactaaggagaggtctatggtgaagtttgcaagggttctagttgaaatggatattacggattctcctcctcaaattatccattactttaatgagtatgggagactagttgaacaaggggtggattatgaatggttacctgttaaatgtagaaattgtggtggtttttgggcacaatatgggtgaatgtaggaaaaacaaaaaaggccagtggattaagaaagagaaaggggatgctgggaaggatagtaaaaataaggataagaaggatgttgagaataagggagagaaaggaagggatctaaatgagggagatgtcaagtagaaacctgttgtttctcagtaggagaatcggcaaaagaaggaaaagaaggaggagtggctgctacttcaaataaaaacacagtagaggaaaagacagagcaggggaaaatggaggattacagctgctgatatgaagggccctaatgaatggcaaacacctaagaagtctcttttgcttaagcctaagcaactagaccaggggaagaaggctagaacacaggaacataacctatttgaagtgctacaaggcaaggatggggtctaaaagcaggtgatcaatctaattacttgaattaattgcagtactatcataagttggaatgttaggggccttaatagtatcaataaacaagagacagtgatggatgtttgtagaataagggaagtgggagttggagctcttttggagacaaaatgagaggtaataaagtgcaagagatggtagcaaataaatttaggggttgggattcctataccagccctactatagagggtagaatcttaatcatttggaaaaaagtctttgctagggtcattgtgattgctgaaactaatcaatatgttcattgttacattaagcttgctaatcatacagaagctttttgtgctacttttgtgtatgggttgaataaggtggaagatcgtaaggagctttggagaggccttggaaatctaaggtttcctgtcaaaccctggatcatcctaggtgacttcaatggcttatttcattatgaggatagaatcgggcggagaccaatttctaaagttgagatttagtattctaatccctggatttcgacaagaaaagtggatgtgttgaagagaatgggttctttttaacttggactaacaatcaagaagggggagacataatctattctaaaattgatcatgttttcaagaatgaggattggctggatttatttcctaattctcaagctagttttcaatgggagacggtttctgaccattgtgtggtgactgtttcttctgatgtaatggtggatatagggattaaatctttcaaagtctacaactactggacagaacatagggattttaaaagggtagtgatggaaaattgggtgaaaccagttcactatactggtttactgggcctttatcttaagctatgcagggttaaacatttgttgaaagtgtttaattctcaacagatgggcagtgtggagatggcttatcagaaagcaaaggctgattttcaattggctaaaaccaaagctcaagaaaatcctagaaattctaattttcttaaagctgaaaaggtgatagctgactggtattttactcatgataagatgctccagagttttctggttcaaaggagcaaggtcaattggcttagaaaaggtgatgatgaaaactcttatttttatgcttgtcttaagaaaagaaaggaggagaatcgaattgcaagctttgtagataatcaaggtaatttgattgaaagttatcctttagttgttgatcattatattaactgttgggaatattttaccaagatctagatttactaacaagtatgttgaatttgttggaatatgttttaccaggatcttgatttac

SEQ ID NO: 13981 - DNA, 5966 bp, Cannabis sativa
  modified_base (66)..(71): a, c, t, g, unknown or other
  modified_base (103)..(108): a, c, t, g, unknown or other
  modified_base (4133)..(4133): a, c, t, g, unknown or other
tggtacaatgtttaaaaaaagaggtaaaaatgatagactttaaaaaaaggataaaaataaaagagnnnnnnaaaaagaggataaaaataaaagaggacaatannnnnngggtatagagtgtaatttcctaatttttttataagtgggccaaattgggtggaatatgaaattgggccttgtaaaattgggctgggcaaccgggtcagtgtacagcacaactccacacgccatcgctgtctcattctcccttctgctacgccttatgcccctcttttcatctctctcctctctctctctctctctctctctataacaccgacgacgtagccctaactttctccgacttctctctaaatttctccaacaacacgagacctcaactgactccaccaacaacttcgcaccatgtccctccgtcatcttcttcgcctaaaggtactttttctagtctctcaattatgattctacttttcattgttaaattgtctaaattattgggattatgacattaaatgagttccttaattgatcaaggattacgggtaaatgattattaccacctgctcccgattggatgattttgctggttcaatttcgtttttttattattaattattaaattgtctttgcatcactgtaattgggttaatatttgatgaatcatctgctgtcatcagatatttagtggagtaaatgattgatctttttgataattttagaaagttaattaatggctgctgctgctttttctgtttcaatcggttttttttttcattgatattgcaaaatgaaaaaaaaaaaattacactttgtcactgtatatatgatgtaacgtcaaaatgaatgattgttgctgttatttctttgacatgttcacttgaacaaagtaagactttgcttagtttgtaagacctaagttagtttttcactaaagtctaaaacttgaagaaattccacagataggaaaatccaacatcaatttattgagagtgaggttatagggactctagctactccaagttttccctatggtcaactttctttcatcggcattttccgtctttgaagcacatagtgagtcatcgtcggcctgtgataagaaatcgattcgttcaagataccttaagtggacagcagctgtgaggaaggctgtgacaattggcccaatgagaagatttcacgagcgtatacttggatccgctagaactggcatatctaactcaacaagtgacatatggcttcttggtgtatgttatagaatctccccagatgattccttagtagattttcccactaatggtggcttagcagatttcgaacatgatttttcgtcaagaattttaatgacatatcggaaaggtttgtagttagttatgtgtctttgactttgagttgtttgcattttgtagtttgctgacctaaaaactgtgttccccaaatccaggtttcagtgctcttggagatttgaaatacactagcgatgtaaactggggttgcatgcttcggagtagccagatgctagtggctcaggtatgatttcctcgcccttataacctttaagcttgaatggcgcatcaaccctattctaattactgctttacttgtccacaggctttggtttttcatagattgggacgatcttggagaagacaattacaaaaggtaagatgggcttgtggaaacgtgatattttttttttattattattaaattttgacataaaattgttgttctagtcttctagggatccacatttaccatatgatgcaaatcatttcagattatctcttattttatctttttaattattttcattggataagttcttttcttgatgcctttgttgttgttgctgctgatgtaaatgagttcaatagtttattgtttccttattgggcaagggagtagagctttattctgtaatttatcctcagttctgacaaccctggttacaatgatgcccgtatattataattatggtcgtttgttttttttgtgtatttgtagcccttggaccaagactacatcgacatattgcatctatttggtgattcggaagcatcacctttttccatccacaatcttcttctagctggaaaggcttacaatcttactgcaggctcatggatgggcccatatgctatgtgtcgctcatgggaaactttagcgaaatgcaagagagaggccaatgactttgagaaccaaccacttcctatggttgtttatgttgtttctggagatgaagacggcgaacgtggtggagccccagttgtatgtgttgaagacgcccatagacattgctctgagttttccagaggtcaagctgattggacacctattcttttattggtccctttggttctcgggctcgaaacaattaatcccaggttttttactgtttgaaatttatgtagatgctctactagttattcagttttgttttagttatacagtttttctttccttgcttcctagattaaatatccaaatttattgttggaatttgaatttgtcattccctttattggaaatttcaattgcttgagttatcactctgcaaattgatttagaatttgttagttaaacatatgaaattccgatagtctggattctttctttttaaatttctagattattgaacttatatgtgctaccttcctctctctatataattgtgccagagctaagaggttcaagttgcagctcatctttgaaatttcataaattctttgccaacataggccaaaatttatctgatataagtttaccttcgtattaatttaccattgaagcattgagagaggtagtctcattgtaaagttttgcctggatatttgagatggtaatctctaaatttattttttaggtacattccagctttacggtctacattcacatttccccaaagtcttggtataatgggtggtagaccgggtgcgtcaacttacattgtaggtgttcaagatgataaagcattttaccttgatcctcatgaagttcagccggtatagcccttttattgttctaaaattagccactaaactgtggacataacgagttaatatgttctatcatcttgcaatagtctacttagctttcccatcataccttaattgctaatgtttgaatgctcatttgttcaggtaattgatgttggtaggaatagtgtagaggctgatacttcatcgtaccacagcaggcgagtcttgctcttccattctcgattcaatttttctttatctttctatcatattcataatttcatactcattcatgtcttccatgccgtgcattatttttaatcttatattgtttatgcagtgtcgtaagacatatggccctcgattccattgatccatcattagcaattggattttattgccgtgataaaggtaagtcttttctcttagttaaggtttagtgctttataaactttcaacttcaagactaatactttgttcttgtattcattcatggttttcagatgattttgatgacttttgtctccgaggtaaaaagttggcagaagaatctaaaggtgcaccattgttcaccgtgacacaaaatctgccaaagcccgtgagccacagtaatgtattgggagatagtagcgaggttagcgattcattcgaagcactgcctagtaacaacgaagatgattgttcacatgaagacgattggcaactgctttgaaagtaatctcagtagctttaaccgctcctcttttagtaattcggtggctaccatcgaattgcgaaccttgtacattgttggtttagctgatatgattggccctcccaagtgagctctaccggaacagccagcacgagctcattttcagggtgaaatttaaaagttggcatttgtaaagtaattgaattgacttattgtgatgtttattctttgttcatgttcataaaattggtccaaaaaaagaaaaaaaaaacaagtgcagttgtatgataatttaagtttttttactctgtagaggatgataaggtatgtttggataaaatattcttgtggctaaactatttatttattctgtaataaaaactcttcaaggaatttggagagctaactttcagcaaaattgatttttgggttcattttaaagcttttttttttttttntttttttttttttccattttggtgatattaaactaatttttggttaaagctgttaatctattttgtggtgtaatatgcataattaattatgttaacgcgatttttcattaattactaattgagtcttatttgacaattaaataatattgaaagatgactgtaaataatacacaatgaagtttgtaaataatacacaatgaagttttatgtagttttgaaattaaatttttatagtcaatgagtatcttatttctgtgttttttgtttataaagaggacaagtattatacaagtattgattgtaaagatctttgtattctcttctaatttcctttcatttgttcagtggtttctgctactatttataaagatccaagaatgatagttattacatttgttcttatcttgattactattcaagaaacgtagacaatttccacatttattcaactgctactatgtataattgccaaataacctcttatttggccttatcctatagacgattattttaccgagataccaacttgtaaggtgctgctcgtaaataaacttttatgcatattcgcctccattcatctcgcactatacatgttctttgtaataactcgtcttctttttacatatcttcgtacttcttatcaggatgcatatatcatgtatcgccttgcgttgtacagtggtgagaggacacatgcaagacacatgtttagacattcttctcgcattgatcattcatgatgaaattttagataattcttatataaacttttaagtaagctcttcaaattgtatcatttatgatccttagttcgaattcttttatgctgtcttgttcgaccaacaaagtcttttgtcttgttgattatgcgttcgctcaagacagttggaggaaagcttttggtgttgcttgtgcaagtgtggaaggctcctttgttggttggttcgaaaatgcttttaagcactggaaaaataacaaaaaagaagcagcagtgatgctctgttggagcatttggagatgctgtaatgatctcatctttcaaaaagctatacctgtggttgataaagtgatctcatttgcaaaactcactttagatcaatgaatatctgctcaatacttttcttgtcgtttttctcctaataatcatgatgtttgtgagaaagataagcactgggctaaactaagttttaacatgatcaaagttaatgtagatggtaccaagggcggagccagaattagatagtaaggggggccaatattggccgacacatacgacaatagtgaattttgataacttttttagtggtgcgtgtccattaaaaaaaaatatcataattttttattttcataaatattttatacattactcagaaaatataaaccaagaactaccctcaaaagttgataacaaaattacactcaaaaaatttgagtggtgccttaagctcaatttttttttgacattatgggcgggggtattcaaatttgggatctctttgtgaggagaagtgtgaaaccattaagctatgtttatataaccaccttaagctcaatttattattactaaaatttacttttaatttatgtggtcatagacatagtctaataattctacgcttttccttagaagatctcaagttaaaatctcctctcccaaagtcaaaaaaatttacttttaatttcttaaaaaatatgtttgtccactaatattaatttaaatatttctattttttttttaactttatgcattaaagttatgtacatttaaatttagattaagatatgtcaaaacttctataatatttaatacaaaaataatatattatatttgta

SEQ ID NO: 13982 - DNA, 17844 bp, Cannabis sativa
  modified_base (32)..(33): a, c, t, g, unknown or other
tgattaacataaataactgctaatttccaaannaactaagcgggctttacacatatggtattgaatctaataattatcaattcgaggtacttaaaaagtacttgagaaaagacgtgaccatcaaagaggtgtgttataggattaaaggcaaaagaaaaaaataatatagtcaaagtcagccagtcatgtgcgcatccttcaccttctaataaaatgtacaacactatgacatatatatttacgactatatgtgacacattagagagtagtctaaaacctaaacaacatgtcaatttatataacccacgataaactttatctaaatgtatggtcaatcacaaattcttggtagattgtcttttcaaaattatgtcgctcctccacagcaaaaacatcaaccttctccgcaacagcaacatcagccttctccgtattagcagcaccagtctagtccgcagcagagaaatcagttcgtatacatggaaccccttcatagtctccttcgctcggttcaaattttgctgatttcggtttgggagttctttgcaggcacaacaatttttttctactccaatactcatcaaccaagcacaataagaggaacttacacttttttactgtcagatcaaccatatgttccttctcagccacaaccaccggcacatcccaattaaccccaataatgcgaattcaaacttttttctctgagaccttaataatgattttatgaaataattaatttaagtatatatgttaataactcagacattacacaatatattttatttattattagttagtttaatatgagatattataatagtaatgaatattgtatttatttggtgttaaattataatatttagaatttgttaaattatatttaatttttatataatttataatatgaattttatttttttaaaaaaattagcgatggggccaccgctattaatggttattagcatcagattcaatagcgactaattaatagcaactaataaccattaatatcaactaattattagtggaagattattaatccactgctaataaccaatagcgatatgcaagggttattagcagcggggtactccgccgctaataactataaatattgtagtgtagggtggtctgtgatgtggtggggctgcatcaatggatgacccgtgggggagaagagtcatacgctttttattttatcattatttatgtttaatttattttgtttttttagttattttaataattgtgttgatacactactttactattgttattattgttatcgtagtagtgctttttttattcatgacattgggttgtcttgtttctttttaggacgatgagggtatattcattggctcaatgcacatttattttagtagttgtccatgttcatatatgggggattctcaaatttttattggccctatagtttatgatgtgattatttgttacgagtattatcgctatggttggtcgtttgattatttttatttattttagattgaataatggggttgttattatatccgaatttctactggaagatcattggttaataatcattgataggtgaattttgtcagatatgtatagtttggaagtctagtatacttcacacttctttgatgcttgaccgttggtagtttattggatttctagttaaagttgttgttaagattttattctatgttattcaaaacgacttagtaagttttattttcataattttgctctttgagttatattttcatgtaatggactttgccttattaattactatggatatttttattttctcaaaaaaaaaaaaaaacaaaacaaaacaaaaaaaacataagagactactttaaatcttaaactctaaattctaaacgctttataatattattggtatttttgttttgttttgaagttattaaattgcatttaatgaatgcaaaccctagtataattgaaattaattaaccactccaaattagctaaagtgatcatacaaaatatgggagagtatgtgtgaaaatcttaagatggagtcctaaattgtacaatataatatatataaacacttcaataaaaagaatataattaaaattaattatacacaattgtgactttgagttagaataaaacgcaccacttcaacatatatcaagcaagaaaccactaccactataatttcatttttccttgctaaataccactactaaaccatttgagtggtgattattattggtaatgattgttatacacctaatttattttaaaataaatatgatttgtctgattttttttcttcaaaaaacacatcatatataaatattttgtaaaaaaaaatcctatttacttataaatactacgaaacacagtaatgtgataaaataattttgtagggttttatgtttttaactcataattgttttattggtagggtcataattataagtaagagttggagttagctataaatttgtgatggaatggaatacgtatgcatgtgcgtgaatataataaatagaataggttcttaaatataatattaataattaattaaatcaaaataattttattacaaatggaaaatacagagagatcatttcttcccattttcaataccaagtgggaaaaataatgcaagtcaaactaggcacacaacaacacaatctttattcatgatattttaggtggacagaggagagcttttttttttttattattattattatttttttcttttcttccataaaatttattagccagccacctccaaaaagatggccacacaaaacaacaaattactaataataataacaataattattctctcgtcaattaaagtggcaattttaacaaaaaaaagagagaaaaaaaattatacaaaaggtgggaagccatcaacgacaacaaccttagtccaatgttcatttaaatttgtaattcgtaggatcatggaaatttccattaaattcacactttatattttttttttttttttggaataaattcacatgtgcgtacaacgattaaatgacgtcatatataccaaaattaggaatagaaataaattgaaatatcagtaaagactgacatgtgtccatgtccttaatttgaagttttgacaactattgtatcttcattttcaatctattatttcaaatgctcaactaacaatttatggacatttccgactattttgacacttggttttcttcaaactatttatttagtagataacttattatgttacggaaggggtttcaatcattaattataaggggtaagttaaaattgacttcaattattaatacaatgtactaattaaggaagaaaaaagtatgaaatgtttttggaatgataaagtataataattatcgagtctcatataatttataataatttttagaaaatatattgcaatgcaacacgtctagaagatgttagacactaatagtgttcaataactcttttaaaaacttattttttagagaaatactaaaatatattacttgtgcctagtaatttcttaagtgtaatattgctataagtgcaattaattaagtatcaagtattatataatttaatataataatttttataaaatatatcactaaccaatcataaagtctcatctctaaataatactagatactacgttcaaaacagtacttataggaccatcatatcttttctacacccccaaatcttgatcaaatcactacattaatcattaaaaaaaatctaaataaaacatactttgtaaaatccaaagattttatttttacttttttttttctttttaaaagaaagaattttatttttaactttataaataattattcaaaaacattaaaattaacttttcattactattttaagcaatttttttttttttttaaaaagaagaaatatattaatttaaaatttgtctaatttttgcaaaaccatttgacatttgaccacggctaaatcatttttactatgcttaaatggatcctatttctttctccttttcagattcattaaattcagctgacccaatctgaaatgaaagattttttcttgccaccctcttcttctagaagttcttttttgattttgctttcccctacaaattatttatatatatatatatatatagattttatagttgtaattcatttcatcaaaatcatccagagaaaataaatctgggtttctgtttgcagctgaaaaagtgcgtgccttgtaagacattgttatatatatatacacacgtatgtatatgttttcggctagttataggttcaaagttgcaaactttatataaaaaggattgtgggtattggtgagttttgacattgatctctgttttgggtgaaaatggagggagctgatttatacagagcgggtaatagcctgcgaaatagcatgagaagtacgagtagttcgttatggaggaacaataacatggaggttttctctaaatcttcaagggaagaagatgatgaagatgctctcaaatgggctgctcttgaaaagcttccaacttattctcgtttgagaaaaggcattcttactacctctaaaggagaatcaaacgaggttgatatacataatcttggttttaaagaaaggaaagatttgcttgagagattggtcaaagttgcagaagaagataatgaaaggtttttgttgaagctcagaaatcgtattgataggtactataatacataacaaaacaaatacaaaatgtctttcttttttcatttttgaccttctttttcaagctttttctatctattgagttttgggtttttgtatatggaaacaatttcagggttggacttgatcttccaactattgaagtgagatttgagcaagttaatgtggaagcagatgttcatattggaagcagagctttaccttcattcattaatttcaccattaatatatttgaggtagctcacactacacaaatattgggccatctcatgctcaataaatacactattttttttttttttatttactcacaacatttcttttaacaatttatttgttcaattatttaagggtctactgggatttctgcctattttcaatagcaaaaagaaacatcttaacatccttaacgatgttagtggagttataaagccaggaaggttagtaaagttattttttgttttgttcatcaataatttatatctttggttttggaatccataaaacatacatctaactaatattactttactatgaaatgttttagattgacattgctattgggtcctccaagttctggcaagacaacacttttattgactctggcaggaaagcttgccaaggatttaaaggtgaacaacaaaataaaaataaatcattagcattaaagttcccttttatttttttattcttgtaattttatttaacatgataactgatgaagtgttatatgtggtatagttttctgggagggtgacatataatggacatgagatgaatgagtttgtacctgtaagaacagctgcctatattagtcagcatgatgtccatattggagaaatgactgtaagagaaactttgtctttctctgcaagatgccaaggagttggaactcgtttcggttagttcatcatattttacatttgtgtttataaagaatgttcataatttattgtctaatatatattaatatatgtatttgcatgcaacttgcagacatgctagctgaattagctagaagagagaaagaagcaaatatcaaacctgatgcagatattgatgtctacatgaaggtgagaaaatccacttcaaccccataattgatattttcttttgaaagtttaaagcttgatttacttaacttagtttttttgtatctgtactgtaggcagttgcgacagaaggacaagagacaaatgtcgtgacagattacgtccttaaggtgaaaaccattaaaaattctataaattgttttatatagttagcttattcctgtgaaattagtcaagtaattaagatgacatgaattacagattcttggtttggaagtatgtgctgatacaatggtgggagatgaaatgctaaggggtatctctggaggacagaggaagcgtgtcacaactggtataaacacagttgctttctgcatttttttattacttatttttcaataataaacaaacataacattaatttcatccgtcatgtacaggggagatgcttgttggcccagcaggggtgttgttcatggatgagatctcaactggtttggacagttcaactacgtaccagattgtgaactcactgaagcaatatgttcacatctttaatggaactaatgtcatctctttactacaaccagcacccgagacttatgatctttttgacgatatcattcttctatctgatggccagatagtgtatcagggtccacgtgaaaatgtgcttgctttctttgaatctatgggtttcaaatgccctgagagaaaaggtgttgcggactttcttcaagaggtaactttacctccataaacatgtatatttttttgggtagggaaactcttcaaatataaattgttatgtagtatggaataatcaattatacatggctgaattataggtaacatcaaggaaagatcagggccagtattgggcaagaagagatcaaccttacaggtatgtcactgtcaaggaatttgctgagtctttccaatcattccatgtggggcagaaaataggggatcatcttgcaactccatatgacaaaagcaaaaatcatcctgctgctttgacaaccaaaagctatggtgtcaaaaagaaagagttcataaaagcttgcttctcaagagaatatttgctcatgcagagaaactcatttgtctacatcttcaagcttgtacaagtgggtttatcatctatgtttccagttttagtttttttctactgtttattcagtttatgagctcataattattgtttccctgcttctagcttgcgataatggctctggtagctacaacacttttcttaagaacagagatgaatcgcaatactgtagaagatggtggaatttacctcggtgctttgttcttcactgtgataatggttatgttcaatggtatgtcagaacttcctatgaccattgccaagcttccagtgttttacaagcaaagggacctccagttctaccctgcttgggcatatgctcttccatcttggattctgaagatccctatagcttttctagaagtagcagtttgggtagccattacatattattcaattggattagacccaagtgttggaaggtacacaagaaaaagaaaaatcaaagactggaataattggggttttcgtggtttaattttcttctgaacacttggtttttgtgcattatttcaggttgtttcggcaatatcttgcactgatatttgttaatcagatggcctcagcattgttccgagctactgcagctacggggaggaacatgatcatagccaacacatttgggtcatttgtgttgctcttgctcttcacactgggtggttttgtgttgtctagaggtacagtggactgaatctatactatttatttcaagagaccattttcccctcaataatgcattttgattgatggcaatgcttctttttatttgtctgatatgatttattatgccaacagatgatatcaagagctggtggatttggggttattgggtgtcacctctaatgtacggtcagactgcagttttagttaatgaattccttggggaaaaatggagacgtgtaagtttcttgtaacttattggtttgtaagctttatacttttgctttgtgaaaccatcatcttatttgttttgtgttgtacctattgctcttgataggtgttaccaggctcaaccgaatctcttggtgttgaagtcttaaaatcgcgaggtttctttactgaagcatactggtattggattggtttggcggggttgactggtttcattattttgctaaaccttttgtacatgctggctcttactttccttaaccgtgagtattcttttttggatttactaaagaaaatctccaaaaggatttctgttagcaaactaatctcataaaattcatgtgtgcagcactagaaaatgcaaaaagtgttaaatcagatgattctgagaatgatgttcaagatagtagagccaggggtgccattgaaatgaaccaaagagcaaatagctcaagccatcactctcagaccgtcgatgaaagtatcaatgccaaaaaaggaatgatccttccatttgagccacattctatttgttttgatgatgtaatctactcagtagacatgccacaggtaagagtcattaacaaagtaattttattagtgagtttaaaaatggagtttgatcttaaaataacgaaactttgcaatctgaatgtgaacctgcaggaaatgaagagccaaggtgtggttgaggataaattggttctattaaagggtgttagtggtagttttaggcctggtgtgttgacagcactgatgggagttagtggagctggtaagaccactttgatggatgttcttgctggtagaaaaaccggtggatatattgagggcgatgttagaatttctggctaccctaagaagcaagaaacatttgcaagaatttctggatattgtgagcaaaatgacatccattcacctcatgttaccatttacgagtcattgctctactcagcatggcttcgtttaccagcagaagttgattctgaaaagagaagggttagtttcgtaaatagcttattttataatttgatgaacttgaatgtgtcaccttttggttcaattcaattttttcaagttattaaataatgaacaagaacttgagttgacaaacttttatgctattggacagatgtttattgaggaagtgatggagcttgtggaacttacttcactgagacaagcactagttggattgcctggagtgaatggtctctcaaccgagcagcgaaaaaggttgactattgcggttgagttggtggcaaatccttctataatattcatggatgaaccaacatcagggctggatgccagagctgctgcaattgttatgagaacagttaggaacacagtggacactggcagaactgttgtgtgcacaattcatcaaccaagtattgacatctttgaagccttcgatgaggtaatttcttaaacaaggattcccaatgatgtcagagttcatattgaatcttttcctttttgcataactaaatgaaacatattttgttgtacttgtagctattccttatgaaaagaggaggagaagagatatacgtggggccattaggtcgacattcttgccatctgatcaactattttgaggtacaactagatcagattcttgtgttatttcaacttaaatttgctttgagtcttttacaaggtaatgcatctctttttcttcattgctaatttgatacgtatgtggtgtttatcaaggctattgaaggtgtcagcaaaatcagagatggttataatcctgcaacttggatgttggaggtttcgagttcggcccaagaaatatctttgggagttgattttactaaagtttacaagggttctgaattatacaggttggttagattattcagaccttttattgtacctctatacattattaaggagagaaatactaaactatttttttgaatcaacaggagaaacaaacaacttattaaagagctaagcacccctgctcctggttctaaggatctttacttccctactcaatactctcgctcatttgtcactcagtgtatggcttgcttatggaaacaacggctgtcctactggagaaacccgccttatactgccgtgagatttattttcaccactttcatagccttgacatttgggacaatgttctgggacttaggatctaagaggtaagttatacaatccccattgaactctatatataatcctttactttcctttgccttcctcatctgatatgaacatttaacaaaattgcaggtcaaaacaacaagatctcatcaatgcaatgggatcaatgtacgctgcagtcttcttcatcggggtccaaaacgcttcatctgtacagccggtagtttccatagaaagaacagtcttttacagagaaaaagctgcaggaatgtattctgcttttccctacacatttggacaggtaaacatttaatattctcaaatcaaacactatttatttgtatacaaacctagataaatatatgtatgtatttgacattatgtacttggaaaacgcaggctgtggttgagattccatacattttgtgtcaagctttggtttattgcctcatagtatactcgatgattaacttcgaatggactgctgcaaaattcttttggtatctgttttatacattctttgctatgctctacttcactttctatggtatgatgactgtggcaatcactccaaaccatcacattgcttccattgtttcctctgccttctacggagtatggaacctcttctctggattcgtcgtccctcgcactgtaagttttactcaactcgacaactatagtaatagtttttccttaatgtctaaagttagtaatgttttgtttctttgttctcgaaaacaacagaggatgccaatatggtggagatggtattactatgcttgcccggttgcatggactttgtatggattggtggcttcacaatatggagatgttaccgaagttcttaaccaggaaacaggcgagacggtacaacagtttctgagacgattttacgggttcaaacatgattacttgggagtcgttgcagttgtcaatgttgcatttgcattgttcttcggaatcatctttgcctttgctgttaaggccctcaatttccaaaagcgatagacaattaattaatttgttctggttttgtctgtatatttgttttagctcttggtttttttttttttttaacagtatattttattaatattactattttttttttgtgcaatagcaaagctgtaacatgtaatttattattatctctttggtaagtaagaatttgtaatatgatacttccaactgtttgtttcaattgtaacaaagtaaagtgtcatattgtaataaaaataggacaaatataaattcatattttctatgtgaaaacttttaatgcatgatcttatcaagaaaaaataaaatcaaaatcaaatgcagaaaaggtagaatttaaggaagttttattgtaaatttcttttgaaattttttagctataaaaaatataatcttggccagaaaaagaaaagctataatccataattatgtaaggattatgttaacaaaaaaagaaagcaggtacgaatggatgaattaagaaacagagagccttatcagacaaaatcataatatcttcagagggcctgatgatccattctccataaccaaaataacaaatatgaataaattgggtgagatgagatcttcttgctccacaaatccttttagaaaaaataaaaataaataaataatgaagcaagatcatgcaggatccattttattagtttttactaatcttgaaaagattaatattttgatgataaaatttacaaatggacctttcttttcttgcaaggcctataacaaaacaaactctgattcttccttaatttggaaaaaataaacataaaaaatctcctaatcttatcaattatcaggtatagaactggaataaatcatgagatcttaatctcataaaatcctcctatgtatattctctaaattaataatgacactgattgagaattttttttaatatgataacataactgattttcttcaaacactatatattttgaagaatacataacactaagaggtatagagaaaataatggagatgagtattaggagttctagtagtagaaattcctcatggagaaacaatagcaatagggtctttgaaaggttaccttctttctcaagaagagaagaagaagaagatgatcttcaatggtttgcacttgaaaagcttccaacatataatcgtttgagaaaaggtttacttataacaacatctacaggagaagctgccactcatgagattattgatattcataatcttggactcaatcaaaggaagagtttgattgagaggttggttaccattgctgatgagggtaatcaaaagtttttgctcaaactcaagaatcgaattgataggtaataatactaataataataatagataatatttatgaaatttttatgtatgtttggatttttatgttaaaataacaatttcagagttggaataaaactacccacaattgaagttcgatttgagcatcttaatgttgagacagatgcttatgtaggaagcagagctttgccaaccttcttcaacgcatacattaatatatttgaggtaactttttccatctttttataaaaatattgaatttttgagctgtgcatttactcccatcttttttttttatgatggaatattattaacacaatattcaaattcattgattcttgcagcgtttattgactcatttacatattctttcaagtagaaagaaacatttgaaaatccttgatgatgttagtggaatcataaagccaggcaggtgagtaaaaatggtcacctctgatttttcacttaagcagaacattcatttctcttagtatattactcaccattggaaacttttcagaatgacattgttgttaggtcctccaagttctgggaaaaccactttattattggctttggcaggaaagcttgaccagaatttgaaggtgaaagaaaaaaagccatgacattattcaccacttagctttaaataatttcctttataaaatgaaaacaaaacttaaaaaccatttctttgcatcagttttctggaagggtgacttataatgggcatgacatggacgagttcataccgcgaagaactgctgcctacatcagccaatacgatgaacatattggagaaatgactgtgagagaaaccttggccttctctgcaagatgtcaaggtgttggatcacgttatggttagttcatttcctcaatcaattttcacccaataaagaataactcccatttgaattctaaagaatatcagtgattttgtaaaatctgtagacatgttatctgagctatcaagaagagaagaagaagctaatatcaagcctgatctagaccttgatgtttacatgaaggtaacaataatattttcaatataaacaagtaacaattcacatgatatgtttacttagttatgctaaggctattctttaacataatgtcataggctacagcaatagaaggtcaagagacgaatgtagtgacagattatattttaagagtaagaatcattaagcttttttttttttcatctttaatgttgttaataagtttttattgaagttgttaatacattatcagattttggggttggaagtttgtgctgatacaatggtgggagatggaatgttaaggggtatatcaggtggacaaagaaaacgtgtaaccactggtatagaaactcaactatacttctatacattttcacaaagttaacatgtgaaatacctaattatggttcaaaactatacaggtgagatgcttgttggaccggcaaatgctctgttcatggatgagatatcttctggtttggatagctcaaccacataccaaatagtgaactctctcaaacaaaatgttcacattttgaatggaactactgtcatctctctactccagcctgcacctgagacattcgaacttttcgacgatgtcattcttttatctgatggcaaaattgtgtatcaaggtccgcgtcaacaagtgcttgaattttttgaatttatggggttcaagtgtcctgagaggaaaggtgttgctgactttctccaagaggtagtctctttcagtacaaatttctatatgtatatatgatattgaatcttacatgttatgcaattaaatctttaggtgacatcaaagaaagatcaagagaagtattgggtacgagataatgaggcttacagattcattactgtcaaggaatttgctgacgcatatcgatcgttcaaagtgggactaaaacttgaagatgagcttgcaactccctttgacaagagaaagaatcacaaagctgctttgacaactaaaatatacggtgtgaaaaagatagagctgctcaaagcttgcttctcaagagaattattgcttatgaaaagaaattcttttgtctacatcttcaagcttgctcaggtgagcaaaattatactaagtttcccatatggtttcgtaaactatatatatgttcttaatctggttttcctatactttttttagcttgcaatatcggcactgattgcaaccacagtcttctttcgaactaagatgtctcataattcagtagaagatggtggaatttacattggtgcattgttcttctctgtgggtgcaactatgttcaatggaatgtcagagatctctatgactatagctaagcttccagtcttttacaagcaaaggaactttctgttttttccatcatgggcatatgctcttccaacatggattctcaagatacctatatcgtttctagaagtcgcggtttggatgttaataacatattatcccattggttttgatccaaacataggaaggtaataaacaagtagaaagaaaatgtcttaattcaatcattttcttcttccttttcatcatgtttaatatttttcaaattaaacatgttgcaggttctttaaacaatatcttctgttagttgctgtaagtcagatggcctccggcatgtgtcggtttgtaggaggtataactagagacatgatcaccggtggcacggtcagttcgcttatgtttctcatgctttttggattaggtggatttgtgctgtcaagaggtactttgacatcaaatactgtaaaatatttttactaaaaggaggtcaagttaataaagtaatccttatatgtttcacttgcttattttcacagatgatattaagaaatggtggatttgggggtactggatttcacctatgatgtatggtcagaatgcattggtggttaatgagtttcttgggagaagttggagccatgtaattatcttaaacaattctaagttagctttttttaaaacaaattagactgattttcggattttactttctcatgatgaactcaggctaaacccaattcaacagaaccactgggaattgcagttctcaagtctcgagctttctttgttcatgcatattggtattggcttggtttaggagcactgatcgctttcgtcttagttttcaacattttttacagtttagctcttacttaccttgactgtgagtatcagtatctatagctcataaactctaaaaacttcataacagtaatacatatagacatattaataaacatgagtatgcagccatcggaaggccgcaagctgttaagtgggaagatagtgagatcaacgatgataatgactcatcaagccacaaaactcagaaaggtaaaatcaattacgtttgtgtatttccttgtgatccagtctaatctaattcaaatgcagagagaagagaggatgttaggagcagagcttctgagcagagaagaggaatgattcttccttttgaaccacattccatttcatttgataatgtcacatactctgtcgacatgccagaggtggttacacacaagtactagtatattaaagttgtattgatcaaaaaattatgttgcctgatgattcgtgtttgtactgatgccacaggaaatgaaaaatcacggtgtcttagacgataagctggttctcctgaatggcataagtggttgttttaggcctggtgttttgacagcattaatgggagttagtggtgctggtaaaaccactttgatggatgttctggctggaaggaaaactggtggatatgttgaaggggatatcagaatctccggttaccctaagaatcaggaaacatttacccgaatatcaggatattgcgagcaaaacgatattcactcgccacatgttactgtctatgagtccttgctctactctgcatggcttcgtttaccatcaaatgttgattcagaaaccagaaaggttggtactggtcctggaatagatggttttaaatttgttttcacacattaattaacacaatttttaactgtagtcaagataaaggccaattgatctagccataatcgtaaatatgctatataacaattgacaaagataagttcactaaaatcgaaattttattgatttcaatcactctatttatttcgtagcagtttgtacatatagtttcaattaatcatttctatatgtttattaatcagtttgtaccttataactattgataataacagttgtttattgaggaagtgatggagcttgtggaactctctccactaagacaagcactagttggattgcctggagtcaatggtctctccaccgagcagcgaaaaagattgaccattgcagttgagctagtcgcaaacccctctatagtattcatggatgagccaacttccggattagatgctagagctgctgcaattgtcatgagaacagttaggaacacagttgatacaggcagaacagttgtgtgcacaattcatcagccaagcattgacatatttgacgctttcgacgaggtaaataacattttacattctataaacatggtttgtgtgttatatgatgattaaaagtttaaaacaagtggttgcagttgctacttttgaagagaggaggagaagaaatatatgttgggccattaggtcgacattcttgccatttaatcaattactttgaggtaagatgaaatcgccaaaaacaacaaaaattaatttttttagtgtttatccgcaaattttttcaaaaagttctaaattgaaagaacatttcacgttaccaagggaatcaatggtgttagtagcataaaagctggctccaacccagcaacatggatgttagaagtcaccacttcagcacaagaaatggctttaggggttgattttgctgaaatatacaagaactcagaactatacaggttggcagtctcacctgattataaatgattacactaacatggattggatggttaataaattaacaaataccgtttatactaattaccatgtgatgatgatgattataacaggagaaacaaagaagccatcaaaggatttagcataccttctcctgggtcagcagaactccatttcccttctaaatattcccagccatttctcacccaatgcatggcttgtttatggaagcagcacaagtcttactggcgaaacccaccatacaccgccgttaggttgctcttcagcactatcggagccttaatgtttgggacaatgttctgggatctgggatcaaaaaggtgacttgtaaaacttgcaattgcaacaaaattacaaaaacattttatctcatctcaactctcatagttttctctacattctctgttcatcgttttatttaacaatgcaggaaacggcaacaaaccttaatgaatgcaattgggtccatgtacgcagctcttcccttcgctggttcccaaaatgcaagctctgtgcaaccagtagtttcaatagaaagaacagttttttacagagaaagagctgcagggatgtattcaccttttccctatacattagctcaggtaattaattaacaatataaaacttgattaagagattaaaaacacttcttgattcattattcaataattgaaattcaatttccatgacaattatctgaaattcatagcta

SEQ ID NO: 13983 - DNA, 6767 bp, Cannabis sativa
agagagagagaaagaaagattgatttatgacacacaaagctccaaaacaaaaagcccaaagcccaaagagataccttgaaagcttttttatggggaaatgagcaggatcccccagaaatggaaaccaaaaaaagaaaaatgagactaaaaaaacgaagccaccaactaaaagtatcaaaatatacttttaaagctcaaacctttctccttgttgaaaatctagtaatcctccctcattatagaactcagttaaatggggttgatgggatttttctaatttaattaatcttagtgggcacagagcttaactcttgatctgcagacagaatcatgggatggatcaagtctaagttcaatttaagtatctggggtgagagagaaaaagtgaggagagagaaattaagaaagagaaaaatgatagatttttgtgaatatagtaatcaaaagagtatggaagccataaactactcaatagcacatgaaaactgatcttgtcaacatggggacaaagccactcaataagagatgcctgaactagctcttaggctctatctacagtagctatctactttcttttcttctacttgtgttacacttcaacaaaaagcttaatctttactccatagccttaagctcaaggtaagaccaaaggaccatgatgatgatagaatagaattagttaccacagttttgtgttatccatttgagctttttagtacagctgtaaattttgatggtaagttattacttttgtttttgcaaattatgttaagaggaaaagaaaaaaaaattaaagtcacaagatttcttgctaaaagctcttccttttatttcaccagaacacccacattaaaagattctttattaattaaaggtagattaattattttgttaccgttagattagataggtagaatattctaccacaaaattaacttgtgattttaaaattcatacataggcttgtcattaatagcaaattcattgcaacaaaccctatgctaatttttgcttaataccaaattatgtaacatcaaataattagtgcaatataatatcaaatctcacgtctaattttaaatatacaaaaacgaatatcacatcataccaatcatctatgctgcatagtactggaccaccccatgtataaaaggtaaagattcagtgcaagaaatataaaatgtttatttactaattttatttaataagcaaaatattaacataaaaaaatgtctgacaaagacaaacccttttgtccataatctaaatactcttgtagaaagaaacccaagcatagaaaactaaacataaatggcacaaagtgtcatatttattccaaacatatatactaagatagtagatgaaatatctatatactgttaggtaactagattagataggtctttctttagcttaggcaccctctccattgacaagatccatcactacccgcttgatacttccattgttctttacaagaagttttctgttcgtttcagtgtcacagaagccctgtaaaaaaaaaagaggtcagaaagaagcagcaaactagtaatgaatgaaatacaaaaataatggaataacaacagctggacaatcttgagagaattggaaaagttgttaccatttctgtcaactcctcaagaatgggatcccactcagcaacaccacaaagatcatccagggacttctccagatcgtatttattcatccgcaagatctctttgtttagctctgtctgcctaaaccccatctcttgaagttcaataagaagattctcctctaaggtagcattgttagagctgctgctcatttgaatagcagctgttggattaacaagagataatgaagacgatggcgcactgaccacgatttcagggagtggaggcaatacaggagcagttgtggaagttggtgcagttgcatcctctctcaaatcaacaatcggataagacacagatggcaccacctcagttgtgggagttgcaggttccaaagctggtgcagttacatcctctctcaaatcaacatttggataagacatagatggcaccacctcagttgtgaaagttgcaggttccaaagctggtgcagttgcatcgtctctcatatcaacatataggtgagacacagatgactctgcctcatttgtgggagaaattgtaacaccttgatcaacaaccagcaagctgtcattgatgggaaagttattctccagttcatctttaaaattccatccaaacacgggattagcttctacgggagctgaaacttctacaggtactgaaacaccaccagtgaaagatgtcgaccaacgcctgagaaggtcaggctcagcatctgtatttagatcaaatttgactggttgagagcctctgtcgccactgattgatggaggttggtctgaggccacactttggagacttgaagataaagagtccttcaaagaatcatccacctgcaagagtaaacaaaagagatagagaggcatgagctaaaataaagccttcaaatcaaaatctgaataagtacatcgaaccagaggattgctgactattcaaaacataacttagtagaagcgtacctcaataagaacccaaacacgttgcccgaacttctggccagtcggagaagccaacatccagtatgagatgtatcgaccaggcattttaggtgcagtaaaatcagcagcaatgtcaagctcattgttcagaggaacaccgtcggcaggaatctggagatggataattttcaacaaaaagaaataaaaaaatatacattacccggtaaagaaccaaaaacacagaataaaaagtagagaactcagcaaaacataaagcacgacacaaagttatagatcaagtcatacacacctccaactccaccttagtagaaactgcaataagttctcctccaacgcatacaagatgggttccttgaggccacactgcaccaccattgttctgcatccgccatattttggtaaacggggtatatggagccatcagggtaccatccgccacgttaacatccaaaacaaaacgactgtcaagcctcctgtcagacttaataggtctagtaattggcttacaacctctcagaatagaagctctgcctactgtttttggcaactagagaaatggagacacaaataaaagtactgtgaatttacagcaaatgtcaaataaaacagtgaaagaaaaattagctagtatatgtgcgtacattcacagaaggtccaagaggtcccttgaatagccgtggatggcggaaagaaactgggtggtcaattcttacataatctgcttctttacccatttctgaaaagcaattactgcagaggtcatagtcttctttcctgtacaaaacaagaaattgaaaacgttaactaagagggcagcaataattaacaatcttagcattaaaaatcacagctatatcaagatacatacacttgagacttgtatctggttccggttataggatggacaccacagccatcacagcgtatgcctctatgatatattccaccactcatggtttcagcatgatttcttttaaatgagtggcaaggacggaaggcggcaatatctgcaacaggtgctccagaaaaggggcatccatagacaggattaacatagtgacttgactgacttccggtcacagaagagcttgaagtgacatgctttttcgggacatgacttgaagaagcaacaggctttgcttcatcactgtttaccttcttcttcttcttgtcatcatcagcaccaacagcagctgatgtgcacttcacataagtagcctcagatgcattacaatcagcaggatgtttattaagatcaacaaatgaaaaatgagcttgatggttatttgggcttgagcaggacttagagaagtgcggcttctcagcagcaaatggtaccttggggatctcggccgcctcgctgtgtgtgctagcctctccaacagaaggagaggctgaatctggagttagaaaacactgccccatcttcgagaagaactcaacaagctcagatgcaactggacttacagatgcaacttttgaagcaccatcaagagagagcttcaaaagtgctgccccaagtggctctggaagatttttcaacttttcagcaacatcattgctagtattcgccaaaggatgccgagtgtgaggagatctcaaaggtgtagaacttccacttggtctagcatttgatctactagctttgtcattgttcaggtgtacattaatcctcaaaaattttagcttttgccccatagcatcacgcagatcatcatcatcaacaagtgatactatgtccccatcttcatcgacataggtcataaccatatcagcatcaaggttaaaactaaacagactagcaactttacccctcaatccagccatgtcaagctccagctcatcatcctcattaaccttagcattaaatcgtctgagtgtatccccatacttaacctgcaacataggcaaaggagaaagttattgatatacaatatattaacaattacttgaagaagatatcaaacacaacaaatacgaaaaaaagttaaataaagaaaacaagacaatcaaaaatggggataaaaactattttgcaagaatattctcaagcttaaatttttctgaacacatgcgtataatcccaatttataaaaacactagtgtcaaacattaaaaaataataaaaatatatatatttacaacacaaataaaggatgtaaaagcacagaaaaactgattataacatgaagaaatcaatttgtacaaaactgaaagaagaaaaaaaattactttcagaattcatgagccaatttacacagacaaaaaggtataccctgttggtcattgtttgaattggaaaaggaaaacatagacatggacataaaatactagacaccctaagagtggccttgcaaatcaaacatctcatttagaccttccaatctctctccacagtctcttgactgataaaaattgaagcttgcgtctccatctatttgctttccaatcacagaataaaagaacaaaagaagacaaactaaacctcactctttttttttttttggattaacaacaaactaaacctcactcaaaagccactatctccgcaaaatcaaaaccaaaacttttgagataattaaaaaaaaatcacttttttccaagttttttttctcgatatgcaaacagaattaaaagaaaaaaaaaaccatcaaataaaaaattaaaaggacttaagaaggagaaaaaaaaaacaaaagaaccaaccttgataaccatagtcgacgccataacttcacctcaaaacagagaaagatgaagaagaaatgaacgtgatcacgcgtcctgtaatccgcgaaaaccagagaagaaaccctaatggatagaaatcgcacaattctaaactaaaaatgggattcaaaattatatgagagaaaaggggaatggaaaatatatataaattgggtaactccaaatttcgttggaatttacgaaaagtaattataaaaaaaaaactcaaaagagtagacaagcgtatccgtaaacccgctctgatcgcctctataacttcctaagcaaaatatctaattcaaaaattaatttttagttatgatgatattattaataaaggtaattactctttttcttttttggaaatgaagaaaaataattaatttaatttaggaatatgtatgaatgtgttttcgtgtctccatataaacctcactgctctctcttactctctttggcttagccactaagaaatttgcttgactttttcttttcttctccaaaacgaaatccccttccatttctattttcttctccaaaataattgtacaattcctcaatcaattctaatgatttttaaataatacacatattttaggaaaactttccattttttttattttattcgcatgtaaaatatactatttaaatatgcttactataaaaaaaaataaaagattataactatttaaataaaaattaattaaaatatttttatttttgaattttcacatgtattaaatcatatctttaaattttaaagacccataattaaaaatttaagagtataatttagcaaatatcaaaattcgagagatataatttagtagatattaaagttggggagtttcatttagtagcaaaaaaattaaaaaaacataatttagtatatgtcaaaattcaagaaacaaaaatcttattatattttatattaattttagtgggttaaatagctttccatagtctatttttttacccgaatttttaatactacttaatgagtaaggtaccttcgaccatctgtcattaaaaatataaatgttaaatttacaaacaaaaaaaaaatctatatatagtatatataatatataatattataataatactctcttctctaacgcatctagagactagatctaggtataaatataaattgaacgaaaataaaattatatttgcatttatataattaagagtgtctttgaaaaaacacaatatagttaaattttagaataattaaagataattatttaatttaatgtaattaggagtaattgaagattctaattaaattacggactcaattaataatcatcaatcaatagtaatacacaatctatatctatctatctatctatatacttatataatgttataatgttgttgttaaggtatgtgaggtggcggattatatgactattcttttaatttttcaattttctcaatttttctc

SEQ ID NO: 13984 - DNA, 8564 bp, Cannabis sativa
gttgttgttgctgttgttgttgccgctgatcattatatgggtggtaacgctgcaactgttgcggcataagttggggctgagccggagcctggttttcctgaaagctctgaagaaaagtacttggaggttgggattgtggtaacatttgcctctgaatcaaagcagcagacccattagaaacattttgagattgctggaatggcagaagagattgaggtgaacattttgaaggatccactcccctcatttcctgaagtgcagcagcagccattgcttggtacacatcaggttgtagacctgccattgaagcatcaagccttggctgcatccagggtgtaatcccaagtccctgaaaatttaatgactgaagcgcgggatctccaaccccaccttggagccacatcaatggagagttcatgctcatatcaccatctttaagagctgaattgaacattaaaaacaatattagccaaaggtaagaaccaaccatgtttcttttcaagcttcagataatatcaaccataccatggaaagagggtaatcctgatggccatggtctcttcagtctgagaggaaatggggatggatacattggaaatgttgttaatggctcaatctcccatagcgagactcttggctgtctctctccagcagtagattcatcccaaccaacctgcattaataccaaaataagttatcgaccgcatatcatgtaagttgaactcatagtggttattaatcaagaaatgagtttgttaaagaacaatcaaatgctttggcaaaccttcacagagcgccaatgtgaattcggccagcgaacaggatccaagtcactaatgccagtaatggttcccatgtacctggcaacaaatttgtaatcacccagtaagtactcaacagttgcagttgcataactgcatgtaatgctatgtaaaaacatctaaagaggagacatatattaaattcccaatgagcgtaaatgttaatataaataccacaacttaaaagacaaatgaataatttcagagcaattatgggtatctgatttccgtaaggattatattatagcaacagaacactatacactgggagacaggaggcagggaaagaaatacaacacccacttatgaagtgattctacagaaatcgtgtgccttgtatgtctgaaaatattgtggcatttttatatttaattaaaagtgtaaattagtaaaaagagcggcaaggtgaacttaaatttatcatattcatctacaaatgtgataagctcaagaggaacctcaacccaccagacaagtgtacaaaagtttagctaacaaagaaacgtcttctccaaatctaaagatatcttcccatgccctaaccccaaaaattaataaaataaataaatattcatagctgtaaaaacaaaatattctaagaaagcaatttacctgttgaaatatgaatcaaagagagtaacaggattgcaaacagaggaggaagtattaattgtcaaccacactaggaatcaaaccaaaacagtagagagctaagaaaaaaaaatccagaatcacttcttaaacaacatggcacacctctaattggaaagatcagcccatccaccataagaataaagagtgtatatgtaaccaattaggttatcaaaaattaagaacaaaaatgttaaacaatttttcagaaaacaaaaataacagacaatagaatcttaaaatcattctccaaaagaaccaagataatgcaaaatgtataaaattcatgagcaccaacctacgaacactagactcttcagtctcgaacagcatcctaaatcgcatgcccactgaaacacgtgtgtgatagacagcttttacatatttggccaaaggtatgacaaattctgacggactagccctgaaaagaatacaattggaatagaaattagtagcatccttataaccatatttccctaagcaggtccagcaaatactctgttgcctgggaggtttgatgaaaggtaagattgaggataagactttcatccacttaatcaactatacactgctgtctaaagaagttcaaaattagcacagggagatagtcaccttggattataaaagattgtaaaacgactgtttgtggcagctgcatgtgcagcagcagcaagcagaccgatgtgcatgctatcactggataaaacagatgagggcataacagtttgaggacgattagctcggcggatacccaataatagctgattcttttcattcctggtagaatacaattcatttaaaggaatttataaccctgaaagtaatatatataattatcaacaaataagaaacagaatccaggttctatgctggaaagcccagccttccaaactcaaggtggggatgccagtctattctgaggttatgaaaaatatactctatcacaatattctctataccctgcaaaatactggcaattatactcagttgcacaattcttaaatgaatattgtgcataatatagacttggaaacgaattgatataatctgagaataattactgatcagaatcctagatttcctagtctttgtcaagtgccaacttaaaaagagtcaatccaaaatcatataacagaaaaaataaaataataggaatatccaaatccaaaccagataaaaaggactgaatctccagcaacaagtctctttgcgctaacaaacacactccatcctgttgtaagaagatgccttttgggctgacctgctcatttaacacataaagatcaaattacaaactaaaacaagctggaatcgtggatctatacctgaactgacatctcatatttgttaagaatgaaatgcagaatcccataaagtctatgttaaaattcagttaagacattgtctatccagatcagaatatgcctgtactgaagctcaattacatgttacagtaaatcttgtataagtaagacaaattaagtaaaaacaaatacttcttgctacttgctacaaaaccttaaggctatgtttggtagagtaggatggatggagagtttaggaaggatgtagaatatgatggatagagaggatagtaactctcatttgtgttgtttggtattaggagtaaagttggaaggatggagaggaagctagtagttaaaattagcatagtattctttttagtataactatttattagtttttaaaggataattttggtatttggtaaatttattgtctttttctgaagtccttcagaagaggaaggattaaaattttaggatttggagagagaaggtctccctccaactctcctctcccgtcctttctccctcctaacaaacaatggattctactacattcccccttcaaacatagggcaagattattaaatgataatcatgtgcactgactcaataaaataaataaaataaatcaggaaagttgagtaatttggactatcaattattttctaaaagcaaaaaatgcaaaaccaaaattgtaaaactttgggcatctatgtgttaaattcacttgggcaagaccccaatgtgttgacttacctgagtagacagggaagaggaatattaaagagaaaagagaacaactgaagaatttggttaatcccaaggggtggtctagaggtaaggagtgttagaatgtgcttataggcatttgttccaaggttcgaatccccacagactaaactccttggggccacatgggggtctccagtcaaatttcatgaatttcaaaattcatgaacgtgttcgtactatcaatgcatttgatattcatgacaggttttaagtagtcccaacagaatactggcaagtagcttcagaagcctcgcacgtaataatactagtaaattaatagtaaatagtagcttttataagatgtactacaaagtgctgcttgtataaaataactaatcaaatggctgcttagatttgtaaatttcaggaaaaaagaatttgcatcacaagatagtgatgataacaagactgcacctaacctaacaatgatacttgacaattaaaattactgcaacatttcacattttctatggaaatatattagaataaaaaaccaactatggcaactaaaaaatgtcaattaaacagctcaggaaaaaataaacagcataaattaaatgcacctcgaaatatatgtctaaacttccattcgttgtcatgaagatcccttgcaattagttcttgagctgggggctgctgtgtataatcctaaagaaacaatcatagaaaaaagtgattgatgaaccaaattcacaacacacaaaatcatataaagataaataacctataaaaaaaataaaaaaaaaaacttgttccagctaaaaaatgtacttacaagaggaggaaagactttttctgcagcccgccggggaacagagaaacctccatgagtgctagtatcactggcagtcaaagtcttgcagaaatagttggttggctgtttactaggagtacccaattctgcaggcaacaggtacacatccttttgctcttgctaccgaaagggaaaaaaaacaagatgtattcatcaagaagtgaagacatgaaaaataaacaaatgaacatcctcaagcaagggaagtgatgtactgggctcaatggttgtagggtcatttgagcatatacttcatctgtttccacatctgcctgttcatcacagaaacgaaacattatgcaagaaacaagaagtgcacaaacacatacagaacatagataaaacatttacactcacatgcatagtcacattgtgaagttgagaaattaactgtggtggcaagttcgggtaattgggtatatgagcatccacttccttgttagttgaagcagcaacctgtccaggaaatttcagggattaatagcaattaccgacagcataaaagaatagggaaacaagcagagcacccaagaataaaaagcatttcggccgttactgctagaaacttaaatcagataggcaagaacaactgtcttagaaacacttagacaccaccaaaggctttaaaggaggtaacttgtgaacgatcttatcacatataactattttcattccaattttgaaagtataagtaatccaaaagaaaaaaaagataacaagatttctgatttcataaattccttcaaaagcagcctaacttaacccacatcttagaatacataatgcatacatgatcatcttactaaacgggaacaaaatgaatttatatctttaatatttcatgcattaaaaccagtcatagggactacataatttggagctactaaaagatgaaaaaacattcgtaaacagcaaacggatcaaacattttaattcaatagacaaactcttcaacacttccttgcaatcaagctttcaacataaatgaaataaaaatctttttaatttttgtaataaataaatggtaaagttagtgacgttataataattaattgtaccaacctgctcactatgaccctgtggaaaatagactacacgactaccaacaggtggcagagataccagtggacctgcacatgcgtgccacagctctgaattcaaacatttcttctcccctgcacataatttccacgaaggcattaatatacatgaaaaatagatccacatcaataaattcccatcatttcaacaattcacaatgcatacaagtcgcaattaaaatccaagctacgaagcatgataccctcaagaacattaaaaaaatcagagattgtttctcaagcagacacaataactcatcctcctgtagctgatctatccatttttagataaaccaaacagacatgaggacacaagatataacatgaataaaggtataatgaaattcaactactccaaacttatatcctttaacaagcagacacatgcatgctaacaataatacataaataatcaacttcaattaccttaaacaagctcctaagaaaaagaaaaaaaagaaccactaacagaatgtcatttcaatcaccacaaccatagatgagttagtaacaggtcaactccaaacattatagaattatgcatgcacaattaaagacgcctcagaaacataagatcaccgtcccaagtaaatacatacaccagagaaagaaatgacaaaaataaaatgaacataacaaaggactaaccttcctgagcctgatgattaaaccccgacgaggacgacgaagaagagagtctcattcttcaccaatggaagtaagagcagaacaaaagggaagatactaggaggattagctgaaaccacctgaagcttcaagaaacgaactctgaacaaaaatcaaaaacagcagtcctctttcttactcaaaccccccattaagcaaatatagaagccatcaaatgtggtgattagtaagccgcccccccacccccccagctcaagaccaaaaaaaccaactaaagagcccaacaatatcatccaaaaccagtaccaatacaaaacacaaaccccctaaccctcatagagccagatcttcaccaccccaaccctaaacgccataatcaacttcaactaaaaaaaacaaaaccctaaaatccgaaacttccctccaaaacaaaattcgcagctccaaccttcaactgcaacaaaaaccctaaaatccccagatctcagataccgaaacgcgtaaaagaaacgagtaagcactcgaatcaagtacagtagtaaaccccccacctttgtgatcgataatgagagaagcttactgagctgaaagtggcacttctaggaagctaaagcactctactttgtgggttcggatttgactatggacagagaaaaactttgcctccgtaactgagagagactggtttgttctgtgtgtgtaagagtaagaaaaaaaaattaaaaaaaaaacaagagagagaaagtgaaagagaagagaagagagattttcggtggtgagctttattggtcttcgtttgaaggccttgtttggtttggtctaccgtcaattaatacagtggtaattattgctggctgtcactttttttatatttatatatatacaatatttaatattataatatatattacatgagaaaggagagatggacagaaagtttgaggtgtggggtaatgtctatagggatggctgtcagaagcaataataaataaatatacttattttaattttaaattataaaatatgaagacccaacttccaccaaaatctaggacttgatctatttctttcttttttgccctagatttctttctttggttttttttttaaacaaaaagaaattgtattacctacctagctgtatctatcgaactaaattatttatcatcacaattatgttctttcttttttttctatttttgtttctatttgtgaaattttattttcattcaagaaaattaaagaaaaaatgaaattatccttttgggatttctaattaaatgaacagagatcattgaattattgcttgtacaaaattgtaaaatgaagggtaaaattattagtactgttttcatccttatcttgttatcctttattatttgagccagaaagattttaatgggtaccaaagttttgactcttattttttgttattctattttctttcttaagttaatgaagtttttttcttttactaaatttcaaggaagtaggtacagaaatatgtatagcacaaaaatttagaggatctgtttgtttgtttatttattaaaatttattaaaaaaaaaaaaaaagattctaatgtgcttagattctgataattatttaggatttttcccctttagctaataaaaaattgaaggctattataagaggaaaagtaatgaaaatgacttgggtagccatttatatatatattatgaaattgaaagacttttacacaaggtttggcaaattttgtctgaagaagaggggattgaaaaacagaattataaaaataaaattatgaaaatgttaactgtaacttttgcataaaagcttatgattttatttttaactttttgaatgcaacttaggattttatgatggaagcttgtctatgtttgagcttggtaccatactgtgcccaaacatatgtaatgatgcatatatttttatattaattttatatatttgataggtcaatgtcatcatatttagttcagcaatagcatgatgtaagtactatctgggtggactcaaagcaagattctgacccaatgttttttcttctttcttcttttcatttacttatatttttatatttcatcaaaacataaaatatttactgggaagtcattaaattcttctcaattttgtttattgttctagatatatgtttttttgaatgtgctcaaattaattacattgtcctattattcaaaaaaaaaaaattatttgatctatttgcttcattaatttataggagaaaatttttaattttttattgtttaaaataaatttattggcatgaacagtaagaacatgtaactgagtgtcaatgtcactatgagagaatctctttctagatcttgtgttgtgtttatattgtgttatatatttattggtgaaataggaattatgtaaaaataattaacttgtatattt

SEQ ID NO: 13985 - DNA, 9952 bp, Cannabis sativa
aaaactacatgtaaacagaaatgacttctaatcttctattgataataaatcagattagatcaaaatgggttttatttagggcataaaatcccaacaaaagtatgtttgggctttggctaacaaggaagacagcttgtggttgagatagattaatagtgtgtatttacacaatgaggactggtagagctatgcagaaccaagccaagctagctggtattggacctgcatagtaaggctcaaaaagcagttcagatctgctatgaccgacaatctaaggatacaaggcaaatacacagtagcacaaggatacaacctgttctatccagtaggggtgttcataaaaatcgattaactgaaaccgaccatcaaaccgaccagaccgtaaccgaatttttggttccacgtcatcaccgaatttggcggttggtttcggtttcgattttattgacatggcgatcggtttcgatttttgaaataaaaaatgttaaactaaaactgccaaaaccgccaaaaatcgcaataaactgcccaaaactgtcaaatcacaaaaccgccaaaatccgtacggttagttttatacggttataatttctaaacggtctgttacagacccagtttttcgtaaaattaaaatcgtaaccaaccggtcagttataaaattgtaaaaaccgaccataacaacccgattttcacccctactgtccagacccaattaaagtgcattggagtaaacaaatttgggggagactcaataccccaaaacatagctttgtgttctggttagctatacaacagaggctcaagacaagagatcgattggctaaaatggggattgctgcagatcaggtatgtatgctatgtagctcacaacctgaagcacactctcatcttttctttgagtgtccaaccactcaactttggttacaaagcatcaagagctggctgcaatggaatgtttaaggtaatactttaactgtgctgattcgatggctgggaaaagcaaaaattagcaagttcagaaaactggtgctagctgctgctgttgccagtttagtatatcagatgtggaagatgaggaacacttaatactgggagaaagaagcacctaacagcacaagattgtgtaaagagctgaagggtggactgaaacaaaggatagatttattttggccaaaaaaggtatctagggaagacaatgtttggtattcaacactgtaattgctgtcattatttctttttatttgttgtacatacaaaatgtatagatacatattataggcctgaaaattcgggtgctattaggatgtaaaagtttttgtgagctaatacaattttctgattcataaaaaaaatgaattttgaatatttttttataatttttaaataattataataggtctaccaatataaatgcgccatgtgtacaagagtgtacacataagtttttgaggtttggtaaatatggatacgttggctaatttttgagtgatttgtcattgccacgtagtcaaactaagcatttaacggagttgtgtggatgacaccttaaaaaaaaaccagaatagtactttggagggttttcccaccaaaatttgaggttggagggttaattgcaagtgaattgagagttcagggggtttagtcgcaaattactcataatatatttttctctaaaaaatacttttacattttaaaaaaaacttctctctctaactctctcactcttcggcatttaactctgatctagaacccttgtcgtcaacacatagtcccaaaaccctagtcgcaaggcccccttcgtcgccttctctcacggcgtctctcgtttttttacattttttggttttcaatttttagtgtattttacgatatttagcgatgtatttacaatgatagaccaaatttgaggttatggatatagtttagcgatgattagtgatatttggccatgttttatatatttagcgatgatattagtgatgtatttgtgatatgagactaaaaaatgcataacacatcgctaaaacattgttaattatcgtggaaacttgaatgtgatttcacgacatttagcgatgtgttaagcgatgttgtgaattatagacatttagcgatgttttgggatatagtgacatttagtgatatttcgcgacattgtcaaaaattaaaaaaaaatgcaaaaaacaagcgagttgagaactcgatcgattaaggatttcagggtggttgaactcatgaattttggggcttcgaggtggagacaataagactcagatagagtgagagagtaagagagttagagagggagagagtctttttttaaatataaatatttttaagaaagaaaatattaaattataagtatcttagttttacttgggtagtatagtatattatgctaaaccaaatttcctatttgtataaccctaatttgaataatgagttgaataatggcctacgtagtcaccttgctccacaacaacaaccatgtaaaataaaaccaactcactttaaattttttcttcttcttcttcttcttcttcttcttcttggggattaagttaagtttcggaaccgagactcagacatggcgagacgactctatcttcttccccaaaaactcatcttcacaacctcttccattccccaaaactcacgaccacttcctctttcccacttcttcagctccgagcccgacactgaagcttctgccaaccttaactccggagattcgatggctaacctcagcagagacgaagaacgccttgaaaaggttcagaaaattcgacatcttctccaacaaggcagtgtggatactgctcagaggctaatcgggtctcttgtttcctcaaaatctcatttttcttctccctatgatctttactctctcttatctatctccgctgcgccttccatgagacctgctttatcaaatattatattatcggcttgtttggaatctagaatggtcgccgaagccatggagttgtatggtttggtgaagaaagatggtgtggttccttctttgaacacggttcatatgttgtttgagtctctggtgtctacgaaacagtatgggaaaatgctcgagttgttttctgagcttgttgattcaggtattcgacccgataagttcacgtatgggaaagcgattcaggccgcggttaaattgggggtcatgaaaagggctatggagcttatgaactacatgaagacgaggcatattagcccttctgtgtttatatacaatgtcttgcttggtgggttgtgcagagagaagagaactaaggatgcagagaacctgtttgaggaaatgaccgagagaaatgcagttcccaatttggtcacctataacacgcttattgatggatattgtaaggtgggtgaagtggagaaggcttttgatttaagagatagaatgaagagtaaaaatgtggagcttaatattcttacttacaattcattgctaagtgggctttgtcgggcaagaaaaatggatgaagcgaagcaacttttggaagaaatgaaagctactggtttggtgcctgattgttttacttatagtgtgctttttgatgggcattccaggtgtggtgatagtgaggcatcactagctttatttgaagaagcaatgaaaagaggggtgagaattaatcattatacttgtagtattctgttaaatggtttatgcaaagatgggaagatggaaattgcagaggaggttttaaagaaactaagggaaattgggttggttctggatgaggtaatttataacaccatggttaatggttattgtataagaggtgacatggaaaaagccatttctacaattggagaaatggaagttcatgggttgagaccaaattgcgtaactttcaattctttgattggtaagttctttgaaatgaagaagattgataaggcagaggaatggattcagaaaatggcacaaaaaggagtttccccagatgcggtgacatataacatctcaatcaaaggttatggagtaatgcgcgaattcgataagtgttttctcattcttgaagaaatggagagtaaaggggttaaaccaaatgttgtaacttatggttctgtcataagttgtttatgtggggatggtaggctcctcgaggctgaattaattctaagggatatgatgattagaggggttagagcaaatgcacagatatataatataatcattgatggtttgtgtaatgcaggaaagttaaatgatgcccttagactctttgatgagatggtgaaaattggtatacgtccaacacttgtgacatacaactcattaattcatgggttttgcagaaaaggaaaattgactgaggctgaaggcttgttttcccaaattccaattagcggatatagtcctgatgtcatcacttataattccttaatttctggttattctgatgtagaagacagtgagaaatgtttgcagttgtatgaaactatgaagagagtggggattaagcctacactaaaaacatttcatcctctaattagtggatgcagtaaggaaggtatggaggtagcagagagagtatatcaagagatgttagagcttggtttggccccagatcaacttatattcaatgccatgattcatggttatgcagagcatggtgatactcaaaaggcaactgctctgcatactgagatgataaacaagggacttcatgttaacaagatgacctacaatagcttgattctgggacattttagagaaggaaaattgtctgagataaatgatattgtcaatgatatgaaggccaaaggattggctcctaaagctgacacctactatttacttgttaagggatattgtgaacagaaagactttagcggggcatatatttggtacagagaaatgtttgacaatggttttattttgaataataacatagctaaggagcttgtctctggtctttgccaagagggtatgttgctggaaagccaggttgtctcctcagaaatgagcgtcaaagaagaagatgattgcagctttaatgaggaggatctttctactgtttctaaaatgtaagacacaaaacttatctaaaaagccaaaacgatcaattaaactcgtgtactttcctttcctttcattcactatcgggtgatcgtgttcttttgagctccattatatttgattaaatgtgaccgtaattacttgaagatgaagttatttgtaatttgtttcaaacactgtgattttgacatccatatcatgtacttaaaatattgtttctatttccctttaaccattgacctccgatgcatgaaggtgagttgattccaaacatggttggtgggaacttcacactttgcagggtcactgttctgcccgtagacccggtattgaagaggtaaatgtgtatcctctcactgttatctgatccatgatgctcttcgtgtatttactgttttgtttctctttattattatgttcttgaatgtagaggacaaatgaagttcacttttcaaacatttactagttcttatgtgacatggttttcgattcagtatagcatggacacaaatggctcgcaaagtagagtttcgttcgtgtcccgcctaactagttcccatccgctaacataaacaaatagcccctttttatacaaaagaacagcattgcttaaactaccatacccatctgctatatatgatccgatcccaataggctaacaacaaattctaatttactctctctgatatgatctaaccttctgagcagtagtatttaacagagaaaaatgccagccatttacaatagaacagtagtataccacaagaattagccagaaaagagtagtattactgattgaaattccagagcagaaatgtaacagagaagtaatggtcctttctgaccaatgatgcagataataaactcagtgcttgcatactcactttattcctttacttacctatttacactatcctaagccaactcacccactgtccttccatacaatgatccgtaccttttttccctttatgtgctaacacacggtaacaattctaggatctaacattactggctcaaatttcactttgtcctcgtggtgaaggatgttaacactcaagtcacagctccgctcgacctctatcaaagaaccatgtcagtaatgcagtgccctccgaaggaaaggagcaacccaattggagtgaacaatcgagtctgtgagagaaatagctcctcaaagcatattgaccctaaccaacggaaatgaagtgccgcttgagctccctgtgcaacttttgccaccaggatacatagtgaagcccgacctggaaaatatggttcttgtccctgttgggcgtgctcctcccctctatcaaaaatcatccaaaggaatttgagcatttcctgtggcaataacactaggtgttgctcatccgaaccccgtaaacccaaactaacatgaacaagaaagaaattgcatgtgaccttgttgcagactgcttggtttaagcagaggagtggttagagtgccttatctattataattaagaaatttttataagcatcgaatttaaattaataaattcttgtgtttgtgttgtgcattaattttatatttaaaatgtaaaatttttgcatatacgaacgagtcctttaattcggtttaaagaaattaaattacaaagtacaaacttttagcaggctaatatatttttttggttacaaatataaattttatctaattctaaagcatgttttattaagttgtaagtagttttattggcatccctcctaaaatgagagacaataatttcaataaataaataaataaaagtttgacaacttctataataatatctttaaaagtagaatgggagtaacttcatttagattagcatgaaattaggaaagagtaaactcttgtgtagagaccaatcctcacgaaagattaggaatttggagagacgagtctcttgaaagctcagtattatgactttgtcactgtcttttcaaaagatttgaagagatggacctttcagaagcttgaaattttaactttgttactgtttttttcagggttaagatcacttgaggaatttattattggtgtttattttggaaaatagttgttgattatttctattcttgattattctatcagcagccacacctgttttacgatcagcaagatacaccgctgcatcaacatttaattttaaacccaaaccagcaggcagcttccaaagtccttgagcagtagggacagcagcagcgggaatcaaaactgggtctggtggcgcacaagctgctatatattggagcacgtaagaggcggcaaacgatgcaagagcagccgctggccttgctcatcgaccatgaacagccacattctgttctgtccagatataccacataataatagattccaattcagctttgaaaaatgaagaagacaaatgtaccaagtagtcctcatgaaccattgagtttgccttgtgaaaatcaaaatgatagtctgaatgatttcaaaaagcaattatttatatattaatgaaagatagtgtaaatatatctttggtctggtacatacaaatttgtccttaaaatgccatttgttgctagtgtacgtattgaaaagattgtgaaagtagaactactggtcaattttagctatgctcaaaaatgtattgctgaacatttcataagagaattagaggcagaaaagagaaatacattataactgtagactttatctcatttcttactttcttttttctcaaacaattccaaggaaatacaaagacaactacaaaatttcacaattacaagcaattcactcaaataacttcaacctacttgggtggtcaaacccagaagattttacttcacttgatctttttccccctctttgtgcttcatttcatacaacatttcctttttgtgttttctcgttacttttcttgaatattcacaagagaactaacagatcttcgagttcactaactcgaaattttatgatgaacttgaaaagaatgacaatataattttttttttccctttttcccccttcttttttacatgctataggagacaactcacaatttttaaaaaagcagatattatgttggtgaagaaaagtatgtttatgaaggcacatggctaagagagagatcagaggatacttgatcattgatcttattattgggttccctattaagagtttgggacaaaggtgccaacatatccaaaccccatgatgaaaaaggctattgcttgtacgaaaaggtaaatgaagaagtggttcttgccaaagagaacatcataacagccgcagaagaaaaggtaaactcccaccccaagctctagcaaatgaagcctgcacacaatgcaatcaagtttgcaaatgtaaactacataatcatagctctattactaaaatgcattacgcggttagaaagaaacaaatttctacctttctccaatcttaaaccgaggttttttcggtgtttttgatgcttttcctttgagggcatctcctagtttttcagtcacaacccattcattcactctgctcgtctctagaagaccgatgatagtagccttagttcggtgtaaggacatgacattctcaaaaagaatccagaaaactattaaatggagtgacctgcatatagttatggagacaagcaagccttgagtttttcagaaataatcattgaacagcaagaacagagacacagataatcatactgagaagggtttatctcaaaagttcagatacttgtactaatctaatatgaagatgaataataagagctctaatggagagttgaccttggagttccaacagcattaagaagggtaatgattgaaggaatatatacagctccccatttaggaacctgaacttctggtacaataacagttgcaggcaaaacaatgcagtaaaagatgaacgtaatgatatgcgccacgatcttcctgacaaagaagaagctgtaaataacatgcaccttcttccaggttgtaactttctgcaattaaaacaatggatcagttaaaaagaagaagagtcattaatatccacactacatacattatcaatacaatctctctcaccttgttctttataatctccataaccattttcctgaaaagattggctggaccacaagaccaacgatgttgttgataacggtaggcctttaatgtactaggcaattcatttttaacctgagtaaatatataaatatatacataaaaaagattagttcatctaacatttcttcccaaagggtgtctaaatttgttattattaatacatttaagcaccttaagattactaaggtagacaaatttccaccctttaagactagctctaacagctaaatccatgtcttccactgtggtccggtctttccaccctcctgcctcattcagtgcagcaattctccaaacaccagctgtgcctgtttcatcaattacataaagagagaagttagctcatataattgaattgctcctaccattattactatccacacacaccaaccaagctcaatcattaaatactaaacaaacccatgtcacattatatgttacaatgtaattttttactgttgttacctaagtttgtttgtataaacccttttaaaaaaaacactatatacaatgtttgtagctcataacatcacagtcaagaaagtaactcttcacaaaccctttaacatcattccactagtttaaactcaaagatttattattatctgacaatataaccaacaacatttattgaagtgtaaggaaagtattttcctttgtttttaaataaaaacaataaaagggattttggttaagctgaccattgaatccaaagaaggcataggtggaggagcccacttcttgctccacagtgaaatggtaatccagtgacatttcttgcattcttgtcatcaagcactcatc

SEQ ID NO: 13986 - DNA, 3557 bp, Cannabis sativa
cctacaaacgtgaggagggtgtataagagttagtaaattgttatatatataagatgaatggactacgcttaccattgtcaattggttttgagatgaaaactcattcatcttattttaaattctaacaatgttcgataatttgtgagatttacttgtgagtttagagtttttctaagataattgagtgaactctccatgtaaattgagtttctcttgagagttaagtgtttttgcatgagagttttgataggatttgatgttctgttgagagctaataagttctaagaaatctttgtgtaatcttgattatttgtaactcgatccatttgaaagcagtaaagcctagtgtttgttccccaatagactcaaaccacttaatctgcgtttttgtttctaatagcttatgtggaattcataatttcatctatcaatattaacattgttcttatttttgttcatttaagcattaaatttaagttttgaatttgatttggtttattacttttgattcattcaatgtttagtttgatgttctgatcggtgtgatttgtattaaattaattacaattaaagtcctaaaatcaattagttataaaaaatgttataccattttggagcttaattattattattcttaatttaatagtcatgagtcaccaacctcaattcacattgattcgaaaacaatttgtaccaatatatatactcacaatcaataattttgcaaaacagtccctatcgaaaattcccaacacattgttaacaaaatctccataattctgtttgggattctagacataagcaaaaataaataaataaatcaaaggatgccataaagtttgcaaattaattgatgacattataatatgaaatgctctaacataattttactaattgcttcgaatattaatagagggatatatatatttatataatgtatcaggaaaaacccataataaagttatatggaagaaaccaaaaagggtgacaagcaagcaacatattgaaaaagtataaccgaccaaaagatgagccaaaaattcaaaactccattgataaagacaactttttgaagggcaatggcctttcatctttcaaaagggaggcccaactttagggcaccgtgcatgcttaatttgccttgcaatacaaaaaactcttcactcctcactttgctttggccccccaaaacacacacttacactctccactatcatcgatctattccacacatataacacatacatctctctttttctaaataaaaatactttttttataatcacaatttcactttattatttttctgtgtggaaacgtgcccttgtagcactgtacatgttaaaaagagaaacttgcatgcgggctcgatatatattattatgagagatcatcaccttttatatatatatggtacttacttaccaaaccacctacttctattctactacatatatctaataatatatataattaaatgtatgtttcttattctaatttaataattaatcttagccattaaagtggtatatactaattatttttctagcttatatatatttgtgagctctatttcttataacttctttctcatcactattcccaccaaacctaatatttcttatattcgaacatctctctcttcctctctctcactctctcttatatatatatcatatatatatatatatatattttaataagagtgtgtctattctcttcttcttgatctcaccatgtctgtaatttctttcaaatcaggagtgagagtagtactgctacttataatgagcagaagcagcggttgtcatttcaacaagatattatcaaagtactacattatttctccacttcaaaccctgcagtatttagctccttatgattaattcatataaataatccgatgcaaatatatatatatttctatatatatatatgatctgcatctacgtactcaaagggggaatcaagcactcctggtccgaactacataagatcatcatttctttcttctaaatctctctttaattaattttgttttgggattattattaatattattattattatgcataagaataattagtgttttgtagcgattattgttaagaggtgtgtttcaataatattattattaatgttatgtggatccatcagttttttgtttattattaattaattaggatattaattatattattgtaatatttttgttaattattaataaaaatatgagttatataaatatgtataattatcatgttttgttcagtttttttttctttctttcttcttacaggtatatgtttgaattgattcagttttcatactctcttagtttatcttaattttaattataatttatatgtagcgtactggttctgattattattagttataaattttaagtggattgtgatagatcgaaaatgagaatattgtaagtgatggatgtgatttaatgggattcattctgccaatttggcttaattattatgactttctaaactctatattaataaattatatgccctacttggggagatttgtatatgaattctccctgattataaccaaacttttttattaatattaatggggttgacagttcttaattgatcgaccacacaaaattattttccatcaaaatttcaataatataatacataatacatattacatataagtcctaattgttcagaaaaacaagtatatttgtttgtatcaaattacaaaatactctcctattgctagttaattattattagaatttagattcatagatacaagtaatataaagctcaatattataatattagtatattttcaccccgggagaagagtgatatatatagtaagctagctggatttacattatttgatgggaacataatcatgtacaatatattaattaaatgtaaaaataaaaaataaaaaaattagaagaatgagcgtgactaacgactactactctttttagacaaagaagcaaaccaaaaacacaaaaggtttttcactgcattcttctatgcaacagtgggctcatataaataataaatatacatataattaatatatatgacttaggctttctatgatcgatgtaacttaatttggaggctaaagtttcaactttatcagactatatatattgtcacttccttctttttcatacctaataataatactcaaattcaataaaactcaaaagagagaatgtacatagtatataaaaatcatgatcataattttactcattagatgagttgtactaccactccaaaaggctaaatgcacataaaataaaaaatatatatttatttatatatacttttctttaatcatgaaaagctaaggttgactatatatattgtatgtttttgctttgcctactaatcccttggcagtttccagctacaaaatctcttatctcaaaaactatattaaacacttttgttgattgtaattatcatgtttttatcacctttttttgttgttgttttttcttctcattaattgaatgatgatattgttaataactataaattaacaaaaaa

SEQ ID NO: 13987 - DNA, 3761 bp, Cannabis sativa
aaaagatataatatgtacacggtaagccatttttaagatcatagtaatataattaatatactttcattgtattcaattgctacattacgtagtacagtatcaaacctagatatgaccccatcaccaaaactacgaagaaaattagacaaaagtttattgtattttccatgtaacacactatatcccttccccgaaatcctcactaaaatgattataggtttcgatgactgccactgctgctgctactcgggctagtttatccgaaaatagctgaacatgcagagtagcagcagcacaaaagctcaattcacatgccctttcacttgaaattccagaaaacaaaaatgggagtaccttgttaggcgcggccgccatggttagaatgccatctttttacgagtgtctcacgcatactaaatcatccaatttgtttccatccattttgtatagagacactccctccatttgatgatagtgttcttgtgctgcttctctcaaactctcaaaaggcataacttcccatttactgtaatttgatgactttcttacactgctcatatctggagaccccgacacaggtccatcgctttcagggctcacattcccccacaccttacaactaccaaactgacccaattcgccagtttcgcccctcttcaaatacagggccgctgcatgagctcgctgtatcatttctctagtcggcacatctgcccaatcctgtttcctcttggatctcatgggtgaatggatcctaataacctgtgaaaatataacctcgaattacattatgtcatcaagattgcatctgtgttaagacaacttttccatagattccaacaacatagaattttcaaatatgtattcttacaccgaggcattctaggagctggtaatatgctcttccttgaagtgggttgtgccctttcctgggtgtagagaagtatcttgtcctacaaggtgggactaaattattagaaatggaagttgctgaagaatatctttccaaaactaacacacaacaataaactatattataataggagaaactgaccattcagtatagccagggtcaactgtgaaaccataaatgtcaacaatgtcacacatggagagtgctagttctatggatttcattccagttcctttcgcaccacggcgtagcacaattccttgaaaaagataaactggatttggaattttctgcaacacgatataatttcaaatattaatggactattacatcagtgaatagaaaagtgttgtgtagtaattaagttaaacaagagtaactcctgatcaagagatcatgaccacacccaaaggaaaaaaaaaatccttggcagcagtaacttctaatcccaatccaataaataaatgtaaaatctcactaacacagtaatctacaatgatgaatatagatataggaaaaaactcagattgaaacatcaccttgatcattgtattgaagtctctatgtatcacacttttgattatgagtacttcagtatctgcaacaaaagaaaattgtaaaaaaccccactacggtaaagtcaaatcatatgcatcaataactttcttcaatgattttcccaaaaatataaaactagtaaacaattaacaagaatgtggtaaataacatgcgtttcataactcacccgacccatttagaatggcaaccatgttacgagcagcacccctaaccacaagtcgaaaatccctcttcagcccaacatacttggcatatttctacaaaggacatggaaaggcaaaatacaattcattaactacttttgtaaacaaagactttgttagtgataggaaatatctctaaagctttctaccttattaacaggagcctcattgtcacgtattacaacatcatgaccatcaatctcttctccaaactcggtctttaaaagatctcctgaatttccaacaactgcacaggtgcggaactgtctaggatggaaagggggttttgctggtaaaatcaaattgagatgttcctcacagagtgtccggttgtagcatttatcagctcccctataaccaagacaatgaaataatcagattcacttacaactaattaaatcattcatctacattaatcacaaggggttcatgaggaaactaaggctttcataatcatacaactgtgctatcctttttgctgcatagtcttcccacccatccggccgaacatctagatactctctagtgagcacagtagtcatgttacgatactacaccatcaaaaaaatgtaagtaagcaaatgtaattggcctcataataagctaactacaataactaatgattataagataatcagtttagtaacctgttcccaaagtagaagtgtctcacaaatgttgtacttgtactccaatggttcaaaaactttgaattgctcattgtactgccattaaaaactaaaaacactaagaaggggtggtttaaattaaagtaattgacttttctttcttaatgaagtgaatgtttgagaaaaaaaggaataatgtgaacaaacccaggtgctgttagtgccttgtggaaacttaaggaccaagttacaatgatcagttatatgagcagtgagtccaaggcctctgtttgcctacaattaaattcaaagttataaagtgaaaaaagatctaattttgatataattgatgaacattggaattgaacaaagaagaggcaaaccacgcattgttgaacattggactgaaactcctcaagaattcggacatgttgaagagtcttcagatctaacttctcaaatttgttttgatttgaattggaaggagcacctgtaatagcaaacatgaacattaaaatcgaatcgagatcacctagagaaaaatcaagtcagagtagtagtaggaactgtaagaacctgtgaacaaagagaattggattccgaaaacgagaagagcgaaaaatgcagcagcaaacaccaaatatataaccgtagggcgctttccatggctatgagctttctgaagagacctcattgtaagctcatagcctaagcaatcatatacagaaatggagatctgcgaaacctttaaggtcggtcttcaagcgtccctggccaactagatctcgccttagagtagatgaaccccgtcgtcgatccctgaccggagctctggtctggtaggtctccggcgatgtagctgagttcgcactggtttggttcctaacccacaaatttctgagttaagaatatctattaagcccattttacggaaagaataagaaaaaggagaaattaaaataattacaaaaacaataatcatgtccaaactttttagttagttaactcctatgtaaaatattttagaaaatatttttaaatattttagttaactcctatgtaaattaattgtgatttgattagatcttattttttattgtccaattaaattgatttgaatttgtatgtgttgtttaaaaatttaatacaattaatatttaattgaaattgttagtatttttatttaatttagatgagtaattaatgaatatcggatctaactaaaatattggataaatttaaataaatcttatattattatatacatgattatatatctaatggatagaatcgatctaatctgattggatgtctactactaatagaatcgaatcggattgtaaaatttaacatctaatatataatttggatatgcctaaaagtattagatgtagtctaatgaacacccctaaaaagtgttaattacaatctcctatt

SEQ ID NO: 13988 - DNA, 11038 bp, Cannabis sativa
ataataatatatataccgtttctattattattttttttttgagtgtttttagtttttgaagacgaagaagctgaagaagacgacgaccaccaccaccaccggaagaaaagggaattactttggttgaattctgtaattaattctgtttccatttctcttttcttcttcttttttttttgggtataaaaattgaaaataaaaaattgaatttggctatggaaccgccggaggatgcgaacctagggttggatgaggcggaagagattatcttgcggtgggattcaacggcgtcggaggaagctagggagaagatgatcttcgaagggaatcgagatgaggtcgatcgttacttgctcgccgtcgatcaaatccaacggtcaatttcttctgtttctatctccgatgaccaggctaaagtcaactctgctattcagatcgccatggctcgactcgaggatgagtttcgtaacatactgttgatccatactagccctattgagactgatacactcacggatccgagttcttcgattcactcctctgttggagccgccagtagtagtgttggtgttggtgatggtgatggtggtgttgattatgaggatgacggcgatgaagataaagatgatgatgagttgcttcggagaggggattccagtaacagtgttagttataggtctactagtagtatccgtgagatcgatctgataccttctgatgctgtgattgatcttcggagcatcgctgagcgtatgatatcggcaggatacttgcgtgagtgtattcaagtctatggaagcgtgaggaaatcgacagttgattcgagtttcaggaggcttggaatcgagaagcttagtatcggtgatattcagaggctggagtgggaccagctggagacgaagatcaggcgatggattagagccgccaaggtatgcatcaggatagtattcgcgagcgagaaaaagctctgtgaggaaatctttgacggtgttggtactgctattgatgatgcttgtttcatggagaccgtcaagggtccagcgattcagcttttcaacttcgcggaggctataagtatcagccgaagatcaccggagaagttgttcaagattctcgaccttcatgacgctttgatggacttgattcccgatattgatgttgtgtttgaatcgaaatcgtcagaatcgattcggatacaggcggccgagatattgtctaggctggcagaggcggcgagagggatattgtccgaattcgagaatgccgtgctccgagaaccgtcgagggtgccggtccccggtgggacaattcaccccttgacgaggtatgtaatgaattatataagtttgatatctgattataagcagacactgaatgagttaattgtgtcgaagccttcgactggttcacggtattcaggagatccaacaaccccagatatggagtttgcagagctggaagggaagacccctttggctctccatttgatttggattattgtgattctgcaattcaatttggatggcaagtccaagcattataaggatgcgtctttagtccatttgttcatgatgaacaatgttcattatattgttcagaaggtgaaagggtctccagaattaagggaaatgattggagatgattatttgaggaagttaacggggaagttcaggctttcagctactaattaccagagagcaacttgggtaagggtgttgtattgtttgagggatgaaggtctgcatgtgagtggtagtttctcttctggggtctcaaagagtgctttgagagagaggtttaaaacctttaatgctatgcttgaggatgttcataggactcaagcaacatggttaattccagattcgcaacttagggaggaactgcgaatatcaatctcagagaagttgatccctgcttacagatcgttcttgggacggtttagaaaccatatagagagtgggaagcatcctgaaaactacatcaagtactctgtcgaggatttggagaatgctgtcttggacttcttcgaggggtatcctatatctcagcacctgaggagaagatctcagtaaatgaagtgaagcgagttttgctatttagaagctagggaaacattcttttaattttttggagtgttaggggatgcggtgctggtcattctgggttttcctgagtaatcacatatcttgaatttcagagttcaattgtgcattggtttattgaatcaagagatcatgttattatgaagatcgggtgcaacaattctccagattggtcaagtcccacagcctgaatgcttctgccttgtaagcatgttattcgttacaagttctagatttcgttttacttgtttatattggaattattgtatgtgtgttttcttttactcttatttatatcaagaagcagtttccattaacagttcgaaataacactatgtcatgtcatatgttaagcttttgattagacgaccattggaaatggaatttagataagttttgtcagtcttgaaattttttttttgaacagttgatgttccttgtatacagtattcttttttattttttatttcctgtcctaattggatgcatatgaatacttttaaagacatggagaagtagtctagaataacttgggttcacttcaataaaaacaaagaatacttcagagacaattttgataacagttcacgttctcatttttgattgttgacaatttcactaaaggaagtctattgttggttcaatgaattgtcaaggtgtatatcaacaggcacatatgatagtcttcgtttgtttagtcaagtttattatgtgctaatgctagaatgttatgttgaaattgtgctatatactccattatcttccatcttgaagctacagttttgtatctctgcagaattatgtattagcttcaacactgattctagaatccattcaataacatattaggctatatcttttaacgatctgaaacaatgttcagtaacacaaatctgtgttcatttcattcatacaaagagaggggtctgattagacttggtttccttttgtttcgaccttaagtatgaactatgaatgaatttctgttcccgcaaccagctagcttaacatggtcaactgctttgggctaaggattggtggttctagaattaacataatttgactttgggaatggttagtgaaagattggaaagggcggaataattataatcgtctgataggaaattttgaattatgaagaaaaaaggcatcttgttactttatcgattttaaacttgcttttgatctatatatatataggcataggtttcgccttaatagtctttaattgttagtattaatttgagaggacttgtaaagtcttaaactacggtatattattatgtttctggccttagctaactgccttactaaaacattggaatattgtttagttgaatttgcgttgggaatattgttaagagtcaatcatgcatttgttcaacgatgcctgcaataattttaaatgtgatgatgatgcatgtgcctgaaaactggaaatcttgcaaaatttcatcaaggataaaagaacctccaattttgaatatttcccgcccttaatgaactagccctttctctatttggtcaaataattgggctaacctattcgagtttttatatttacagttatgattaatatgtaggttgggctgaaccactcgtcaactcacgtgcaagtacgaggacaagcctcaaaccgaacaaattcaagagtcaaattttgttgaagttcagttagttctttttcactagcagaaaagaaacccacaacagaaatccattcataatttgtttgtaatgcacagtcagatataattatttaaagaacctaatcgtgtgtacttcgtacgattagataaatctcttgaacgaaaagaaaatccataatcaattttcatcaaagccagttaaagtcatattcaaattcgagcatgtagtacttagtatacatctaaatctaaaaggctatggttctgagtaaagaattccatttaagcaatgatatatttttcttcatcacagagtaactattcaatctatattaagtaataacccaatgaacaaatagctaagaaaagtaacatgaacaaaaatgaacaaaaggctaaaatggcaccatctcaaagttgagttttccccctcttgtataataattactgagatggtatcaatatatcgcaggcactgactgttctacatcattctgtcttgtcttcttccaaatcaccatccacatctagagatctggcttctggcacggggcgaacatctttagatgggattggagatggttttatgagtgtcaaagacgtatcatcacggtcgaactcttcatttccatcatcggagtaagtatacctatcaaaagcataagacagcagagacaatggtataaattgggcatattgaataagaaacaaaaacgagccatctgcatggaagttaattttctacatatatacaggcaggatggcacttaatagttttgttcaacaatgaataactcatagaaagaggacaaatgagaatgatgcatcccgaagaagacgggatgacgcagtccttacctcatagagttctgggatggggcccaaagggcacagatgacacagagaaccgaaaaagataggacttgccaaaaggcagggataatccaagcattttgccactgctcattgtaaatatccttagatttgaagtaaagctgcaattccgaagttaaaatatcatcaactgtaaataaatttgaaagcacatataaacgaactaaactacatcataagctaagctcgcagaagaaaaaagagcatagctgtaaacattttgtgttgactacctcatagcatatccaaccaacggaaacaataacagctactgccaaagcgtttgtgaacttcctgtaaatatctagtttaatcaacattcgcctggcctggaaagaaatcaaattttgttagcagtataatttttttctttaaagcaaactacagattcaagaattggggaaacataaccagtataacatgaggccaccaaaatgcatattaagttggacgcataaaaaattcatgtactcactcaagctcaagcatgggagataacagagcaaaagatgaacataaggtgaaaagaattgtaacgaagtacctgaagcttctttaaagttgctgagagggatgaaaatatccaaaggatgaagaaagcatccaatacagccacaggaagaaccaaaaacaatcttgcctttccagaaagatcactgactgcaccaacattttctaccatctcaagaacttcagatgccacaaagaaggttgctccaagcataactacctttgatgtaattccacccaaggtaggtctgacaacaccataacccatggacaccattaaaatgatcaatcgtgcaacagtacgtttaatagcaccaaaggtgacagcccatagagttatcccagtgggcctgattccattctcgttgaattctgcataatcaaagtaccacagagccatttccaacatgcccagcgtaatcactagagtaatacagttctgcagaggcagaacttctctccaaaatcttgcatactgtgagaaccaaaagagcccaagtaatacaaaagcaaatgacatgagcccataaaatttcataagtggtgccattctgcccggtagatatccatttgggtttttccatacagttttcccctctacaaccacattctcaagcctaacatcacagtgtatgaaatacaagttatacattcctgttctagtaatctctatggactttgaaggcaatgtagtaatttcttcatttacatcaaatgagacaccaaaaacttgaggccaatcaggattcttaggtgaggggcggtgaatgacttctccttctttacatacacccaatttcgcaagatcccctgtgcaacatactgctctttgacccccgtatgctgaacccccaattgtttccctatcttccacttcaaaaataatggcgtggaccaagcctgagctaaaattagtatagtctctggccctccgaaatgtcactttgtcaaagctggtttcatcatatgacaagcaaaacaaacgtgcaatgagtgcaactgtgtataatttcatacaatcgtatcggcttaaacatataagtctaccacaatccatatgccaatatgtgttaatttccagcctaatttaaaagtttccttcctatataaacttgtataaactaagtaaatgagaggagcaaatcagacattttcacttcgatttcgagtcaacaatatcaattcccaaccagaaaatatcaagcaaaattctcagttacataaaataaaaatcaagagcattaccgtatgaaagagtcaccatcagcagaaatatcagtctcattgcgaccagggacagaatagtaaatcccctcgctgcctccatgaacaacgaaggcatttcctttggcggcgaatttgacagcggcgtagtcgtggaccgaagcttcgacacaaacgaagctcaaaacaacgagtagagccaaaacggacgacattgttgaaaagcgaagcacaggaaaccctattattgtacggaagattatggatctgaaacgatgagaagagattgagaggagtgtggtttgagaatgtgagatcttctataatctaatagaacttgcatattactactcttacttaacttcttactaatactaactagtcttattatgagctcaaggacaaaagagttggaaagaagagggagaggacaaggaggaggcagaggaattatcagctgcatcgcgtgacgtgtcgctactttaatcagagccgtttgttttgttgtaaatgatcataatgatgaagtgattaaatatacgaagtcaatgttgtcggtgttacaataacttgacgttaaaagagctgcactgtaaagaaagatagtaaagccaggccagctgctatcttcccttaattaattgttattattaattgtttattggaaaaaaatagagaaaaaaaagattatgtggtcaattagtcagtcgtgcatgttactttctacatatattcttactgatcaaacttaaattatgttaaaatgcttcttaatagaccaaaatgcttccaataatttcatctctttttttttttttcttttaattttatttccctctcaatatttattttccaaaaaatcaaggtggagaaacaatgcatggcactatggcagtaaattgtaaattgagtaaatgaatataatactatcattacagagtttaccctatgattatttacagctttactaaaaaattaccaacaaagacaatttaatgcttgtttgcccaactcaccaaattagtaaatacaactgaaattaatatgcagtttgcagaagatgggggaacacatgagttggttggtcagaatttggaaatttataattgacattactaattaaaactactaatgaaaatatctgaaaaacgtacgtttataaacaaggccaaaactcaaaataggctgaaagagaagaaaagattcaatgactgaaatccatggataaattttaggaatgaatgtattgattcagaccaatattacacaaaagaaatttgaagaatggttcaacattgaagttataatttgaaaagtatttcacctctaacaactacagatcttcctaccaagcaaaagtagttaaagaagaaaaagaagaagacatggaaaagaaacacggccgctataatatttgcggacagaaatgtgaaccaactactcgagggtcattttaaacacacactcgttaatccaaatcaagaaactccatcctttttctcatggtccctttaagatcactagcctccctttcagctttctgtgcctgcagaatcacacaccatcaaccactgtaaccacaaaactccaatcatatatgttcaattataaaaacgccactcttgatctagtgataattcttaaaagccaaaaatgacaagctttcatgcaatgctgtacaaccagacatacagtacttggagatttaaacagcatgagcatggccactaaatcaccaatatgattacgaaaccacatttttttttaataaaacggagatttgatctagccaaccacttgagctcgccccaagtggcaaactataaaattataaaaccagtattaatagcattatctctactgtcaataaatttgatcacataatcaacttatcaggaagatacaacatcgagtgtttttttattttatttttaaactaggctttcccaccctcaatggtacatttaggactaagagaaactatagtaatgaaaccaacaagagacttgaacttcaaacttcgtaagaacaaaccacatatttgaccatttgagctacagcctacagctacagatcttgtatgtatcatacaatacttaaaattttattttgacattttaaaagccttattttcattgaatggtgcacctttgagataataagtatgacctagtgataactaataaagaatctcctacacatgatatgatacagtggaatcaaaatcaatttatgggaacatgacaatttaaggcttttctccaataatcaagataaaactatttttgattcaggaaaatcaaacactccaaaccattcaggaaaaggacacgattctagatatatgacatactacataattttaaaataaaacaaacaaacaaacatattatcaaccaaattatcatgaaggaatataaaatagtatcactttacccttttaatttctgctggtgaaacacgtgtcatgtgtggaggaagttcttccctctccaagtcctacaagtgcaaaggtcgaagtgtaaatctaagcacaacacaaatatgcataccactctttatttttatttttagtttaaaaataaaaaacgagaaaagaaaatgaaaatgaaacttataggtacaaataataccagctctccaattagaacgacattctctccacggattacgtatagacctaaaggcatgtcacagtaaagttcaccaacaatgactctctcacacgcaccctcaagaacagcattggctgcatttgagaaatataaacttctttagttactaataagatcttaaaactttaattgaaaagatggcatgttcacatgtgtaccaaattgatcaaatgatcgaagtatcccgagaagctttctcccatctctaagcaggacaagaagtttctctgcaatgaaagaacacagtaaaaccacataagattataatgagaacaaataatcatcatcaattatggatcaaggataattcatgttgatatttcctactgcactacactgtagatagaaaaacaatgagacagactagcaaaaataaaaattggcacaaacaacatcacctgtgacccaatatgtcatttaaatgcaaataagtttgaatgcactagtgaacaagaaggcacgtgtattctcttaaacacaataagatccataatatcacacagcgtgatcaatctataaatgaggcttgaaattaaggacctaggtcaatgaaatggaaaagatatagctgcacagcccatagatcataaatggaaagaaaacacgcacaacagagcaaatacgaaggaaaaaaaaaaaagtgactatgcatccatgtttggtattgtaatgaccaaatttgacaaatctattgctgaacacagtgtctagtaaaagtagactttgtgaaaacttttattagagaactaacctttcaaaaaataatgtgagttgagctaagggttgctcctgcaacattaatattacactaagcgaccctaaaacgattctcagggtaggctacctaaatttacaataagcgaccacgagggtaccttaatgtaaagtggttattttgcaaatttcacatgttcatgttggtagtgtgtaaaattctcctatgaatacatcctaacatacttataacgatacacagatatttgcgattcagattcgtactgaaactattctgtcagtggctgaaaattatccttaattcaaacaactcaacaactctacaatgtatccgtactatgtcagtaatttacaatataacaggtacaaatataatgaaactaagcagaacaataatcacttaatataaaccaataaaagctcaacaaaacacattaccaaaagcgtcaaactaaaattgcactgattaacgagaaaaataaaacgaaacaataaacccataaagtgagtttatacaaagcccatcaccaatcgcagcaattataaggaaagataaagcgcttactgtcaagatagctggcaagagaggtagaaagatggatatcttccgggcctgcccaagacattggtgtcaacgagttcaaactttttcggtaccgaaaaaacaaccgaaaatttcaacagagacgaaaccaatggcattggcagctcagatttcaatctgaagcctcacaccaaaaccctttagtcaaattccaataatcccaatcgatgtccactgccacaaaaccccactaaacaagataatacaaacttgaattaaccttttacaaaaagccctatccttttcagatccaaaaaccctgatgagtcacccaatcaagaactcgaggcttttctcttccggtcgacggaattaagaggagttgagaaaaaaaaagcactcagatccaatccagccgcaccggaagagattcaagcagaaattccaactagaaaatcagaaagaaaataaaattagggtttacaaattgagatggtgagaaaaattaaaaggaggcatagaaagattgttttggggttgttacttgtattgtaggtggctgcttcattgcccgatggtgttttttcctcttccaattattaatatatttcatcgtatttaattcttatataaatggttccttattatttgtttttattattatttattttaggagaaagctgttaaataaaataaataaataaa

SEQ ID NO: 13989 - DNA, 1975 bp, Cannabis sativa
  modified_base (50)..(63): a, c, t, g, unknown or other
tattgtgttaaatttttacggttactccacggttattttttagttgttcnnnnnnnnnnnnnnttgttctgttttattgttttacaactattttataaaaagacattttttttataaaatttttcgtataacagcaaaattgtaaacttttacccaaaattcagtattttggaaaaatcatttgttttctgtttaatggtattatcaattattggccactactagcaaaccctagtaaatttatccttcaattattgggccactactattacaggcccactattacaatttgggcttaaaacctatgttaccaaaacaactagttgttttatgatataattacagtactattttaaatggtgtttcattctgaaattttgacaatttgaaaatgttattttaacattaaaattatgtgttttttaaaaaagaaaaaaaattaataatttagtttttaaattaaaaaaaaaaacaaatatcggtgaggattttgataagttaataatatgttgttataaaaatttatgaaagttttaattgtgttttctttctaagtgaattttttttgttagtatatattgaaacaagtcataaaataaacatttcagccaaaaaaaaataataaatattttattatattagatattttgtgattacaaattacaatataaatagtttttagacaatatatgtttatataaaaatataatttttatataaaaaaataataataataaaggcaaatgagtggccctcccagatggtgatgaagaagtccacaaatggtcagaaagatcacaagacctcatgccaatgctcacatttatgtacaaaaggttccaaccatttggtgggaattattaattattgtaactagttgtcgataactttcttatatggatactccacaacttccatcattttatctaaattttttatgattaatttacatggaaacaagtgaaatgaatacatatcaattgaagaatacatttgttgtgattaaattaatccaaaaaaaaaaattgtgagtatgtttatcctgttcacaattaataataatttagtaaaaaaatttagtctgacaattttagtttttattatcttgttcattcatgttcatcattcatgatttttatgatgatcgtaagtttcacgaatgatttgtttaattttggattattgatttgcatttctactttggatttcaaatgtttttttttttttttttttataaaaaatttgggtgataaaaaacgttgaccaagagttgactgagttgatcgggtcaacccgttgactctgccaactcaaccccgcaaatccgtaagcttgaaacccgtgaacccaaaattcggtcaacccactcgatgttcagccctacctgccacgatcttagctcattctttgggcccattctctttggatttggattagtaatttagtgcaacccaataaaattgagccctttacttatatatttttacaaaaaaaaaaactttttttaagaaaaatgataacaatttcattgatgagaaggttaaaccttaaatacccaaaggctcaaataccatacatgcaatattcttaacggtgcaatatacgcaccctcaatcatgttgcataaaagcttcttggattcaaccttactcacatgaatggataactaaatcagtgacatgaaccaattgtgataaagaaactaacaccatactatcaaagatagatgatcgacactccacacaaagaggtggacaaactaagtccataacaatgagactcttatcgaaaacataaaaaaaacaaagaaacaacaaaataaaataaaaacacaacaaaaacatgacccaaatctcaaaagctgccacgcccttgaatcttgaaacactatcatattgatggaccacttctttgtgacccctgttaaataaattaacaattaacccaagatctatttgtatataacatagaacac

SEQ ID NO: 13990 - DNA, 13465 bp, Cannabis sativa
aaactttcatggcttttctgctggaactattagctacgagaacctcatcaaaattatttattattttacttggtcaattacacacacacaagtcacactcctggaaattctgtttgtcactctctttctttatataacatatgttcttctgtagctaacttccattttcgaatctaccataggctccaaatttggatgccactctacaatgaaacatacacttttccaagtgtattttaattttgtctaccaaaaaagtgtacttatttactaaaattgtagtctcttttataagcatataatgcagagttaatatatgcttaaatgaattcccctataaaattgtgccttttatcacatttacattatatattaatattattgttatttgttatggggctaattgggacaaaaatgcactcttaaacagggaatatcgacggacagaatcatcgatgttcgccgattgttatcggttaacatagaaacttgtaacatcactaatttcacgctatcccatgaggtaataataatgtgcattatcactgaattataagttgttatttttatgggttattatcatttgaaagagttggacggagattattgacattattttctaaaatggtgctttaggttgtccattttagtgcattgtcatatttagttaaattgccagaaaatataaatgttataaaattggtattatcgtcaaagtccattaccaaggtcaaagtttttttttttcttaaaagaaacactttttttttttttttgagggacttaaaagaaacacttttggtatacttcttctccggcctaatgatgtgctacgaaatatacactctaataaaaaggccacgagaaagtgaaagctttttgtgaattgtgataatgtgttataatcataacctagtgcaataattgaattatcatgaagctatgcttagtgcaataatttaatgagcttattgttcttaaatgcacattgaatctattttttatttttattttttttaataaaaaaaattaatttctttcctttagaaaaaaacgcacattaaattcttgctatttatattcaatttctataaggttaaaatggacatttccgtgcacaactgaagcatctagctattttgttacaggtaagggggccccgcttaaaagatacggtggacgttgctgcactgaaaccctgtattctaacgttggtggaaggtacacataaaataaccctacaattaattaattaaccccacattacatacgacgtcgtttagcgaactttcttcgaaacgcggtcgtttaatctgtattcctcaataattcacaccgtcttatttctctgaatctcacggcaatacgacatcgtttcgtagattcttgccgatacggcatcgtttttcttctcgatcaatttctcaagcccgctattttttttttgagcagaggattacgatgacgaaaccgctacggcgcatgttagacgagtgctggacctcgttgcctgtacgacgagcttcggtgcttcgccggccggaaaggaccagaacaataagcccgatgcttcggtttcagttggcggtggtaaaggtgcgtcgggggcgcaggagaagaattccaagaaattcaccatcaccaagtctcaaggttcttcaggacccaccaaacaagatgtggcggtggtggattcagaggccgatttgagccactcgtgtcctaagcttggcgccttctatgagttcttctctctttcccacctcactcctccactgcaatgtatgtactctctctctctctctctctatatatatatatttatacatatacatatatacgtatttgtaatgcatgttgatccgtagacagatttaactaaaagtattggaaatggctattaaaatgcagttgtaaagaaagtgatgagacggcaaatcgatgagatttcggcggatgatcatcttttctctatggaagtaattttctatttcccttaagcgagaacttaattatgaagtttcttgaattttggttttgagtcaatgtgcttgtttaattggtgaaggtgaaactttgcaatggaaaagttgttcacgtggaagcttgcaggaaagggttctacagcgttgggaagcagagaattctgtgtcacaatctcgttgatttgttacgacagcttagtagagcttttgacaatgttagttttttttttttcgtttgtataattttcatgtcgtttttttagaagaatttcacgtttcttagaagttagacgtttaattttctttgctcatattccaggcttacgaagatcttatgaaagcattctcagaacgtaacaaggtacataagcttgcatctgttttgttatttttcatagactttattacgttgttttacattaatcaagctttgttttaccttccctgcagtttgggaatcttccttatggctttagagccaacacatggcttgtaccaccctttgcagcccagtcgccaccagttttccctccgctccccgtagaggatgaaacgtggggaggaaatggtggtgggttaggaagagatggaaaaagcgacctcattccttgggccaatgagtttgcttttgttgcatctatgccttgcaagactcccgaggaaaggcaggttcgggataggagggcattccttcttcacagcctatttgttgatgtctccattttcagagccattaaagccattcgtcttgcaatggacaaaccagatttgatctttccagctgtggacagtaaaattctgtatattgaaaatgttggggacttgagcatcacagtattgaaagatgtttcaaatgcaagcagtaagatagatactaaaattgatggacttcaagcatttggagttgataaggaacatctagttgaaagaaatcttctgaaggggattaccgctgatgaaaataccgctgctcaggtaagattttgtgaatagctgctatggattgttacttgctttgtaactgtggttgcgttttttgttttttactaaaggattgacagagactttactttgtgtgtgcaggacgttgccactctgggggttgtgaatgtaagatattgtggttacattgcagttgtgaaagttgagggtaaggatgagaaagccacatctccatatcagagcagtgaatttcttgatcagcctgaaggtggtgccaatgcccttaacattagcaggtacaacgtttttgtgtccttatgttacagtccacaaattctgaagtggttttgtactaaaatgttatattggtcttgtgatcaagaacatttgagcaaatctcaatattgcttatttaatcctaatggcagtacttggtctcatatactcattgtttcttctttctgagtgactacctcactagtgcctctatcttgtagtttgagattactactgcatagaacaccagcttcagaacataataagcctacatctgattcgcaaacatgggatcttgaagagctttctgcttcccgtgcttttgttgagaaactgttagaagaaagtcttgcgaaactggagcaagaggacgtaaagttggatcaatttgtaagatgggaacttggagcctgctggatacaacacttgcaggaccaaaaaaatgcggacaaagataagaaaccatccactgagaaggctaggaatgagatgaaggttgagggacttgggacacctcttaggtcgctaaggaacaagaagaaagtagatggaagcaatgtgaaaatgcaactcgagaaaccggatggcattactgcagaagcagagggtgccacatcaccttctatagaatttaatgttgaaatcagcggcaaagaaaatgagcttgctctgaagaggttgctgtctgatgaagcctttattcgactgaaagaatctgatactgggcttcattgcaaggtaatgtatattgcaggtgaactatctaactattcttctttatacttggtagtcggaataacctattttttattttggcagtctcttcaagaactaattgatttatgccagaagtattatttggaagttgctcttcccaaactggtaattactgaatatgttttggttaaatacctttagtttccctaatatgttatggtgattaatgtttctattacttttatatttatacaggtagcagattttggttctttagaactttcaccagttgatggtcgaactttgactgatttcatgcatactaggggtctacggatgcgttctctgggacatgttgtaagtgccctgcgcaaacctttgatcctttatttttttgtttcttttcttggaacaacttgatcctctgtttttcaatccacccttttatatattattatcaaccttagagaactttttttttcttccgtcatctacattccaacatgcgtgtttcccatagtacttcgaacagttttttttatcttatgttggtaatattcattttatccccatcattatttttcttgtagttttcagaaaaaattatttacttgataacaagcagaacagttagtaattggtcagtatcaaaatccaattatgcaagtcttctaatattgactgactatttcttttaatctttgtacaggtaaagctttcagaaaagctatctcatgtgcagtcactatgcattcatgaaatgattgtaagagcttttaagcacattcttcaagcagtaatttctgctgttgaagacaatgagaaaatggctgtatctatagctgctacattgaatctgatgcttgggattcctggaaaagatgaatttgataagtcttgccatgtccattctctcgtgtggagatggcttgaagtattcttgagaaagcgatatgactgggatcttagtagcttcaattacaaagacttgaggaaatttgcaatcttacgcggtctatgtcacaaggtatgttttccaaacttgggacatggtacttaatattaaatatattgacatggagaaacttgtgtgtcttattttgcatgtcacaagaagctttaagtcatgtctggtagctattaatggattaacagtgttgtcatttgtttattattgtttgtggaatatgatatttaggttggtattgaggtagttccaagggattttgacatggattctccaaacccattcggaaagtcggacgtggtcagcctagttccagtgcacaaggtaatgtaatgactatgatactatttaccgtctacctaattttatgtcagtggacaggggtttcttgagtatctattatttaatttagctgcaatttttcttttatttgcagcaagctgcatgctcttctgcggatgggaggcagctactagaatcttcaaaaactgctttggataaaggaaaacttgaagatgcagttacatatggaacaaaggtgtttggagcttacaaactttttcctgttttctaattcatattaccagctttacttattttattcttgcaggctcttgcaaagcttgtagcagtttgtggtccataccatcggatgactgcaggagcttacagccttcttgcggtagttttgtatcacactggagacttcaatcaggtcttgtttcttctttctaattctaaaaaaatccctcgttacaagatctagaaagtgcattatctcctaatatagattatataacatgtaagctttttctcagtaagtgttcaagtctagtttttttgttcgatttttcaggctacaatttatcaacaaaaagccctggatataaatgagagagaattaggacttgatcatccagacacaatgaagagttatggggatcttgctgtgttctattacagacttcagcatacagagctagctctcaagtatactttcttcttccataattattagctttgcaaactgtttctatagtctatgacctgtttctaaaaacacactagatatagataatattatatgaactgaacttcaaaaactagacacttcatggtgcttgaatgagtttacacagagtgatatgctcaattagtacaaatgttatgatctttattttcatttggtgattgtttagatttttagatatattggtagatactagtaatactagataaaaaagattatgtttaagtttttcattttgaagatcagttttcttttgtctaaaaatctacgttctttttgctgatcagatatgttaagcgtgctctgtatcttctgcatctgacatgtggtccatctcatccaaacactgctgcaacgtacattaatgtggctatgatggaagaagggcttggaaatgtgcatattgccctgagatatcttcacaaagctctgaaatgtaaccaaaggttacttgggcccgaccatattcaggttttttcattttcattgatttgctgatttttaacacaattacaaacttgatagaaatgctaaatgcactctctaactaatgatatataatatttttataatataaaataattggatagttctgcatgtcataaattgaaacaggatagtgcaaaaggtgtaaaggagaactcctttagctctcttttaaatataaataaggtcttctgttaatgagtgctatggatgtcagacatgaacaatatgcatggactgaaacttctcatttttacttagtaactttttttgattgattctccagacagcagcaagttaccatgcaattgcaattgctctctcattaatggaagcataccctttgagtgttcaacatgagcagacaaccctgcaaattctgcgagcgaagcttggtcctgatgatctgcgtacacaggtatcttctttatgttagcaaacataatttttgataataatcatcgtaggaaggaaattttgatgtaatcaatttacatttatatttttaattttcttgaagaaatgtgattaggatttttcatttcctaataatcctagacagtctgtaagttgaaatttgtaaaaaaattgcctcaggatgctgctgcctggcttgaatactttgagtcgaaggcttttgaacaacaagaagctgcacgaaatggaacccggaagcctgacgcctctatagccagcaaaggccaccttaggtaagtttccagtgcattttatgatatgaataggttagatatattcccggttgcacacttaaactacacattgtaatgtgtaattaatcttaactatagaaatcttagtatgaaccacgtcatatttaattgtacttttgagattacttacaaatcatagtgtgtaagtgtacatattaggagtaatcatactctaattatgcatttttgcttattgcaagaatttaaattaaatttggttgtatttcttctcggttcttgcagttgtagttaatttttcacttgttctaattatccaatttccaagatgctatttgctacattagacaagcttgtgcatattctgtgaaaaaatgtaaaatttgtttccacatggaatgattttaaggtgtgttttgaaatggatcttggctatcttcatatgtgaaacgtgttgttgtgcacagaaggaaacaatagaagtctcctgatctgtctctttttaagaaaacataccaggacgccagttaaatcaatttaaccttgaaccctgttggattgatgtgaactcgatagttcttactacttatgagttttatgtttgcaattaatctagtttgagcataagatgcaattttctttgcaaaacataatgtctatttactgatgttttattcctcccaaatttaacttggcagtgtatccgatttgcttgattacattaatccaaatcatgatgggaaaggcagggatgtggttgccaggaggaaaaacaactttaaggtacaattttatattattttatttttccttttctattttattttaagtgtgggcaagtgtttaatcatattgccaaaatgtctatccatggcaccacacctaaatgtaataaatgcaagaaccgtattaaggatcctctaattttaaaaggagaccaacgtggcactttattgctgccaaggtaagaaaggtaaccttttctcaatgggggtcaaaatttttaatactaaaaaaggctttgggagtaggctttctaattatgttcatgccattgattcattcttgtttttgcatctgcatcctctgctttgtctcaagttaatgcttttcatctacaatttatttatatttatttcaaatttcccttccagttgaaaggaaagtcttaccaaactgtcagcacagcaagttctgatgagtctccgaaagaaacaccaaaagagacttcagatgaagagacacctattattgaaccactaattgacccagatgtcagccaggagaccacgtctgcacctgttgagcctcagctatctgtttcagaggaggctactgtcgtaaagccaaatgtttccaccgaggcatcttctgatgatcttgctgaaggagaaggatggcaatcagttcaaaggcctagatcagctaactcatatgggcgacgtcttaagcagaggcgggcaactattggcaaagttcttacttaccagaagaaatatgtggacaatgagattgagtatcctgtagcaaagaataatgctcagaatagtaggtattaccttttaaagaaaaggacaatgtctcatggaggttatacagatcagcatactgtcaatccctcccagggtactaggtatggtcggagaatagtgaaggctgtagcctacagggtcaagtcaatgccttcatcaactaaaccagctacaccagacacgtctagaaatagtggctcgggtttgggttcgccagtagaacctgaccgaaatgcttcactaaatgagaccaatagcctgaaaaatcctatagtcagtcttggaaaatctccttcatacaaggaagtagctttggctccaccaggtagtattgcaaagatgcaagttgggatgccccaaaatgttcaagaaaaccttgaacgtgatgttgaaaaacatgaagaggaaacaaacgaaaccattagaaatgttgatccaatagttacaggtgtagaaaatatacttgaagagaagaatgatatttcttcacatcgtttaccagaggaaacaaaagttgtgataacagaagatcagactcattcaactaattcaatcgatgaaaactcttctttgagagtgtttgagagcctggatggacttcgacgcagcagcgttgaagttcgtgaagtggtggaagatagtgttctcattgatgggttgcaaacttcttttgctgtgccagaagtgggactgtgtgagaagaacccgtccagcagttttgaactccaggttaattcaaaccccaactttccagcaacagaggagttgagggacaaatcttctgctgtaaattcagttgatacacgcacacttacaaataagaagttgtcagcatctgcagctcctttcaacccttcaccaggcattgcacgtgctgctcctgtttccatgaacattactcttcctgttggtcctggtggtgttccaactattgctccctggccagtaaacatgaatcttcacccagggcctgtcatatcccctgtgaatccaatgtgctcctctcctcatcatccattcccatctcctccaacaaccccaaacatgatgcagccattgccctttatgtaccctccttttactcaaccacaaagcagtaccttcccggtaacaagcagtgcgtttcatcccaaccatttcccatggcaatgcaatatgaacctgaatgtaccagaatttgttactggtccagtttggcatcctgtggagttctctgttccgacacctgttgttgagccaattactgatcctgtattggagccaagagtacagcctggtgattctgctccaatgttgccagtagacattgacaatatggtggaggttaagagagaagtgaatcttcaagcatcagaggcagtgggtaacatgaatgtagttgggtctgagaatgtaaaggaaaatggtcctcagaagctggtaggacctgaaaatgctgaaaatgaaccaaataacatcagtaatggaaaacctggaagcagtgatgtaagcaagatggatggtgaaaaaaccttcagcattttgattagagggaaaagaaaccgtaagcagactctaagaatgcctgttagtttactcagtcgaccatatggctcacagtccttcaaagttatatacaatagagtagtcagagggagtgatcctcccaagtcaaccagcttttctccaactgaagaatgcacagccagtgctacgtagcccctttgtcattcttgccatcctggtataacagtctatgaaagaagagagaaattaaaaccttttatcatatgcataacagggacagcacaggaccggatcttctttggctttcatattcaaaacatctaaactttgttcttgcaaaaattcaggttagttctctaattcaacattgttggaagtttttattattatagtgcaatctttttcccgtttagttgtatttccatcattccatgatcaatttaagaacaatagcacctataaatttgctagcgaatgcacctaaaaaatcatgctgactgatcaaaggggtttcaactgattcgcagattcacaaatggaaaatttcacttttggacttccacgagccttcttgaggttacaattttggctttcattgaacaataggaaaatttgctattttggaccacaacatttaatacttgaattagttttctttcttttcccttttttcatagcagtgacttttcctaatattattttgtatacgacctcaaattttgcctttttagtttttgttttttgtggtttggacaggcaaacgatattttattgatcaagtttgccaatatcttatctgctttattttctttttgaattgttggcaatgcaaaataagctgttaccgatgagacccatatgtgtaccttctgtacaattacaaacatctgaatacaatatttgatgttgcatctatatgatacaggaatgcaaacaaaagtgcaaaatgagatatttcaattacctttctcatttcaaatcttagcaatagtttattcactctatcccaactgtttcttagtttcattgggttgtaactgatatgaatgcaaaacgacgaagattatatttatatttgcattttattagtaatctttgttagttggcatggataaatatttagtccgttagtttgtaatatattgatcctgatgtcgaagatgacgaggctcttgttattgttgaagggctattattgatgaggggcttataattaaagatggtcatgttatcggagaaattttaattgtaaaagatgtcattcaaaatgataatcaacaaagagaagctattctaaagtactttctttaaggaaatttcagcggtaaaaaaagtcaacatggtaaccgatataaaaaatcagatgaaagggttttatttcctctctccatatattgaatcactaatttcttgggtaattgaagatcctatggtttggtggcctggaacttcttgtggtatttgagcttgaacatgttgggtaacaactagcaagagccaatatgagtaccactgtgtggtgatgagataaaaggcgctttcgtaggcttctttctcttgtcaaattttgctaataaccaatattctagtgttacgattaatattcctaattttcttttaatcaagtcaagttaatgcttaaacaaaaaagattttatttcatttatttagataaagtctctggttcattgccttagacaaacgtaataaatacattcacataattaaaggcaggtacctgacatttttgacataatttagcataattcgataataaacaaaaagcaacaaattgatcatttacaaacagctagtaataatgacaatcacctaatggcctatgcctactatatatgatctccaacaagggaaacaaacaagcaaaaagaacattccaatttaacagacaccccttctcactatagtttccattccctttatatatacatggcagtgtgaagaccagtataaaatttcattcaccatttgacacttgtctaattcatcaaaaaagggctttatttaggcaatctaaagatatgttcttcaccacttttctcatcaaactcaacaacccatttgctctttttaccacttttcttaacacaaccacctcttttaccaatcccaaaagaagaagcataattattattaccacagccactacaacttcctgatctcttcctactaatctcatccatattattagtggtcccaatcatggtaacttccatgccttttccaatagggtgcttaacagatctcacagcaactttgtcctccaacattcccctgacacggccttccaaacctttcctttcacttgccaagttattagccacaatcactgatcttcgagggttcacatctagctgattcagcagccttgtgtagtcctcgttcttacaatcaacaagtgagaaatcaatgttttcgtagcttgacaagagctcataagggtcaccagttttgaactctacaacgtgccttaaacccgattctttgatgactttcttagactcggccagaactggctctggtagaatgcacactagtcttcctcctgtttgtcttgctgcggctgctaaggctagtgtcgatggtgaagccgttgatgtcacttccactatcagtttggctctcattccggctgccaaggccgacacaaattcgttacttccaagctcttgtgtcttccatgactcgactcgtctcttgtgatcattacactgtacatacacaacgaaattgttcaatttttattagataagtaccaacaaaatcaagagagaattctacattctaagtctaggctgtgtaaacatgacatatcactactgcaatttaataatataatgagatccaagattcattaaccatatagggtgttgcattggagagtaaatcatctagaatatactatagctaatctaataattatcaacatctacctagatatatatgacatctcaatgtttattatgtttcaataaaagataagaattcaatcaaatccttaatcttctcactcattagaagaatctaaaaccatgtaacaataatctgttgtttcatagtttcatttcatccacctcaaacagggaaaaaaaaaaaaaaatctttaaccttttttagatcctaatgtattgtctaaaaaaaaaactgcacaatccaattttcatttatctcaataattctacaaatacgaaaccccacctaataacatataatttaatcaattacaacattgatttatcagacaccataataggaaaatcaaataatttagaataaccaaaggaacaaaattccttataatataacactgaccaatt

SEQ ID NO: 13991 - DNA, 10618 bp, Cannabis sativa
ttgttttattgatttttcagcaattcttggccatactcaaaaattcaataaatatatacgaataaattaaatatatcatatgtatattagttatgtatatagtacccacttgttagttgtaaaatgatatagaaacacatgtttttgtacttaaattgtatacctaacctaacccattaagtctataatattatgatttattaaatattaggaaagaaaaagttggagtttatatatacatataggtggaaaaagaaaacttcagtggatataatcaaaattaatgagtatgaaaacaatattttagtttcaaattaaagatgaaaactaaattttctaatttaatctcttcatgaattaattgatataatacttaacttgggagatgactatatattaaggacatttatgtttttaatattgatcaagaaattaattataatctagtttttaatataatagtctatattatagttatagtaagtatttatttattttttttaagaaaattaatactttacaatatcaaaaataaaatttaatgattatcattatttttttaatacaaagtttctaatatatacaaaaaaaaaaaaaaattaaattacaatttttctaattgctaaaaataaaaatattccaccctataataattaaaagcgaaagtcatatttttactacaacaattaacattaaaaataatagcatgaaaatccggctaataaataataaattatagttattaaaagaaaacaaaatgttgtgattaattagaggagttattgattaatgagaattgttattttcaaaataagtgttgaaagtaattatagtcggttatatttataggataaatatttgtgggctaataaaataaaaaaaataaaagtatataataatagtggtagcgtgaggtcacttttgggttgggctcactctcatacgtcgctgtcaatcataaattagggaaagcaccaaactgctgctcctgccatcccttctcttctctcctctctctatatatataaaacacattacacatacagagagagcgggaaattaaattaatacttaattacttatttaattattattatcatcatcaatcttctttattattattataattaaatcaaacaaagcttttacttctcctcgcctcccttttcttcttcttcttcttctctttctctctctctcaatctctgagctgaatttcagaaccagaacaagtgaagagaccgtcctcatatctcaacttttgttctgcgtttgattatggagtctcaccacgcacgcgcttcttgatttgttttagtttcttctttgttttctcagaatcaaccatggccgttgcctttgatggcttctcaattcggtaaacctcgaaactctctctctctctctctctttctgtctttagatcttttgtgttttggtactgttatagctttattatttctttctttctatctctatttcgattttttgaatttgaaaattatgatattaagagagtacacggctaagatgaggagcgttgacgtggccaaatgctggcccttctcggagaaagcggttgcgacgaaaacttcggaacaggttgaggcgttgcttcctcctatcaccgtcgccaagttcaagtggtggtcccacgagctaaggcgtcttcgatccacgcgccgccttgaggatgagaaatcctcagacgagaaattggagatggtttgtcccgtttgccgagtttttacttcagccacggtcaacgctgtgaacgctcatatcgatgagtgtctttccggtaattattctttccagccgccgccgccgtcgacgacaacgacgaaggaggcgcgtcgtcagatcgtgaggaataacaactgtaaggcgttgaaacccaaatctaagccgcccaaaaagagatcgattaccgagattttcgctgttgcgcctcagattgagacgattgagagtagtgagatgagcgataaggaaggtgacgaggttgaagatgaagatttagaaagagaagaagtagttgctgatgatgattcccaagttatttcaagtgtgagtaaaagtagtagtagtataattagttgtagcagtactggtccattaatgaaggccaagaacaagaagaagaagaagaataacgctatgaagaagatcagcaaagagaataataataataataataagaagaagaagaagaaaagagtattattaattgaaaaggagagcggtatggcaagctcgcttgttttgaagaaactcaaggaaaagaagaaattcaagaaagtgttgaagaaaatgaagaatgttgatttgtctaattcatttgcaactaataataaggtatgtgattattttcacctcataaaatattgggttctttactcttcaactgtttatgttattaattagtttgaaattggaacgtttattacttgttgtgaagtgttttaaatttaattaggtactatatgaggggtaacagctaagagagaattatatgggtatttttttttttttttcatttctgggattgaggagaggattatggagaggggtttgtttgtgggggtggtgctccagctgtactgtacgggttaggcagaaagggcttttataacgtggtagagtttttttgtccttggtttaggaaatgcatcccaagctaatgatgctgtctttctctactgtttgagttatatatatatatgtgtatatatatactttgtggaagataatcatttgtccatttgggtcgcgatatcgctctattattttctgatctgatggttagtattagatcgtatgtaataagatgggaaataatgttgatgaattgaatagatcattgaagagtcttgtataggcttcatcttttttataggagactttgtcggttctacttctttattattagaagtttatatcatttgaatgggagtaatattatgacgtatgtatataatttatttatcttctgtacatgaaatattgaatgatcaacataccccagacaactaaaactcgttatcgtatgattttttttgcgttatttttcacttcattttgctcctagtgaaaatttaatgtcatacgttatacatgtgtgtgttcttattatttattaagattaagatgctaagcttaaattgttttaattagttacgtaaagtagttatatatattgacaaatatcttattacgcgttgttagagccatcatttggattttactagtatatattcaagaataatattgtttgtacgtatatagcacaaaaaattaaaaaaaaaaaattaaacttctctgctagttatgatgaatgtgaatgactatatatgctgtctacgttaattgatgcacttcatattattatgtttgtttttttttagaatattatcttcggggctattattctttgcgtgattttgtgataagaaatataacaaagttgtgtaattctttattatattatttgatgataagaatgtaatttttttgctaaatgtctttaataaaagagttaaggatacactatgagggttataagattattcgtatagtttaggataaatagtaatcctcagtacttatctatctttatggaagagatctcatttaaaaaactaaagcataaatattgttttaattatgccccccattcagccattaatagattattttattattattttcattatatctaggttttgacaaataatgagaagatgctggagcctacatgcagatacctatctcttcaatttcttttagcataatttttttagaaaaatctgatcgcttcagggaatatattatgacctatagggtcatgtaatttgttgcatggacaataatgtaactaaggctaaagtagtaatattcatatttatatgtgtgtgaatattttatagtatacattagattcagtatcgaggaattcaatttaacatgttgtgtggtcatgttttttgtaaagtggtctaatgacttgagtgatataggtatagtataaacattatttataacaaggcaccgactatggtaaagaatctctttgaagctttattttttggtttggtattaacccatatattaatgataaatttgtgtagaagtccaaaaaaccttaacattaattctttgggaggtgcaagtgtttttatttatttctccttatagtcaaattaacctgcttattgagtttttatttattttattttttgattgactaatttataattagagttttccgttattagttctcattaatatttttttcttagttagatccttgatgtagaaaagagagcgtttctatgtgatatgtgacgaatataattgtttgaacatgaaaacccagtggttaatttctcaagattttccttgagccgattgtgttatttggagcttcatatttgaacatgaaaacccagtggttaatttctcaagattttccttgagccgattgtgttatttggagcttcatatttattttgacatatattattatcatcggatgggagagagagaaaataaaaacttgatttatgagttattgcaactctacttacccatagatgaatctcgtttttaatcatcttatagattgtttccatatttttcaaggtgtgaaatcatcagcacttggtcgcttagagtgtaagatacatcattaattatgagtttcttgtctgtaccagggaaatgttcaaaaattcaaactacaaaatcatgtgattgcaaaaaggctgaagaggaagttttcaacagatatctcaaattctgattctgtctggggaaataaaacaagtcctaaatgcttagctacactagagaagcaaaaatgttttgatccaccgaaattgatcgtgaggaaccaggaacctgccttacccattcgcagcattcttaagaatcataccacttgtgagccgaaatctactactgttgatgaagattttcaatgtggtagtgaagccaatccttgtggtattctacaatcagaaaggcatgttcgtttttcggacaaagaggacatacttggaccgaagagtaaagaggtttgttcttctgagcaaaatgataggaactcactttcagatgcacttgctgcttcatcagaagatgttcagtcatctgacaataaatcagcagctgtggagatagagagaagtgatgtcgatagcacttttggcactgattttggaagtgaggttcgaagcatatttggagggaaacagttggctgatatccatcatgcagatcttccaagttctccgaggctacctgtaactattcgtgacaaaatgaacctttttcctgagaaaagttctttacctttaagtcaatgcgcattttatggtactaatttgcatatggttggtcaagactttgaaaacaaaaatcttaaacatggttttagtggcacacctggactcttttcaccattggaaggatctcatggaagcactcaagcaactggtaatgtttctagaattttcaattcttgtggaagatcaaattatcattttccagatcctactcacaaagttgctgagattatgccaatgatagagacgagaccattttcagaaccatcatccagtttcactgccaatgaaaattcaagccgtaggcttcagttccaatcacaacctgctgtggaaaacgctcgttgtcatactttatgctaccaacaattatgtcgtaggcgtccaatggacttagttggtgggttttgttcttttccagagtggaatcatagagcagtgacctcaagagaaaggaccagggaggaggatttcttcggcttgcccctcaattcacaaggtgagttaatccaatcaaattcaaggggtaaaggtttgtataatcagctgagggagacaaattttgctgggccttcaagtagcttttacgcgtcacataatcttacccagccaagaattactgcagactacttgagtgttactaacaagcattctgtagagagagatcttccaaatgatcgggtaaatctgttccttacacagaattatgttaaagagaactctagcttacaagttcctgcaactaggttaggtgttagttattgggaaagtagtggcaaagcagatattcaacagcttgatttcggaagagtaagtaatcattcttttcggccacttgatgcagatcttaagctaatgggtacttcttttcttggaagcagacattatgaccacttgcagaaccaaataataaatgaaaggcttcaacagaaggaaagttctggtaagatggcacagaataccagccaaccaacgatgcgtttaatgggaaaagacgttgcaattggtagaagtagcacagatgtgcaagtaaaggacgatagtaataaggtttggaccgataaagaaattatagtagagcactgtccatcagttgctggcctggattgttcttcactgaaaagaaattttcaggagtggattccacaaaagtgtaaagagaatgtggggagatctctagatcttcacagtgagaagtctactcaaacaaatttaccaatgaaagcaacagagtctagttcatatccttaccttgacagagagaaaagttccttaatttcaagtgatagccttgctactgatagaagtcctagtgctacttcactccctttctctcgtttacctcattcatcttcagtatttaatcgggaacccaatctccaggatttctttatttcaggaactgaatcacgacttgtttctcaacatccggtgctatctactccacagaattcttggcagtatatggattggagaccagctgaactcaatcaccatcagaccttaccccattttacaaaaccaggatttgagtttcctttcttaaatccagattctagggtagatgtccaatcctcatggtttcagaactccaagagcctgccctcttggttattacctgcaaggcaacatggaaatacatcaatgattgcttctcagttgattccaaatgcaataagcaaacaacatcagcacatttcatccagaacaagttttctcaacactccatctgtttaccattcaggagaggcttgctctttttcttgtaatccaggaggcaattcgcatttccaagtgaggagctcatttgattcagcagacgctgtaactctcccttcaactgttccagtcatccccgggttaaaaccaacatctgtcattgatgcaggctacagaaataggttgaagatcaaagaaagacttaaaccgaaagctttgggtgtgaaagacctttatccttacaagaaaacaaacaagaggcttcataccaaattgcacgatctagtgaagtccaaagaaattctgaactctaaaaagcaagcaaattcgagtgttatggcgagatgcttagagaattcaaacaatgaaagacaatctgatatggtggaagaattccttcattcaaacagatattattcaagtgaattttgtagcagtggaatcaaaatatctgcgaacgagtgtccaagtgctgatggttcaggaagaccaggtcctatgaaacttagcgcgggagcaaagcacattttgaaaccaaaccaaaatgttgatccagaaaacttcacgcctgtcgtccactctaccatcccctttaccgccgttcctaatcctaacgcgaataaggtgcctgactctcataacaaatcaacaaaaatctacaggttttagaagtagctagtaagtcattgtatatatgctagtactagttatatatttcaataattaatattacttgatgtttaaaggttattaaccttaacatggttactgcctaggtaggagagagtagagtgtgctgctcatatatctgaccacatgggcctctgagttcgatcgaagaaacctgtgatgagtagcaatcaacaatccaacaatgtgggaaatgtgatagcatatggttagaatctatgccaaaagcttgtttctttgtgtgtggcatttgtaatattatatgtatgtttgtgttaatgttagcttttatgcttgcctcaaaacatagttttcctctgagcaagcttaaattataaggaataggaatatgtactttaatatggagaatatgtattcgactcattactatattgggctgtttttggaattatcatgagttggaatattggtgatgattagtttttttccttgcaaaataattattattatttatagttgcgtccttcaatttgaatttttaatttttaaaattacaactttattgtactacaagtaaaatcataaaagatatataagtcacattcacatatttcaaatatttatatatattatttacatataccaacccctatggcaattcgtgtttgtgtgtcgtatgtgtcgtgtaacttaggtattacaaggaaataccaaactcaaactcgtcccatttactaatcatgttgaaaagtaaaactcattttttttataaacgggtttacctgatacgatgtcacgactcatttaacctatttatataaaaatttaattttgattagcttatcaactcattaacatgttataacaagtttgacatatttatattctatttaactaaaaaaatataattcccatgttataaatataataaatttaaaagtgtatactctatgtaggtaaatatcgtgttattttgagttaagcgtgtcaactcaaaaatgactagtttaataaacgggttagttgtgtcaacccaaaaaatgacccaaattcatttacagggaacccaaaaccgtttatttcgtgcgagtttcgaatcgtattatcgtttctgacccattccaaaattctaaaagtatttttatatatatgtttatatatataagctaccattaatataaaaggagaaaatactagctagctagatgcaaatatccaaacacttgcatcttgcgtggtagatacaaattgttaagaattatggagttccatctcaaaatcaattggtgatgaatggagtagcccatgttcttatatatgactcaatacttttacatttaatccacgtgggacaatattttccaatatcctcaagatagtgactatttttgctcaccaatcttaaatcgccttatcataagtagtgtcatttggtcgtttttcttaacaaaaatttgcggttgggagttctatttgctcgcttcttcttgttcgcggctaggggtaccattttgctcgcttgcggctggctaactctttgataggtgtggatcaaaagcccgctagggatatgattctgataccatgttgagaattatggggttctatctcaaaactaattggtgatgagtggaagtagcccatgttgtcatatatggcttaatacttttacatttaatccatgtgggacaatgttatccaatacaaatcaaactttctggcagggcacgaaactataggatgagctcgagtgacttgaacacgaccagacacaaaaaaaaaaagatgggcttgaaaatgatataacttgatgctacaaattggcactatatgactcgacaagtccaaaagacctgccacgagtacataaaatctaaatataatgaatatttataattaaaattatatattaatttatttgtagaataattttaaaaatttgaatatttataaataaatgttaaattttaataattatagcaattttttatatatgttgtctgtacaatattcttacaaaattatataaaaaataactaaagctataaaaaatgaatacctataatttagtaattagcttagtaatagtaaataaatggagggaattgcattgtatatctactttactttgtctgttttaatttttatctttatttttatattttttaagatatatccacttttatagatgatgttctcctaatacctcttaggtaaatcacgtgctatatttaagtagagggcaatagtatattaggcaacccactcacaaaagtggatagattttaataaaatataatatgaatgtatttttgattaatggatacaaaaaagaaatattcctcaacttatcctaaataaatgtgaaaaagtaaagtaagaattcaagcccaaatatgataaacaagctcacctgttatgaactggcctaagaaaaggacgttatgaaataccgggcctactcttcaaaaatattagcatgctacggtgcatctcatattctttttatgacatgacaataaaacatcctatattttaaaaagcacgacaaaatatgaaccaaactaacacaatacgaaacgtatttacagctctacctgcacccatggaatattatagagtttatctcccaagttttgtttttggtttttcttttgttgacatttaaggaagggttcaaatttgaagttcaatttttgtgaagactgtacatgttgtcgatcatgtaagaaagtgataatgctttaaagtaaactgatagttaaattattatatataaatttaaaattacactatatattaattttggcatttatttgatatttgaattagtctttttatatattatttcttatagttccgaataaattaaataatatcctctcaaaaaaaaaaaaaaa

SEQ ID NO: 13992 - DNA, 7193 bp, Cannabis sativa
  modified_base (2279)..(2283): a, c, t, g, unknown or other
  modified_base (5893)..(5893): a, c, t, g, unknown or other
ttttactaaaattagaaaaaaattcttaaatccaacaatctaaatagttcaggggcatttttaacgatcttaaaagtttaaaaagcataatttggaacatgtaaaagttcaagcggcaaaaatcctaattagccttccaataattaataaagttaagaaagaagaacgacttagttgggccgggggttggttgttgttatggataacgatcaacttgtaaccgtagttagattaaatagtacttactaactatggttaagttagatcagagtgtttaataatataatatgtcagaaccagatcagaccaaggaagtatagtaaaattgtgaaaagaaactgaatgggatctttaccgatattgaatctgagtctaagcagcatcaatctatgtcgccggggattggagggagacggcgggggaggaaagaggagcagcagcggaagagtagtgagagtagttagagcgatggcggtaccgaaatttaaaggaacacagttgagagagcaggtattgacggagatgatcgagaagaaggtgaaggaggcggaggaagtgtgtggtgggaaaggagaagtggcggcgtcggaggagtgtaaggttgcttgggacgaggtcgaggagctgagccaagccaaggctgatttccgtcgtaagttggagaagcaagatcctctcgagtatttttgtcaagataatcctgagaccgacgagtgttggatctacgatgactgatcgtcgatcatcatgaatgattatgcgtatgtatattattgatcgattatgatgtgtggatgtatgaatcataattataattattgtaatgatcgatatattaatgtttttattagtttttccatattgtatatgtattataattatttcattaaaaagtatttataacaatattttgtttggttcttcaaaatgataataaagactatctttattgattgatatttgataccctaaagtctctcaccatcgaaaagagaaatatacaattttgattttgatatgattcaaatttgccttagaaaaaatcaccaatttgtgtaaaataaactcatcatatgcaaactttggcacttatttcttgttattgttatttatatatttctaattatagttaagagttcacaaattccattacctctataattcatctcgtaagagcggagatgaagcaaaataataaaaataaaaaagaatttgcggcgtaaatatttaagtttaactttcggttataaaagaatatttaaatttaattttcaattgtaaacaaatacttaagtttaactactagttacagataaatacttaagttaaatttttgacgataataatatttaagttatatttttaaaatttttgtgtgtatttaatcgttaagtgtcaaatcattatttatgtgttatgtacttattggtattttaaattaatttttaagtaaaaaaaaaaaaagaaaaatgatcacctaaaccattcatagactaacacgtgattattgactttacacttaacagataaatttatctacaaccaaaaattaaatttaaatatttataccgtaaattactcaacaataacagaagtaacttatcacaaaagaaaaagaagttaataatattgtgcacatgtgtatctagcattacttaagaattgaagagtatagttaagtgtaattatataattaatatataattatctaattgatcaaaaataccaaacctcctaattacttaatattattacacagtgatacctttagtgtcttggaaaattcacataaattactattttataaattttttacacttttacgtttaattttttttttttgacatttttacagtattcatataaataacaagaaaaccatataaaaataataagaaaacaacataaaaaataatatataaataataaaaatcaacaacaaaataatacgattacaacgtattaaaaaaaatacttcaaagaccatacattatataaataaaactttaaaaacggtaaaaatatttaaaattccgtacaattttctaatttatttattttttatatatttttagggtataattacataaggcactattttttgtaaaaatatttaaaattttgtacaatttgtaattttttgtgttttatatattttagggataattatataagatattattttttgtaaaaacaacagcaagaatttacatacaaataataaaaaattagtaacaaatgaacaagaatacaaaataaaaaaactgtattttctgtannnnnaataaaaaaaaaattataaaattttttaaaattccataaaaccgtattttgtaattttttttattatttgtgtgtatttatgaaataatccctatattcttaaataatcccctatgtggaaatggaatggaagaagaataagtaagcccattgggctgtgtaaaaagcccaataattaaaggcatggccatcagtactcatattagcttcttcatcatcaacatccataattgtggggtagctagtgagtggccgaaggaggaggtggtgatggctgtgataaattcacagggcttgggtttgggtttctcaacctcagtctcatcctcttggaggcttcggaagtcaaataaacccaacttcaacaccaacaagagatattcctgcaaagcttcatgggaagaggtgggttggtacagtacagtacagaacagaacagaacagtagtttaatcataatatctgtaactatgtatgttcttttgtgttttgaatgtttgtaaaattatgcgaagctagctagctggtgtgctggtcttctctgccatacctttcacagcagtcaaagccatagctaatagcccacttggagagtcacttcagaggcgattgcagcaaaggaagaaatttgcagttcaaaattctgccaagttcaggtctttggccttaaaagctagacaacagaggtaatattatgattattagtgttatggacgaaattttacaacaccaccaaattgtgagcagcaaacacacaaaaattactgtataaaatgtattccaatatataaatttacgcaaaaattatagtggttcggcccgagatgaaagactactctttgctctgtctttttattattcagcccctctttgaatggaggttgattaggtgaactgtacaaaatatgatcataatgagaccgttgtaactataattggcatattaattatatcagttataaagtaaatgtaacgctctttttaacggggctgatcccaaatgaattgagttattcaaaaaagctttgttctttctggagttattgtccattgttgacctctatggtagaatcagtcgggggcttgtgaggcagtagtttaccttatggcggatgtcagcggtttgagtttacttatctccaactcgtgaacttacccgatacagacacttgaatttatgactgttatttgttaatttctttattagcagcgacacaaattaattgtgtaacataattattatttattttgctgtattttctatcctatttatgtatgattatttgataaagcttgtggtatggagaagagcgtccgaggtggcttggtcctattccctacgattatcctcattatctcacaggagagcttcctggggattatggttttgacattgctggactcagtaaagatccgttggcttttcaaaagtatttcaagtaagcccataattgagttaagtcatttcagccaattctagtggtatctaactcactaccaccacattattaccttttctttcttaactcagtaatactgctaagtatcttattactactaatactgtcattgcagctaattggggtgggtggtatagtattaccaactactaactcactacaactaatactaatgttattagtactaccaaagtaacttactactaattctgtcattacatgaattacattgcagctttgaaatattgcatgctcgttgggctatgctggcagcccttggtgctttgattcctgaaatattaaatctcactggagcctttcactttgcagaacctgtatggtggcgagttggatattccaaactcaaggttcagttttcttctttttattaaggttatgtttggaagttagattttggtggagaaagaaaaaaaagtagggaaaatgtaaaaaaaaataacgtaatttggtactctctacagaattcaatcagatacttgattgtcattttcttatcaaattgtgaaaaatattaactactgttttttagaattcattaactaaattatcaaaataatgaagaaattaaggtgtgtttattatgctaaaaactctttctactaccaaccctttaatctaatccaatctaatgtaatataatttctctaatctgtgctttaatttctttctccagggagatacactagactaccttggcatcccaggactccacttagcaggaagccaaggagtaatagtcattgcaatttgccaggccatcttgatggtacttacctaattaactctatcataatcccttatctgtattatagatttttcatatttatatatatatatatatatgtatgtataggttggaccagaatatgcaagatattgtggaattgaggcgttggagcctctaggaatatatctaccaggagatataaactacccaggaggagcattgtttgatccattaaacctctccaaggatcctgaagcatttgaggagttgaaggtgaaagagattaaaaatgggaggcttgccatggttgcctggctgggattttacactcaagcagctttcactggtaaaggccctcttcagaaccttattgaccacgtttcagatccctaccaatacaacatctttcacatgcttcattaatttattatattagattctcttctatgctctttttttacttgcttgtacatattgtatttctatacacatgccatgtctgtatatatatatatatatacatatattatcaactatttatttatattcttcttccttccttgaccttgagtaaatattaaggaaaatgcacatgtttgatcatagagtcatcacatttttctctttgcatatttcagtttatatagctggccagatttttgtttaattctgttgttattattaattgaaagttgacttggaagttttaattaaataggaatattacattaatttcatctctacattttcgccacatgaaatgctaaaaggtattattggtatttagtatcctcttaagtgtcatactgttattggtgtaattatgtatcggatttcgtataatttaaaaaaatagttttcagaaatattgttaactaattgtaggacgtcacttatgaaaagtgttaggcaccattgacgtccaataacaaaacacaatgctctttggccacccctaaagaattaaattatactttgaatcaattttgttcaatttatgaatggtcagggaggcattgatagcattggcagggcaggctacactttttcattttcttttttctggtcttatcaaaagcttaatcatgaaaatgagatgtaaaaacaatatgaaaaggtgaaaatttaatcaatcttcacatccgatgttaaatttgaacgattggatttgattatactttgttgtttgtgtaataatcaagaattttcagccacgtgggtaaatgttttttttcttatcttttttaatgaaaaaaaaaaaaacaatattactgtacttattcatctctctaaatatagtatcaacctcttattataatttcttaatcgatctgtgttttatttttttttttttatgattgtgtttgttataattataacatcatctctgtaaatttttgaanaatttcgaatagtttacagtgtcgaaaataagtttgaagtttttcaaacacacgtagtaaactgaaatatcagtaattttatttttgatactgtaaactgtttagatatttttaaaaatttataaggaatatattataactataacgaatgccactatagtaataagaattgaaaaaaaaaatatttcagcatgtgatttcaaacgtaaaagttgactaaaaaattataataagatgttataattatcgcttctcatataatatatatatatatgagatatatattaataacatcattaaaattttacaaatttatgaggtaagcattgatatttttgtttaaggtaatggcaggtacatttgacaatattgttgatgaaaaatggttttggtgatgtcaaagggtaattgaatgtagaaagtgacattataggattaaggcaatcgccactaatatgaatatatgattattatagccttaattcgtttgtacggctgtattttctgaattgaaaatatatatttgtctcttttgtttgttccttaatttgaccaattatacaaaatttaattgcaattgttaacatgggccgatcgatggttggcccattttggaaaagaggggctctttcttaatatattgtgggttgggccccacccacattaaaatgggaaacacgtgcagcttgatcataaatgatgatgatgaaaaagttgaaagatgatcttgaccgttgaaaagatgaatagaagagataatggatgaggatgtggttctatctttccgtacaaataggaagtgggctaggcagggtgggcctggtgggccggtcgcggggtagtggggtattgtttggcccacaacttccaccacctcgcctacttgtacttgattgtattgtctatacctctcaatgaggggaatcttcttccatctttcttcattcccaaaactatttcttttcctttatttattttaaatattcttatcctttatctctatattagggttttatgcaacgttttagtttgtaaattcagttcatgagggataaaattagggatgtacacaggtgcggaattggcagagagtgctttcctcatttccatctctgttaaaaattttaatctccattcctgttccatcctgtgtattcttcatcgggaatggaacgagaattttttaatggggcgaggacagagcgggaaatctctaatataaaaataaaatatattttaaaaatttaaatgtataaaaatattaaattatataaaaattaaaaggttttttttttttttt

SEQ ID NO: 13993 - DNA, 4936 bp, Cannabis sativa
ttctttggctgcagttcttgtcgctgttcaattcaagtgctgcctttaactgtgaaattatcagggactgttacgaggcttttgcattgtactgttttgagagatacttgattgcctgcttaggtatgtctttagatgcctgtttttttcaatccttggtaatgtatatattgttttctcaccacggcattatgtttgtgtgttttttactagaagtgaattacccgtgctcaagctcaaattgactgattaaatatggttgtttttgtttgttttggggaaatctgctcttactaaaggtggtgaagagaacacaattgagtttatggaaggtcacaacttaacagattccaaattgcctctcttaaacgaggcttatgcttatggagttgtggaacatccatttccactaaattgctttataagagattggcttcttggtcctgacttctataatgctgtgaaaattggcattgttcaatatgtaggtgctcatttacttttctcctggagtcctgaaaaactttttaatttctggttttcacctcgtctatttggttttctattgacatattatccagatgatactaaagatgatatgtgccctcctagccatggtccttcagacttttggagtctatggagaagggaagttcgagtggaaatatgggtaagtgtttaactccttttttctttcccttgtttggatcataatatttgctcatcattatgcaattgtacatgtttcttgtaatacacattttaaggacacaaatataactgcttgatgtgctatgtatatgcacattcattattgcacctgcttaaatgactgaaattttatatgaactgctctcttccatgtaagggaattgataagatctaaccccaataaacaaagacctatgtacccttttatttattctcttatactatattctattattggggttcaacaggagtgttttttttttttttttttgaccgaatcccatctttttcagtgttcttgtttttggattttagatatggggaaaggagggtgtatattgttaaatttcgtaattaattattatgtttttcatcattgttcttattgtgcatattctgatatgaaactttaattacttgcagctacccatacttggcagttgttcttaattttagtcagacctgggccctatattgtcttgtacagttctattctgtcacgaaagagagattagaacccataaaacctttggcgaaatttctaacttttaagtcaatagtcttcttgacttggtggcaaggtattgctgttgcttttcttttctctatgggagcctttagaggggctctggcgcaggagctgaaaactcgaattcaagattacatcatatgcatagaggtgtgtgtttatgtaatagtggtgctacattgtgttacaaaactaaacttttatttttgtgatgcaataaatttctagagaaacaaatatggaatcatggaccttttggttcacgggcaagccatatgcggggatttagatttgtttaacaaacttcgactacacaatgacttggttttactagagaataagtccaaacattattgaaatgggtaaattagtgttaagtctaatctacttcaaattgtctcacaagacaactttatacaagatatggttatttaaacatcatgttatgtatatttttgagatggacaacaaagtcttcatctgaaattcctcaagctaaatatgtttctgattgtaaatttgttatacagatgggtgttgctgctgtggttcacctatatgtctttccagcggcaccctacaaacgcggggaaagatgtgttcgtaatgtagcagtcatggctgactatgcagcattgggttcgcctcctgatccagaagaggttcatgattgtgaaaaatcaactaaagtacgcttagctcgtcatgatgagaaagaaaagcgcttaaattttccacaaagtgttcgtgatgtagtactcggaagtggtgaaatagtgagtttatcaactttgtgtcttatttttcacttatttaatcttttattgaattcacttttgacttttactggacagattgttgatgacatgaagtacacagtttcacatgttgtacaaccagtggaaaagggaattgcaaaaataaatagaacttttcatgagatatctgaaaacgttaaacgtcaccaggaacaaaggagaagctccaaggatgacacttaccttgtccctctgaattcatggaatagagaattttctgaagttcacgatacccttgttgaagggagtattagtgacagtggtttgtcgagcagtaagaaacagaaccagtctaaagcttcagcttctcgtggtaggacagcaagataaataggtaataagcaaattccataaggtttcaagagtttgttggcgttatttttaggcaacgtcgacacacttggtgaggacatacaaaattcaggtgtgaatctatctagtatgaaaagatggattccggagctaactcattgaactgaaatctcacacaggcaaacaagtaagaagtttctctaacctaaacactggctttagtgtatgtacagatgaaaatgatggatcagcaacttgaatagttgtttgaatctgatggaccaagtaagcattttcaagcttttttaaccatacagagttttttcggatcctgtaaagctgtgcaccgtatgtgagtaagtatgaacattttaactgcgaatttatccagctccaagcctttggtacataaaagcttctacattgttaacatttgttccttttttatttagactgctcggttcagagaactattttcctgttatcgtaagagatgttacactgcatgtgattaaattggctgaatgtttgttttattttaacttttacaacactagttcccaatcttttcaatccgtatcagttagtctccagcatgttcaaattaaatcatttaggtcttcaaatgtttttcttctctctttatataaaacaatatttttatttattgtgttgaaattataaatcaatattttaaggcaaaataccatggctctcactgtttttaccattggttgatgagatctcacaagtgatccaagctctccttccaaattgctgagctagtcagctagatagcacttgatgggggtctaggtttcaggatcactggtatgaatcatgataagtacggcttttcttactatgtggacatggaaaccgctagtggataaaaactgtttgtggggagtttttgttagaaaatttcaatgggagttgtctattggagtggtttggtttgttcacatatgtaatatggtttaattttcaagactaattttgtgtaaagtgttgttgaatcaatgaatatagacaatggttgcatgacattttttaatagaaaaaataattattaatttaatgtgatgtgttgggcaacttttagagttatcattattggagtattttttaagaaaatgtgacaaattttatgaggatgagagagtgaaaaaaataatatttaagggttaggtgtgtatttgacaaactataaatgttgttccctattggaggtgctcttagatatataatccaagtatatgaagggagaatttttggaccatgaatggtgccaatgtgatttttttatgtggaagatagattgtggtgatggaaccacagctcatgccattaccaatcaaagggtgccattaatggagtaagttgggttaaagatttatctcaaacaatcactgggatactagtaagattacagaatggtttgatgatgggatgagcaaaagaatcctgaatattactttccatgacaatgggataagtggatgtggattggagaaaaacatgggaggtttacattggaatttggttaaatacttttaagtacaaagtacaaaagttagtgaaaatgtagtattacgagttgcactctaataatcaacataattcaataatgagggtgtgaatttcaatttccaatttgagttgtaggtttaggttaccataaagtttgggattaagttgagttttggagttggatagcctgattaggcaagccaaaagtgaattaacatcattttcatactgttgttaaagtgctctaatcttattggatagttttaagtctagttcttacactctataaggacatgtttaggtagggttagacaaaacttgatcaaccattttcacacttactctaaaattctctctctctctaaaaaaaaaaagcttctctaatttcaccaaaaaagttaatcaagatttgctaggattgattctctaaaagcttgaaatccgaaactttcatgtgtagaagccacaagcaaactatagtggaggcttggaatggagttcttgaattacatttgcttcaatgtgtaaagccttgcaagttttaatttgtttgtctcaatcaaatttggggatatctaaccctaatctcttcgtgtttatgttgtacatctaatcttcttcctcttatttatatattgttcgcacttattattttattattataaatatataatctttttaaatatcagcgcgactttatcaagtactagagatggatgtatacttctaaaatgcataatcaacttaagtttttttggtggcaagtttttactttatcaagtactagagatggatacatacttctaaaatatataatcaacttaagcttttttagtggcaagtttaagttagactcttttctcataagttgtaatttagagatgcatgaaagattatgaatcaaccatgcaaggagggttagtcctaacattatttgggtttaagtagaaaagaaaaagaacaattacataaaatattatttttttataaattttttatatttttacaatcaaatagtttttttttttttttt

SEQ ID NO: 13994 - DNA, 13648 bp, Cannabis sativa
aataattcagaaggtaagaactttagaacacctaattccatgaaacagaaaatttttctcattaccttacctatatggtctttgtctttaaccactcaaattttatttttttttcagagaggtggggtgcttattaaaaaatggggaagatcatctgcagcatctactgctgtttcaattgttgatgccatgaaatctttggttacaccgacccctgagggtgattggttttctacaggagtaagtaaagtttattgtatatgtaaagtaaatagtttctctaattcctgcaatcacttcaaattggcccaatttctgagagttctattattcaattgtaggtttacaccaatggaaatccttatggcatagcagaggatattgttttcagtatgccatgcagatcaaaggtaagctttttgtagaagctcgtgttttttgcagtgtatatttatttatcagctcttattaagttattccttcaattcttcagggagatggtgactatgaacttgtaaaggaaattcaatttgatgactacctccgaaaccgaatagcaaaggtactctattatccaagactttctgacattcccagctggtgtttcaaagcattacaaggaaaaaaataaaattgaaagtacagcattgatctcttctcaaatgatggataatttttaattcaccaattttcatcaaaataatcatgttattttatattacaacaagaaagagactaataatgtcaagttatggagtgtgacataacttcagatcaattatcttatgtggaattgtctacatttttcagagtgaagctgaactagtagctgagaagagatgtgtggctcatcttattggcgaggtgtttaacaaacttgttatatcataagctttatatttgtgctgataatatggcatctaatgtggtttattcatttcagggcattggttactgtgatatacaagaggacacaatgcttccgggagagatgtaaggaagaaaaagtaactcttatcctcagaattaatatgaaattatgataaatgaccaaatgagagaagggataaaaattaaagctaaatcatgtagattaaccatgaaagagtttattggttgtaaaattttgagataatgagccttagttctcatgaaaaaaaaataataatagtaataataatgagtctcaattccactataaaattgacaccttagccttttttcttttactttttttcacttttgcttgtgaatttatttgtaaaaattgaatagataacgttttaagtttggttttgtgtaatattgattctctagtgatatttcttaaatataaagtagtactactagtttggagtttggacgttgctcaataaaatatacaacttttactggtaaatgcataatgaaggtgaaaatagccaatcacaaagaaaacaagtaacctcagaagtttggtcataaaccaagagttgatttcttcaagctcacaagttacaactaggcatcatcaccaagtaaaattgttacataacaattttgagtagcatgccaaaatagtagagctaagagcaaacagtgtatgacaagtgtaagaatacagagatgcaagagaccaaagaaaatatttgttacatgacatttttaaaatggtctatctacagaaggagcattttagaaaaacaagtagaggcatataaagcaattttgcaaagctctagccacttctaaaaatggccaccgcaattgtggaacactgaaattaacaaccacaattcatttacacaaatcattcatccttctacaagtctacgatgtatacatattatatattttaatccaaagtatattcattacgaacttacaataaaataatgtaagatacaactaacaaataaatcaaacacgccttgcatctgtcaaatttaaaaatcgttagttaagtagtaatgtagtacacacagattatttgaacccgattcgcataatatcctaaagaggtaatcgaggtggatttactgcaaaatctctcttggatacttatgccgtgtactcctaactgctgatgctctacctggcacatatatggctcccgactttaaagctcacagaaatgattaatacccaaatgaacaaaaaccagaacaagccttttgtcaccacggatgctgccttgccagagagtgtgtcagccattggcaccatagaaaccatagaagcagaactaagatcagataggaaaatgtcaacattgtcattctttccgtaagaccagcccatcctatcgccatctactcttaagtttcgtattctgatcatggcagcagttacatgaactgaattggaagattgtgcaacagaactcaggagagtcgcatctttagtaggaaactccgctgcaaatgcaggaggagcagggatgcttcccaacatttgactagcttgtttgctgaattgatatttaaagtctgcaaaaaaagtaacacaaaaaagaaatgaatacgagaaaagaattaatgattggctttagggctctacttgtatgtgtctttaagtttaaaagcatatcaccaagccagaacattcacaattcagtatgaaaatcttatttaccaggctcaaacttgacatctgccttttgatttgaagaagaagccccactggtatcagtatgttcttccaagcactgtttggttcctatgggatcagcctcaggttctccagtcaccggctgttaaataatagagaatagagttgaaacaaaaacaaaaaaacccacccaaaccatttgtgccaaaatattcaatctaataaataataaccctaagaaaattatagaaaattaccgtttgcaaaggaagcccttcttcagtaacattattttcggtccacatatcaaaatccaggtactgagagatgtcctcatttgcatcaaagtagtttaggcactcatcaagaatatcaaattctgcaggattggcctcaatagggtttgaaagatcattggtttctaggtataatccctcatcaaatggaagactgtccgcggcatctagatattgttcaccaagtgaataatcgacatcaacaggatttccattattacttggtagaacaaagtattcttcagcaggatttggattttgactaatgtttggttgaacatagtattcatccttgaccggtgtattcatcgcatattgccctggtaattcaaataaattctctctctcgccaagatctgaagtttcgctgcctataataggcttcgaaccatcttcagcatagtccccagagtgctcaacatagttgcttgtctcaccataatagaaagctggtggaggagcaacttctgatggagcatcttcagcaaggtctccaatgttctgaagatagttgtttgcatcttcatgatgaatattcaatggaagggcaccaattcctgatggagcaactgtgccaaaagtctgaaaatgaagaaggaatgtttcacaataatgcaaacccagaggcaattgtaaaaatcaagagggaaaaaaactggtgacataaagtacaaagatagcaatacaataaggaataaacaattgataagaaaggtgacccgaaaaaacaacgataaaaatatgcaaaccttcattacattgttgcaatctcaaagagggttaaacagcaaacatcccaatgcaatcatgccaatgcttagcttacccttctcaagttttaaatccctcaaaacataccataatgaattagtatccagttcattaaatgtttgaccactatcagggtttttacatagattaatgttttttctttgagaagcaaatatttatcttaaaattcccttccaattttttgtatatccaaaccggcagaaatattataatatctagcgtcttcacttcctcggttaaccaattgttaacgtccaacatacgagatggggaagcatggactacgaagtcaacacaagatgcaggcacatatgtagccaacacaagattactggcacttaagtagccatacaagattaaatactgtgcaaaagtacactaagaagaatttcaaccaaaaagaacaagctacagttatcaaaagccaactactaatcacctcgacaatgcactaaagttgagctaaacaactactgaattgctcaataaagaaataaagtttaactgaaagtgttctgttcacaatacccaaaccaattcttaaacattccaaggaccctagactattagaccagcaacaacagagttgaatgtagctactgtaatgaaatctatttacatcatctgatggttctagcaggcaacccaataacttagccgaaaattttaaaaaggtagacataaatcaaaaggaacaaacaggaagaaggattgacctgattagattcaattacgtcaacaaacgcaccatcaccaagtaccacttcaccagtctgcacctcttcaccagtcgggacctcatcatcttcccactcttcctcaataaaaggtgccccatactgctccccattcttgggcccagtaccgctcttttggaatatcctacagagcacaaacgcatccttctccatacaaaacccaaaaaatacaacaatcaataccggtccaatgacaaacacccaaaaacgaaaaacaaaagccaagacatcctaacctgttgaattcccacgttcttcaattcctcatcttcgaggcggtactcatgcatgacccagttggttctgtcgcctttaggagctcgcccagtatggaagacaagggttttcttcatcccaacagttcgggatttatgattgatggggcggtctttcccggtagtcttccagtaccctttctcagtagcccgattggtcctccaaccgtttccatacttcttatccaaagcactgaagaaataccactccaagtccctagacttcagctttgatttacctagtaaaagaaaaagacgaaaaaaaagttaaaaagacaaaaacaataacaaaatttagataggatgaacaaagttcgaaagaaaaagatatagtactaaccaggaagatcccaaggctcggtcttataaatatcaacgacggagatagggtcgacgcgcacaggtttaccgcagaccttccgtttcaggtaatagctaacaagctcttcatcagttggatggaatcgaaacccaggagcgagcgaggttgaagacttacgacccataaaatctcaagccgaaaataaccaaaattgttgatcgttttcccaaatataacaataaaaattgaagaccgaaagaaattaaaaaaaaaaaaaaccgattgaaacttgaaaaaaaacccaattatggattcaaatcagagcgattttaagaaaaagaaaatgtaatgaagatgggtgaaataagaattagggttagggtttgggttgtactggtaaagtcagtcagaggtgagagtcggagaggactgaaaggaagcgagccattgcgagagcgaatagggagccaaaacctccacgcgaggcttatatatattgctctttcttctacgtcttcttcactaagtaatatcagacaactttcgatgacccgttggtcattaaacacactctcacccgcataacgtgtactgtagaagttttaagcttagcaatagcaaccttcagtttggtgggttcagctgagctgggacccattccttgtttgatgacgtggcgtttttaatcgccgtcaacgtttaactctctgctattgacgtaattgcacgcgtcaaatgcaaatttggaggtaaatatggtatgagaattggaatcatattattattggtatgattaatttaaaaaaatatttttttattttttaaaaaaaatattgctaactaattattaaaaaaatattatatccaataataacattcatattttataactgacggatcaataattaaatacaactatttgctctcctcaaaaacaaaaaatacaactatttgctagaaattcttaacggcttgttgagattgttctattgattgttcaaaaacaaaagacaattatttgctgatatatgttaaattgttatcaataaataatggtaggtgcagaaaacctacactaaacttttacacgtctttctttttttgaatatgcgtaaaaaatgaactaaggaaaaaaataaatgtttttctcaaacaaaatatatacatcaatacttgatatgattggctcattaataagtttgttttttctttttttggttcagtaggttcattaatatatatcaactcaataagactagttcttcaacgttgattaaactcatttaatagagaaacaaaaagtgattgaattacaaaaaaggaatcaaatatgcattatcttttcgattgattattgaagacatagtcaaggaattagttaaaacggggttttaaaaggagagaagtgattagagaatagtgagaagatataaaaaaagtcaaatctgtaaaggagttattcagcttaaaatgcttatttgtggatagaaattaaggaagaaaaaagaacaagacaaaataacttggcaatcacaccagaaccaaaaaggttacttttttttttcctttttggaactatttgagaatcttttttcctcatatcactaatcacttttaaaaagatagtttatgagaaaaaaaaaatatgcatatttaaaatctcaaaatgtagtgagtaaaatactttacccacttttgtatcagcacataatgattgctaaaagcacagccctagcaaaatctgttggtggtggaggtgacaagcttcagcaatctatagtaggagcccctcagaccctttcttctgtgttcatattcagtagactagcattatcaaaatagcaatagtagtagcagaaacaaacccaaaacagctcagtttccactaccttgtgtcatgggcaacatgcaaatgcaccagaaaatagtaatcaaagaaaaccacacaaaaaatctctgccaagcttccaatttattggaccgcaactcattctctgcaaaatttgaagatgagtctggtcccttttccctgtaagaattcactcaccacaaaatctttggaactcagaaggatctagctatttaaatgagactagataaggttcaatttagaaacatgacggtttacgctacaattaacgttcgacagagaaaagctaatggacaacctacaactaaaaagatattacattatttagtctgctatttcatgataaaatagccaatgactcgattacataggatagaaagtttccaactctgagggaaaacaatcccccaaaataaacgactgcgaagacaagagaagggtcataaggaccagctgggcccccgaaaagttccccaggtgaagaaaatggaattatgagtccactagatacctccgctgcttcttttcaaatcactgttctctttgttgagaacttcaattctagattgaaggatgttaatcattgcttgggcactcatcatttcgaatttcagagtgtctctctctatagatatctggtgaatttcacgttgcagatcctgaatgaatttcaagcagctaggagacaaagcggaatcagtattgccagcatcaagctcaggaggcactggagtactctccttcggttcaatggattctaacagagaatactccaccaatgcagacaaaaaatttcttgttgtcggtggtcttgttgtcgctgttgtgactgttgacattgttgttgcggctgttgttgttgaagagctacgatcttgagcagctccacctgagttttctgaagcaacaccattgctagaactcgaatcattatgacgccttcttttatacatgagcagtggtgaggacacccggtcacccaatgacaagtgttgctgctcatctaacccaggtacagaacgaccatccaaactatcttctcgattaaccacacatggcattgtgtagtcatcttgtctctcaatcttgcacacaggtaaaacattttgtttttctcttggaagaaccagagcgtgatgaacatccttttcagtggactcagtatcctgaaaatgattattaacatcatatgcaagctttcaatataacataaatggaagtacaatttcaaaaaaaaaaaggtacattactaggttaaaaagtatctaattttatttcaggcaaaacaacatgataaatgcaacttgtaaaagtaaagaatcagcacaatgcgatgtatcaaccatacactaaagcagaactctactggaacttgtttaaaccagatatcccaagtacataaaataaattctaagtaactagatttaaacattattttccttatttcttccagctacggatttagaaatgatcttggcttagttagttctactaccaaaagatattttcagttctcagatacttgaagatttgtggaatatacaaaaatatctactagtgtaaaagcctccaaatccaagacaaaccaatcatctaacataaaaagcatatcaatttggccacaaaaaatgtcattttattttttattatcttcttcctaacaaatccccaaaaacgtcagagcaatccacaacaaaccttcacttttgcatacaagaatttgtcgaaattcaaagatgggcaacaaagaatatttaccccttgcccccacgaaattttgatgatatagtatggtccacaaggttattccacaaagtatatgcaatgcttcttcacattaaagtcagtaacttcaagagaaacactcatatggaggttcatctccttcagcgtcgggaataaataaattcatctacagatgttagttattaaataaccgaacatatagctagtcttaatcatgggattaaaacatatataaactaacaactttatcctgaatacatatgcatctataatatccactccatgaaatttgcaatccttttaaaacactagcattttaagatgcattccaatacactgggcttcttcgggtcactcaatgctgttataagctttgaagacctacttgttagtttcagaccataaataagctctcgcatcttacatcaagtgctctaatttactgtgttttcttattttatcatccttctgtaatttgtcaaacttcctttattataatttcttaatcaagatccctccaatctctctatgcaggtggtggtctaaaacagctaaaatcatgcaaaacccgctttgtgcaactcaaaaattaaaaatatggaacagtcaagcattataagtgtgatggaagaaaggtatttcacacattaataaagttcaacccaaacaactgtcaatggattcacctaagcaaccatgaatttattatagatatgttacatgactacctaatcttgacaattgactaatttcaaaattttcaaattatagattgcaacatttcaaggaaaatatcaagcattcaaaataactatttttttcaaccccaacattctcgcaatccttcaaccaagtctatgaataccaatcaatctctaatgaatgattgtatcaatctctaatgaatgattgtgaacttcaagagaagcattcctcaaaagcaaattcatctccgaccaccaatttgtaaacactgcataacataatagtaggattttaatccagtacaaattctcagcatgcctaagtctacttcaagtactttatgtttgagcatatacaaaacaaagaatttttttaatattgatcttaaggggcatattatatgtttggacaatcaaggttgggatgatgagaagcttcgggctctaatcccttagaacactataaaaaagagatattgttcatattgaagtcaaattgaaccacctctatacattattgtagaatgcagtggcttatcaccactgatgcactaaagagtagccagacactatttctattcactaacatttaaggaacaaagagactgtgcaagggttggaaagtatttaataggtagtaacttagcatagaaagatatggccgatcttatgattgttatatccgaactttatggaagtaagttggacaagattgaggaaaaataaactgaagcgaggagctagacctatagtattttatagttaaaacataataaaaaaaagtgaatgagaaggaatttaatctttatccaatactaaatcagggaatataaaataaaatcagcacccaaactgtcctcacatcataacagtttttaactttataagttccatggttagaatattaagaattaaactaaactatggaggggggacctctagaaatccccctcatcaaagaacttattttgaatcttaagagtgctaacatatactcactcacccaaattcttaagccagcctcaagtgacatcatcaccaaagttatttcaccctagtgttgaacgactaagaatatagtagtcagtggtttaattgtttcacacaagagttattgatttcatgtatagtattcatcctactctacttcttatcaaagtttatgcttccattttcattcttttattaaaaaaaaaaaaaaaagaatgagaatggagaagaatcaagcaaataaggtatcatgattttcctaacaaggctcgcatctagctttaaagccatctactacaccctatcgagtatcgaatatttagaaactttaattagatttgaatctcacatgtttttcatttcaattgctaaaagcaagatgaggaatagaataagcaaaatttctatttatacaccttgttgtacattattattaaaaaaataggcggctcaccagttcgtgcaatatttaagaaacataaattttttgcaattgttatgtagatactagagaggttcaatcctttcatcttgtacaagtcatggtccaaactatttaagctaaccctcttgagttatgcaagagagaggtgtttacagtatggacaatgcggtttgaggcctatcttgtagaccacattgcaaatgtggttttaatcatttctaaaaccatgggatttgaattcatgacttcaaactgcatctccgcactacgctacttttgctatatttttttctttctgaattcatgtagaattaaaatataaggaaagatattataactaaattaaaatttaaacttgaaaatacacttacaatgttattgtttggtaggcagagaagagatgggtggatggagaggggtggagacagaagtgaaggggaagtagaatacattgtttggtagagggtgggagcaatgctagacatggattgattcatggataggggaaattagattctggaggagtaagatatctcaaccctctcatagtagcatgaatacaaattctcccttcccatagaatttgttggtgaagcctttaagaatgtgtttgttagtagcttgaaagaagactagaaaagaactgtagttgtttgaactggtgggattgttaaaagtaatggaggtggaaaatgagattgaagagaagaattaagttgcaacgaggaacaaaggaagcagctacgcagtctttgaatgtgacaactaattagaatgtctaccaattagaaaatatataccaatttgaatgtgaagttgctgccattacaagaggtgaccaacacatagcaagcaagtttagtacaatacaagaaagatggatgtaaaagatttacaatcaagtatcaagcacaatggataaagactttgcttcaggtgtgaaaagaaattttcagcaagtcatagatgcatgactaaaaactaagaatattgtttgatcatcatattaggagaagccatggcggactttgaaaatatcttattcgtgaataagctaagtaaaaggcaacactaggagcttctgcctcaatcaaaaagaacatatacactatcagcttctacctcaatcaaaaatatcatataaactatcagcgtacacaagctgctccaacatgttttcaaagcatccacaacagtctcacacaaattcaaagaagcctaaattaaccctttaaattattgtgaatcaaaatgtaaatagaaaatgtaatatatctcaatttaaaaactctgccaaccattatgaaaattgagaagcatgttgatcaatcacttagtttcatcacaattatatcaccaaaaacatgttgggagacaaatcaaaaatccagacttttgtagcacataaagaataatataaactaaatcattagagcacaaaccttctgaatggtatctccttcaatatatgtatcacacgtatttctttcgatagatgtcccatggttatttccttcagcacatacaatttcattgttccctccaacattcttgttgcaaccaggcgcagctgctacatcatccccattatttattccaggcaccaccgcagattcatcgtcttcccactcctcctcaataaaaggtgcatatcgctgcccacttggtggtcctatattactcttgtgaaatattctacacagcacaaaggcatcctttcccgcccaaaaagagaaatatgtacaataatagttagataaaaaacagacaccataacattgcaatcgaacataaaaggactatgatgtttggctgctgaagaaaatctaggcagagacaactatcaacttctaggtactccagttcattaacgccaacaataaacctcacatgtagactttcctatgaccatcaagcaacatcaaaaaccgtaattgttaagcaaaaatggatacatttccaattatcttctctcaaatgaaactagattgcatgaaaacataaaaacacatacaaaaagcattaaacaagttctggtcaaggccttacctgagttgcaccacctctacctctttccaattcttcctctacaagtctgtattcatgcataacccaattagtccttttaccatctggtgctcgcccactatgaaaaaccaaagttttcttcaatccaacggtcttggagtcacgcttgaccggcctatcatttccagttgccttccagtacccttgattcgttgccctgttcatcctagccccgttaccatacttcttgtccaatgcactgaaaaaatagtactcttggtccctgctcttcaaacttgacttatctatagagtccaaccaaacaaataagatagtaacaaatgactaagcacaaatgaaaatgctaagtgtcaaccatacaaaagacaaggctcaacaaaatgtagcctggaaaaacacaaatcagtgccaacaagctagaacccactccgaactgacaacaaagtaagctcgcaaaaatacaaaaagcccagaaaactcaaggaaaattgaatgtaacaacacccattcatacacccaaaatattaataaaaataaaaataaataaattaataaaataaagagtaaagagttgagttttcacctccaaggtcccaaggctcgcttttgtagacatcaacctcagttatggcgttaaatcgaaaggtcttaccacaaacctttcgcttgaggtaataaataacgagctcttcgtcagtggggtggaacctgaaccccggggccaaagtaggcgccgcgggcgtcttggcttgcggcgcaaggcgagttttttccgatggcacagtgagggatagagaaggcggggaagtcgg

SEQ ID NO: 13995 - DNA, 5346 bp, Cannabis sativa
caaccacaagggtttgtggacaaaaattttcccaatcatgtgtgcaagcttcacaaggccatttatggtctcaaacaggctctaagagcctggtttgacaccctgaaaaatacattagttcagtggggattcaagagcagcaaatcggataatagtctcttcttttccaatcacaatggcaatctgctccttatcttaatatatgttgatgatattctcattactggtgctgataccaatgttgttcacaatcttatttctcaattacatcacagtttctctctcaaagctctcgggtcagtcacttacttcttgggatttgaagttcatcgcaccacttcagcaatttatttgacacagcagaaatacactagggatttattggccagaactcaattgcttgactccaaaccacaatccacaccaatgtgttccactaccaagttatctgcaaaaacagggactttattggacaatcccactcactatcgaagcatcataggtgctctccaatatctttacaatgtcaagacctgacatcttcttttgtgttaacaagctcagccaatatatgcaagctcccacctctgaacattggggagcctgcaaaagagttctcaggtacttggctggctccattgactcgggtctaacctttacaccagctcacagattggatattactgcctactctgatgcagattgggcaggatgcttcgatgatagaagatccacatcaggctactgtatctttcttgggggcaacttgatcagttggtgttcgaagaaacaaacagtagtggctcgctcaagtacagaatctgagtatcgagccattgctttagctacctctgaaataatgtggatccaatctgtgctctcagaaatcagtatttcaactccaccatctccaattctctggtgtgacaatcttggggcagcatccttagcttctaaccctgtgttccatgctcgaacaaaacacattgaagtcgatatgcattttgttcgagacagagttgtggcaaaacaactagatattcgatatgtagaaacagagaatcaaattgctgatatgttcacaaaacctttaccaacaatgtccttccagtatttttgtaacaagttaacacttggtcatgaccagtgtcacttgagggggcatgttagaagtaacaatgactagtctgttatattgtttttactgtacataggattagttaaatctgttacaaagttagttagttagtttcctttattttcggttgattagctttgtactctgttttggttctcttccttctataaataagatgtttcaagccaactgagttcagttgagctttccatttcatttcatcttcttcctccattcattttccagttttttgctcaatcttgagtactgagtttcagtactcttacaaaagaataaacctccagcaaggacccgatcccttaatttaacagaatgaaatctgatgatgaatataccttagctcactaatccaactttttccacctgatatttccacatacgcctcccaaacccagagaacagaccaatgataggattttctcctaagatagagcataccaaagaggaattccaataagaaatctcctctgccttaatcttgacccctttaactttttttgtcttgtcttccgttgccccgaatttcgaatttaagttttgcatcaaatggtttgatttcagaagggaggatgaattacctgattactcaaagatcctcgaaccaaatgttggaggaatagttgcacctccaaatttgagaacctcctctctacgctttgattctaccaaaaaataagagaaatattctcttatatcttgcctctgcttcaaagaacatcgagataaagtcccctacaattcttcctcaaacttagcttgctcccctgtatcttcgtcgaaacactccactgcctctactcaaagaacctcctccatcgatttcgccttgagccgcgtagctgatacgtcaggtccctgagttttacccattttcctccattgtttcccttcccattcactactttcttagaaccagaatgctgagtaagaaccttgcgaggtcttcctcgaccttccatggctccaacaaagctaaagtcgaaagtgccataatagagctcgaaaatccagcgttgaaaatcccttggtttttttatttttaattagcaaatttttaaaaagatatgtaaataattagagtatataataaagagtgaacaaagaaatttacttgataatattacataacccacacagagagaatgatcaacttcacaattaattatacaacttcaatattattacaatctttctacgtgtagatcccattacaccagtttggacaccacttactctttattttgatatgatattgtccgatttgggccaaactctcacgattttcctcttggatttcaccccaaaaggcctcgtacctgcctaatttaaactataagtcctcttattactttagttgatgtggggttttccactcaacaattctccctcaaataaagttctatcgagcctcccttaaatgatcatgtatccatcctctcctacaacgggaagacctgcttcaacgagtctgttaacctcgccggctttctcttttctctatctaagtcatctatcttctttcaccaagagcacaccgcctgtccgatagagctcaaccatgatcttctttttacgggcttcaccacttttgtttggcgttactccaggattttagctctgataccacttgtaggatcgtctagcataacttaatcttcatcttggtatgatattgtccgtttttggccaaactctcacaattttactcttgagttttaccctaaaaggtctcataccatttgaagacttttctcgtgtattttaaactctaagtcctcttgctacttaagtttatgtgggagagtctcactaaattttttttaatatatttatatatgtaattatatataaaagatgattaattaaatttaatgcaatatcgtaccaatgtagatttatgacctttttattactattttggtaatttttccagagatcatacttgcaacgagaacaataattggaattttatttattattggtcttatcatctataaatggcgaaagagacatttgtcaatttaccaatccattgagaaatttctacaaagccaaaataatctcgtgccaataagatatgcatattcagatattaaaaagatgtcaaaaggatttaaaattaaattaggagaaggaggatttggcactgtttataaaggaaaacttcgcagtggttattttgtagcagttaagatattaggtaaatccaacactaattggaaggactttattaatgaagttgctacagttggaagaattcatcatgtcaatgtggtacgactagttggattttgtgtcgaaggttcaaaacgtgcccttgtgtatgactatatgccgaagggatctttgaataactatatcttctctggagaccaaaaaataaatgattccttaagcaatttggaaatatttaatatttcacttggaatcgctcgtggtattacgtatcttcatgacggatgtgagatgaaaattttacattttgatattaaacctcacaacattcttctcgatgaaaaattgactcccaagatctcagatttcggtctagccagattatgcccattagagaaaaacacagtgtccttaaccgcagttagagggaccactggatacattgccccagaattattttacaaaaacattggaagagtctcgtacaaagcagatgtttatagtttcggaatgttgttgatggaaatggctagcaggaggagaaatttggatgcggaagctgagcattcaagccaaatttattttcctttatgggtgtatgaccaagtcaataaaaagaaggaaagtgtacaagaagacattattactgaggaacaagaagacaaactaatgaaaaagatgattatagttgcattatggtgtatacaattgaatcctagtgatcgcccttcaatgcacaatgtcatagaaatgttagaaggtgatgttgaatgtctagaaatacctccaaagccttctttgtatccacaagagtcatacaataatagagaagctactaccgaggaggaggcatcaacatctttttcagaaaattctctttaattggtgagtttataatttttcccactatttgtggaatcacttttttttttatgctttacatgtttatccatggttattatatatttggtattggtgctcatttctctagaactagctaaaagcttattaaaagctaggcattgtgtcaaagaaaattatatgttgattcttttttaaataagtttctgtctataatatatattaacttacatattatttttatttagagagaaaaataattaatttcagtatcttttttctttgatgagaatctagggcttactcaagaaaaggttcagtctgggttcccaggatagaaggatatgttgctactttttttttctctataaatattccttcagtttgtggttaatttttggttgagttgtttgtattgtttcggctatgccctatctttgttgttgctcttcaaataacacataaaggcagttccatgtagattatgaactctaattatgtatatattaatattaaagcttttttcataaatgtacaacaaaaacaatataattacaaaaatgtgaaaaaaaaatttattttaaaaaaaaaattattttaaaaacttattacatgaaatcatacatattaatcattaaataatataaattattaatgattaaactaattaccataaataccatgtaattaatatttgtaatattattttagtaatatcttattcttatgcttattatattaatgttttaaaaattattaataataaaatatggttattaaaactcaaaataaataatttcgtaaaattaattaaataaataataaacaattttataaaaataaacaagttaaatatttttttattaaatatacatcttaattatctattttagtatgaattattataatttaataagattttttttaataaaatacaatatcaaaattataaacattaatgcatataaatatatatcaatgattataattaccatcaaaattataaacattaatgtatataaatataaatcaatgattataattactaaaaataaacatgacacacgtagagtgatataataaacatatgtgaatattattattttatttattaaattgatatgtttaataaatagaaaacaaaacaaaca

SEQ ID NO: 13996 - DNA, 8040 bp, Cannabis sativa
gagaaaaaaataatacaaatatacactgcacaatattcagccaacaaaagaaataaatttatgtttcgggtgtatacacaaaagcacgctgctgagtataagaactagtataatgtaaacaaaaatgatatctgaccaattaggttctgttgctgatgctgctactcctggcttcaaacttcataactgcaaaaagggcaagggcttattgctcccacaaaggagtgtaataatcatgctgctatgcctcttcttgataagatggactcaaaaacagttgttcaatgtactaagttgcagaggttcacagcacagggaatgtttctcgttgattagctggttatggccatgggaagaaaccttggtggataattggctatgcagagacaaaaaaagacttaaggtgaatgacattgtatgctttatcaacaggctagctccaaggctcaaaacaactttcacttgagtgtatggacaacggtgggaatataaaaaatggcaatggcattatggtgcaactctttccctgtttaactatctttcctgagaggaaaattaccatgagtacaggtgcaagttggatttacttatgtttcatgctatctttgttacaagtattggtctttgagctcaatcagctttacactaccatcaccaccacatgtaagaaaaccatgtgatacaacttgtatatccatgacagcagcctgtggcgaagatcatggaatatttcaggaatatttcagtacatgcaagtaatgaaaagcaagaaaagaaaaaaaaaaaaacataaatgcaatgcaagttgagacaaacaaaagtattgcggattataacagtttacccgaactaccccactagaaccccgagaggttggttggaagaatgtatgtttatcatgcaattttgaccaatgaaataccatcctagcttttttggcatcccaaagcttaacatccccatctttgcttcctgttaagaataaactagtatttgggattgttcttatcttggtgatattccctacaatcaaatcaattcaaaaaataaattacgcatacactcaacaacggataaaaattcatacatattatttcttaaagataacttgattgtacctgaatgagcctttggtatgtaccaaagcatcccatttaggttttgttccccaactttggcaccaatccctgcctgtgtgtcactacttgatgatgtgttaatcgtttgtccgccattacttaaatgtttgtgcttcttagtctttccagtagcaatgtatcgaaaatcatgaatgcaaacatcaccatctctaccaccagtgacaataagtggagaaattgaaccacttccaatgtcattatcaaagaccgaaagagagtgtgcaccaccttttaaacaaaaagagaaaatttgaacggtataatttatcaagtaataaacctaacatgagctttcgaaaaaaaaaagaaaaaaagaaactaacatgaaatctgacatatgatgttaataactgctgaaaatataaattgtcagctgcctcaaattatgctacttgtacgcatactgatgctttcagggaaaaagaaaaggaagacacattctggggaagagagaagaagctaagatcataaataacctgacagccttgcctaagttagctgccttagttatgagtaaaatttggttactttgtccttatgcaaatgtatcaaaatctcttcagagcatgagaagtataaaagatcacatgggatgcacctaattaaccataggtagcaagatcacattgaattatgcactcaatttaaagttaaaagaatctaccttcatggcatatagcggaaacttttgagcttgcgggtggagccaatgtatcccatataaccaaattatcacccttggagttatatccagccacagcaattactgatccactcgaaggaaaataagtaacatccctgcaaaataaattatatattaatgattgccacgaaatatttaggaattaacaataccctttccaaccaaaaacacagaagataattgaaatatattctagaaatttatgaggaataaaaaagtgcacatacgaagcatggtggtcaaagcagactgacgattctgttggatgtatattgctccttcctcccacctccaactgccatgtacaaacagtgccatctaatgcagcagtagcaaatctatgtccacaatgatcaaaatggacagcagaaattgaggcaagggcataaggtggaggtacatttgcagcaggaagaactccataagttgcagtagctttatccttcccaaactgcagtcatcatttttcagatcaggcaacaaaagttgaacaagtaattaaatagcagttcttacatatatacatatatacctccttcttggaaggtagtacactaacacattagtaggtccccatgaggaaggtacaaaagttgaacaattaattaaataaagttcttatataaatacatatacctccttcttggaagttagttaactaacacatttgtaggtccccatgaggaatggaaccccgaaccccatgagagaaagacctttcctcacaagtggtttataaatcactttcaaagtgatgctcacagtagtcttaataacatattaggttggcatgaaatattagattcgtcgtgtttatttcaagtcctacattattcagggaaatcaacctcgcaaaggagagggctgcaattcaaaataacagaatgcaaatgtagtgttcaagagtcattaaataacataattgtcactttcaaatgtcatacctcccacaagtaaatgtgtgtattgatagagccaaccaaaaagagaggcctagaggggtgactggagaaagccctagtcaatatgctccccgcacgtggaggaggatccacaaactcctcaaattcctcttgagtctcccaacctaagccagaggcaccaataccagcataaccaggaatcccaaatgctccaccaccagtcaagtctcgcccaggccttgcaaaagggcccgcaccaacagttgctccacccagtccaaggtgggtccctttcttgcttccgagaccaataccaggagatacacatgtaggagctggggttgattcagaaccagcccacccatttaaaggccaatcagcctctgaccacacatagtctgagtgatctcttaatgatacttcttctctccaattaagaaatactataccctgaatcatatagaaactgacattaaaatcatctatgtagaggatgcatcttttgaaaattgggtcatattccacaagtttttgaaatcacatttgttcatattacatacaaccacagctataaacacgcaccctttctatgtaagtgaaatgtatattaagtttgtgaaagaacaacagaactagaagattcaccctgccttaaaccaagtgatggtacctattgccctgtattcagcttattattattttttttttccattgatctgaatacataaaagataaatctaggagcataaaccacatggcaacagagcttgaaagtctgtaaggcagagaaggtagtgaagcaaatttacaaatgacagcagactatcaccacaaacaaacatgatagataattttgaggaaagttgtacaacttacttttcggttgctagaaacggcagcttgtccttgatgaatggagttgatacacattgcctacacaaaatggaaagggacttaattaagctaattatgatagaaatcctaaaaaaaatcactagcaaaaatgacctcacaatcagcaaaatatgacagaatttccatatcagaagcccatacatgctatcagaggagaaaaagacacaaagttggaattggactgaaatacctccaaaagctccccgtttctcttgagcacttctctggggcttcggaagggtgcaataccctgtttattggtcgtgtctttctgccatgaattcagaatactaacatcattccgtaatggctgtttagcagatgatccagtttcagtatttaccgtgccacttccagaagtagtttcttgactaaggatttcctcagcttcatctacccctctgccaccttcagacatttcactccaccctttcaaaggtttatgatcaaaacattccagactacatattttttcctcagtaaaactttcggatatcattttaggatcagcacagatgtcccacagtatatcgaatccttctttgtcattcatcatgtccaaagtgaaactatcttcaccaagattctgagggggagctctagtatgagacctagaatcttctaaccaaacaagagtctttacatgctgcccatgttctattttcaaatacaaatacgatgccagctgttttgtataataagatgacacatgttccactgttgctttcagttgctcaaccaaggtcaatgagaccaatccaatctgttcttctatactcctgtcactaaaatccgaatttgtcacactgcatgattctgaaggaagtccgtgtgaaaagtcagaaaaataactgtcttcaagtttataggacatcttctttatttggtgcttcatcaatttggacatatgtcgccacaaacaggccccaacaattttccatcgttcatcttctggaattgaatgttttgtttcaaaaccttgatcttccaacaaacctctagaaatatgatgaccttttcccacatcagtgtccaataacctttgagatgcaaagtctgctatttgagggagaagcttcttcaggatggcaatgtcgacttcatacagtatatgctcatcattatgtttgatcaggagagattcaagcatcaaaaatagatatttatagtttcttagaagccaaacgtaagaaaaatgcacagaatactcgattaaatcaagagctgtaaggaatttcgtactgagatcttcactgagcgatccgcatttcatcctcaaagaagctcttaaaatccgtgatgacaacaaaagacattgaagatagtaagccaaagcatttgacaaggaagatctattttcacaagaaacatcattttccatatctgatttcagttttgaacaagttatactgcaagtaacaacaaaccgagaaaataacagagaggtttctttagtagcctttaagatagccttactcataagggaatacaagcatattctatcaactgcatggtttttatcttgtgcatgctcttgatttacaaatctatgaaatagatcatatccgacaaccaataacccttgattggatagtaagattaaaatctgcagaaaaaaagggaacaaacttaagtcccagttgccgataactgttataacaacaacaacaggaataatatacttacatttctaattagactgagtggaagtagcgaaaacttctgttcaaacaatccaagctctgtgtaaaatttatgcctaaagctttcaaccagttctagaaattgatgattatcatatttttctgagcccgtacgagcaccagctgattgaacaacaatgtcttccctgcttgggtgctctcttatcaatttcgataagtgtttaagtgccaaatctagtttagcacaattctcaagactaaatgccacatcatctgcaagccaattggaagaatgtcttgaaggctttaaaattccatgcagaatatcagaatgactagagctggaggtgtttcctttagtcatattcccaaggacactcaatgaagttgaaaggcactccaaagcttcaaccttataagagaataagataaatgtatcgtgttaagctaaaaaacagtacagtgattacaccatgggttcatatatatatatagatttaaaacataaaatgtcttttctccaaatcaatttcctaataacccaagagggctagctcaaatgatgcttcgctcccacaaagtcagagatttgagtctctcccaggtacatatatatcaattactacaatttcttatctttcaaatattgtagaattatgtgggtagcctagtttcaaaaagaaaaaaaaaactttctaaaaagggggcacaaaacaattaatgaaggataagtgtgcataatttcctatctgaatgtttcctcaaaacataaaggacaagttaatgtcatccagtattttcaaatatctatacgacaaactattatgttagcaaacttacttccaacgtaacaaattacagtgcaccatactattatctaacactcaaattaagagcaacaaaatgatcagcaaaggaaacttacagaaagaccacgtttgtctagggcagtggctgtcataagaattgcccatctaccgaggattgcagtgttttggtccccaacagcattcctcatactatttttgctagctagtgtaaagcaataaagaccaatagttggctctaagaaagaaatattgttggacaaaaatgcaaacttctccgcagaatcaattaggggactgaacattctcataaaagattgatagtaattccccatttcccactgcatatcgaagaggtccacaatcaatatacattgacaaaccacatgcaaattcatacatgcagatatatcataattatctaaaatagatccatgttaaagcacctccagaaggcttgctagccaatggtcgcccttctcaattgcagatggaagtataaactttgttattaggtgatgctctgcttgtccaccgtgcccctcaatcagccgacaaattactagtgccagttgttcatccccaaggttctttgcacaaacattgatagcagaagcaatatcacctccaagcagaaagaaagcaatagccaactccagctgatgcttccccatcaagacatatgcattcttcaaagcagctgccttatttttctcttcctaaaatcattaacaccaataattaataaacttgatacaccttagaaaatcatgcagtcacttggtcaaatcttttaagcaatgtattttatatatagtgtgaaaacagtgtattttgataagtagcgtgtaacaggaacacaagcacacacagagagagagagagagagagagagagagagagaggcagaaagggatgacacactgacaccagatggcagtagaaggggcaaaacttcgccaaaaaagattttcaatgcctcctttcagtcacatattttgggatcccccaaattcaccaatccttaaattatatagtaccttaaagttgcgagaaagaaatccaattaggggcttatccttctcattcttgctgattttgaaaaggccagctagaacttgaattctattcagtgctatgtacaacaaggcacaatccttgggatctttcttcttcagatactgtattcttgccagtttctccatctacaaacaataattgggtcaaaacttctcaaattagctttgccacagcataaaattagttagcataactttcatcaaagtttatagttaaatgagaagaagagagaccaaagaatagtaaaatgtaccataatgtaagaaaatataataacataaatcacttggagagtaaaattatatgttttcatccaaaatacttacacaatgcattaaagtacttagaaaagaaaagacaatacttctcttacaaactcaagaagagattttgtttcttttcctttctcaatgattcaagtacagagaaaatgtgaaaaaaattacttttgtacgcaattgtgctgaatttgtaaaccaaaacccaatgcccaggttacgcatttctggccaagatggttcatttggaagaacagacccaaacaaattttcctcacaatcagagtgataggcccacacaatcagggaagaatcaatattcaattcttccatagttgctgatctaccaaaccttctgaaaaaatgtagttgctgaaactttaacacaacccagaacctgcacataaatcataaattaataataaaatccagaagcaactgaactgcaactttagggaattgttttcaacaaaatgcaatctcattctaa

SEQ ID NO: 13997 - DNA, 9131 bp, Cannabis sativa
tgctgatgtgcatgtgtgtacaaatacaaaaatatagacattaatttgtacatatataccataatgagatctgctgggaaatcctcaggcatatttttatattataagtatatgatcaaactgagaggtctgaaaatacgattaattaatgcattgctcactaattataaataatatatacatgcagcgataaaaaatatatatgaaataattatctaggtaaaaagtgtacgtaacgtgatcaatctgacgtcgtataattaaaatttgaaaagtcaaagttcccgtgatcaatgtttttataaataatacttgcgacgatagtaacttcagtactagtgcagacattttatatatgtattttcttactcctgttaaaaataatatattttgtgttataaattataatgaccttttcatagaaaatagataatgtttttttttttaattatatcactcttgtttatttttctttttaatataatatactaatgagtacttaagattctagttgacagcacagtggcattaactgtatagtgtttttttcttaattatggctactaattgcatataaatggtttcgttatttaaaactctatttttatttcaggaaaatatataactaattaattccggacatgcagattttttttttttttttttgtaaggacatggagaaaatttatttacatctgtctgattatttaattttatgtacttccacatttaatttggttacgcctacccaaagtgtcataatcacaagagttggctttgttctacaaacataggcaatcatttttcaaatcattttctatttgattttttttttggaatcacattttcaatttgattgagttgtaaagcttaagcaatttaaactctatttcaaaataaaataataaaaaaaaacttttgaccaagaaaattaactcaacgtgaccttattaatattttctattgactctttgaacagttgtacttcaccatatcactgcccatatatcccatgacttttatcttctgtaaaaaagaaaaagaaaatctttattctgttattattgttcgtattattagataaggctgattgggtaaatttctgttacgaattcaaatgacattcttaaatgaatgaacattttttttctgttaaaaaattgaactttttgaaaatgactgtaatttttattattttatttttttgaaaatggtcatataaataaactaaatatataactaatacaaattttaatattttggttgatgaggacaaagaagaggacgaaaaccacccaaaaaaagttttgtgagactcatttttatattatatcattaaaatgatttgaactttcggtttctcatgcatttatagtaccctcagctctacaaaagtccgccattatctctgtcttcaaaaactcaaaacaacaactcctttctttctctctctccctctgttgatctctctattgatctgtaatggaaagtcgattcaagcataagctctctcgcatgttccggggatcattcgggtcgtgccggacacgaaacttgagtgatgtaattgaaaaatcgtcattgccgcctgaggaaattaatcacagctttcacatgactgaccccattattcctcaaaagattcgaccttttccatccatatgtcgacccatggaacaaatcgataacaactgtattgtttccaccatggacgtgatgcttccgagggccaaaatctcgtcctcctcctccgtgggagcaacaccgttctcaagagttgattctttcagtggccgaagctgttctcgggcgtcccctgtatttccactgaacccattttacgagctgagaaatagtaatttcaggcagaagaagagtagtaagaacattaataaccctgctaagaaggaaaagagcaagaagaagaagaagaaccaaaagagctttaaaaacaaggattacttcgctcccttcagttcatcttctctggacagtaatctcggtgggtggtggttcagcagcgaagacgaagatcgaacctacgacgaacgagaagacgaaacggaaaccctgtttttttcttccaagagcctatcttcagactcgtcggagcaacgccggcgtcagaggaatcgccgaagtgataagtcgggtcgccggataaagacgagctctgatgtgggtcttgttccgttaccggcgagagtaaaggatagctttgctgtggtgaagaaatcgagcgatcctcatcacgatttcagaacgtcaatggtggagatgattgtagagaaacagatcttcggggccaaagatcttgagcagcttttgcagtgttttctctcattgaattcggatcatcatcacagagtcatcgttgaagtttttacagagattttggaagctctgttcacaaactggggatcttaaattaattaatgaagaaaaaacgtttctgtgttttcttctattattaattaatttgcgtattaatcttagattaattctaactttaattaacttaattagaggttgtattatccaacattttaatcaattttcttttaatgtagaatggctgtggtctttttcttcttttgtattgatatatgaacagttgaggtagactgtggttgaatagagaaagatatggtaaaaagaagagaaatacatcagataatttggcattatatttgatatctgatattgtggacgtgtcttttgatgattttgaaaaagattgtctaaaggggaagaaagagtagtggtaaaaaagtctatggatgtttcatttctaacttttctgatcaggttgtgagacttttcaactgggaatttgaatgaggcaaaaagttactcttaatttctcgtgcttgtgttgtgtgtgactaaagttttgaattgccattcccacaaacaattttttgctctaaaaagaatacaagaaaaaggatgtccaattttcaaaattctccaatgtgaaccactttttggctactttttccatataaaatgttcaagcaaaatagtcaaaataaacaattaagagtacttaaaaattaaactttttgatcttccatttttatttctttaataaattccaatcaatactataagagaaaaaaaaatggttgatagaaatatataagcatgctccctagtgcctttattaaaatagttaggaagctaggaccttttagttttattattacgttaaatgattactgacaagttaactagaaccacatcatagcctggtgattgtaaaagcatttactaaattccaatggtagtttttccatttttccttttttctaaacttttttttttttggtcagacataatttcctaaagaatcttagtttattgaacatttgataagattaacaaatatcaattccttaatttttcaataaagaaaaacaaataaaaaagacaaaaatcattaaattttccaaattgtactttggtcagttggtggtcatttaacctataactaataactatacacatttcaagagctaaaaaaaaaagtgggggacattatcttaacctctcaaaagaatccagtgaaattttcaaaaaagaaaaaaaaaatccagtgaagacatagaactgacaaaatatcttaacaaactcttataatcttcccttaatttgattcaatgcatgcatgtatatattttattgcctataaatacaatatttgtatatatgctttgtacccaataaatccatccataacttttatatattatataatcttgcataataagtttgaagaccaaaataatgcatataggtataattgatcaaacatatccttgactatatattttgtttacaagtatatgcattaactttttattctcatccaaaacaaaacaaaaaattgatagttatcaatattcaatatcgacctatcagttgtgcagtgcataaaaagccaaaggatcgttcaaaataataatagcaacaacaacacggtaccaataccatcattttctaattatttgaacacagattggcatattggctatggacaaaataaaaaaaaaaacctatgtttttgcattgcataaaagagacaaaaaaaatgtaccatatttatgttaagtgtttatttatacatgacaaaattaatttaagtttaactaatacaaactatatattcttttcattgaatgaaagtataaaaggggacaatatttttattaaaacatagtttaaccccaacttcaaacaagaataagcattagtgatataaaagatagttatttgctaagtttaaacacacataatatagaagaaacaagtagtagcttttgttttaagttttgacctcctactactcccaaagcaaatagaaaggaccaagcaaaatggcacattattgctgcaagtcagagggtagctgatagagcctgatcagaacaaattttccagtgttgaaaactaaccaattctaattgattggtcaatttaaattagtattgtgcatggaattgatatgtccatttcaactttcaattcgaaattcagtggccaacccacaatcgggattttggttcaaaaaccgaaaatgaaaaagaagacacaattgatggaattgaaattaaatatatattttttttttatatatttgttgtatgtgaaggttcaaggtacacatacagacagaatatattaccaaaatcccttttgcatattggattaggattagacctaataaaaaagtgggggaccgctattcagtggaatgtgggcatttattatcatcagaagatcagaactctgtgtcttggacagcaatatttcattgaatataggtataggattagaaagaaaaggatagagttgtgtttgatgtgaaagagaagagagctctttctctcactctctttttttctttctttctttctttctttttagtgtgatatatagggggaagaggccattatttcgtaataatctaggacgtcccttttggattgatgacaagtttggcagtgaaaattaatgaaggcagtagtgtagacatggggtggaatttattggggttttgccattttaaagaatgtctggggtgagctagtgctttataccagtaaacccagtacttgtattgaatggtattttggggccctgggccctcacccggcctaagcatcttcatttatgatcgcatttttttggttcttgagccccaaagggcttgcatttccatctcttgccttttctcaagtcttaagtctgtttcgttattctcctaaaaaaaggcccattagtttgactcctattgggcttgggttgtgggcttgggtgggggctcgtttacgtgtttggttgctgctttcaaaattcagaggaagaaaattttaagggatattaaaatttttgtacgatgaagtttgacatgtattaaattatactctttgaattttatttttaaggtggttaaaaatacctcctgaactattgaaatcattgaatttaaagatttttgtctaatttcatttaattttactatttcagtgattttttatatactaaattatgctccccagactttgatatctaccaaatcatgtacctcgaactttgacatgtactaaattatggtctctggactttcatccatatcagatttttttactataattggaaaaaaaaatcattaaatctaacaatcttcagtgagtatttttaatgaccttaaaaattcggggtatgattaaagttcaataggcaaaaatcctaattagccaaattttaatagaaaaattacatttttttaccattttcatttttaaaaagtcagcaagtttgtaataattctgtaatagtaagtaacattttttattcacagaattgtaacaaatagctacaactttataaatttttagttacaaaaaaatgatattgttacatcccaaaaattatgcgcatgaaaaaaaaagttaaattcatttttgaaatttactcgtgatattttcttaaatattttctttcacagtaatttatactctgtaaaatttctataacttttttaattttatttttatatatttttattctaataagatttaatataatttttattttaaggagttgtgcagcagctagaaaatacgaatttaataaaatatgaaataatgatatacaaacaatttttttaatattttatttttattttgtgtgtataatattagaaggaagattttattttttatttttttaaaaaataagtataaattaaaaatatctatcttataaaaataaaaataataaaatggattgtgtaagttctgtttttgagtgttacaaatatataaatctatatttatgattagacccctttctatttttatgtcttttcttcaaaaaacatactttttgtattattattttttttcaaaattttagacacttataaaaatttcctaattgtaaatatgatataaaaactagaaaaagagcattttctagtccatttatcaaaaatatattatatatgatctcatacttcattatacaaatcaataccactataatattattcatatttttactaggaaaaggatgtatagataaagtacacatcacatgaaataaaatctgaatgatgccttgagaaagatttcaaaaattatgtctaagttgtctattagtttgtgccatgatataatctcacataagacatgtcacctattgtacttgtagatgacaaaattacacactaaatatatatattttgaaatttgaaagggagcaattggggaccacatccacactatatagtgatgtatacgtataagtttgttgatatagttgcaaaatgctggcttatttttggcacaagtcttttggttggaaactttcaattggcagagtagttgagtggaaaggggtatacaacacaacaacaaggggggcctaactcttatttcttaagaaacaagggtcttgagccgtgcaaacgccggttggcttgggcttattacaaacatataaggccaatggagatttgagggagactgattccaacccaatacaggacgtgtcaacattaggcttagggcatcaagttttgtctcgcatattaataataatattaattattatcatttaagtaaaaataaattagagctgtctcagtcatctaggactagccgttctatagtcatggtcacctgatttcactttgtaattgtatctcaaaaacaacactttctcactcagccgccaactactttaaggtctattgctgcgcctatatctacggtgacctaatacctaatccccaacatataataacaccttgattatagtagcaaaatcgtactgagttttatatagctgatattgagatgttcacaaaattaaagggtggcaatatatgttgttatacgacaacatgattagtaaatgatacaaaattagtatagaaatatgtatgttttggaatatttgcaggaaattcttttaacatttgtaattgttacacttatgattctaataaaaaagagtggtgctaaaagtacattgtcttacgattttgttgcgatggtacattttggttgttaagtaccaattaagctcgttaagtgccaactcaaaaacacatgacgacatatttcttaagattatttaatacgtagtctaataaaagattgtcacgtgtttctgagttgacacttgatggccaacaaaggatacggctgcaacaagatcgtatgataaggtactttcgccgtcacttttttttattagggttatatgtgtaacaattgtaaatgttaagagagttttgccacaaaaatcctatattgtgtcataaatatggattgtgtcgtatcgtgttataagaaaatacggaccgtgtcgtgtcgtgacataaaaaaatacaagttgtgtcgtgccataaaaaagaaaggtcgtgtcatgtcgtgtcgtgccataattaaatatgagacgtgtcgtgtcgtgccataaaaagatacaggtcggccctaatttttagtgggccataagaaaaaaatatttttgagtcactatttaaaaaaattgggcccctgagctaggtgggccctagacacgggcctagcccacctatacctagatacgtgtctggtcgtgtcgtcccgtgcttagattcgtgtcgtgcgttactcgggttggcccattttcttatactggttcaaatttgtactatactttttcatattttatttacaattaatgagataattactaaaattatgtgttttttataactttaattattttaatataaaaaaaattattataattattaaaattttattatttactaataaatattcaaattataattattacttttataaaaatatataagtttttaacatgtcactttttcagaatagtttattaatgttcatgtatcatgtttctcggatttgtcgtgccatatcgtactaattaaactcaaattttttgtgtcgtatcgtgtcaatttgtagtatcgtattgtgtcgtacccaagccataattttttgtgcttagtcgtgctcgtattgtgtctaaaagtccaactcgtatttagagcacagttatgatacactttctatttattttggtatttaggagttaattttatttattatttattttcataatcatgtatgtttagttattttagactccttataaatattcagaaatttcaaccataatttataacaaaggttaaatattttattacacttgtgactatttttttatatgcatagtaaataactatttaaaactttattttagctctttaaatatttgtaaaatttcttaaacattcatagacgaccataaataaagtcaaagcatatttataaataactattgaagatgtcattagtgggtttattataaattttttacattagtgtataagtttatgtttagaatcaaaatgtacaagtcaataacatgagaaatttgattagacacaattaaatttgagataaaaactatgttaacagttaaatttgaaattgatgtgtttaatataattaattataaattgataaacaagtgataaataaatgggtaaatagtggcataagtaccaaagttttaagtttgtaagcggtata

SEQ ID NO: 13998 - DNA, 6622 bp, Cannabis sativa
ccttctataattataataattgataaatcaaaaattttcaattgttatttttatttattttagtatcttttataaatggaaatttagggaagtggtttaaaaacatatgtataaaaagaacatatttcatttagtctctttatgcctactataaatagttatttcagttttctattagcatgtttgactataaccttagctctattactaaccctttaaaactgacgcctatagtgggcactttttccgtcagtgtgaaaccgatgcctacaatataagcgtcagttttgcacagtcatctatagtataactgactgttcaaaaccaatgcctatagtgttttatagcgttgattttcttttgacattacgtcgcaaaatagggagaaaaagcaaattttctactattttttctccaagattagtttttcagatttttacaattttatatagtcatcttcaataattaatcgagcaatgtgattaagaattactacaataatattcataatattaagaaactaacttaataaccatagaaatgtatttaacttacttaattataaaagtatacaaatcataagttatatgaaactaattacttaatgaaaattacatacatgtttttagatatatactcatcatttttcttgacatacaacctgcgcttttacgtaatctacccactgatattgtagaacattcatctcatcttttgtgtacatcgtgctgaacctgtcctgtaaaacaaaagaaagaaattattattagtaacattgaaattgttataacaaaagaaaagtatttaaagcaaacataaaattacttattaattgatttaccacttgtcttaaatggcgcatcagatttggttcggtgtataatctaacgagtgtcgataattcagtaaacctattataattagggaaaatagacttctcaatatcctctacaaaactttgaaattttaatggatccacgtttgattcataatgtgcatagtttatcatttatggaatgtgatcatcttcataatccaaattaacacttttgaccttcttaaacttggatggtgcctcgcccagtactctaatctattctccgtagtaaaaccaaatcgtataactcttgtctattacattcctaaacaaatgctcatttatcttgataatattcatacgctccatattaccccatttacgacaagaataattaagatttttcgcattcttcaaacaaaagtccaaaaaaaggttaacaccttccccttactctactgataatctatccacactcattcaatttcaatccattctaaaaccttttaaaaaaactatattcaattaattattttaatatgtgcattaattaattagttaaattaattaccgcacataaaaacttttactaaaatctaacacatttttctctaattttttattctattactaagaaatttatcttacttctaccgatatttaatcagatgttcccaaaagttttaaacatacaaaaaataacaaacaaaataacattgataatacaaaaaatttacactcattagaccgcagtatatgtattcgtagaatttactacactacatacggatgaatatctaaggtattcaaactcatctaacatgcatattttacccatctaaccgcaatacaattaatcgcataatctatttcactacgaatgaatatctaaaatattcaaactccactaaagatttatgaaatattatcaacaaaattttaataatttaccaactctagtaaagctactaatcaacgtccttgaacaagatcaccactaataaataaatacctaaaaattaaaattaacaatagttaaaaacttcaaatttttcttagatttttaaaagattaagaaatataattttagtagcttatcaagttttgtatggcgtccgaaaaaacttcaaacggtatcaccacaaaggaaatcctaaattaaactaacaattaacaattaaatttaacttggatcaaagtatccaaacttaaacatgcttattacataaatattacctaaactatactaaatttataataaactataataatttttttttcctaaactactaaacttacaataaaaaatttctttgcctatactaattacacattacatatatttttcccaatataaaattaaacattaacattagaactaaatgttatcaattttttaatgtgtatttttaaataaagtttttattcaaaatatactaaagatattttacgaaactttttagctatgcacatgactattaacccctaaaattgacagaatttatttttgagattagtcaacaattagtatcaggagtcgagagacattgattataagagtcggtcaaggaatgactgaatcaatgcatatggctcagggctcgtaaatctccattatcaatgcttacaagtctcggggtatatccacgcaactcggaggtcaaccctataacaactcaggagtacagttagtaagatcaacttactaagttataattgttagaggattttcataatgatgcgttcagaattaaatcttgtcctaagcataatatccatagatctctttctcatcttttcaacgcattttaaatcttgacatataccaagagtgttatggccaaaatcttaagactaccaaattgtgacaactgggtgtgcgagcacatgtgccagtgtgcaagcccatgagctattatgtgagtccatgagctattgtgtgagcccatgagacattgtgtgagcccatgagtcgttgggcaagcagaggagcatttaggtgagccgtggagcatttgtgtgaatcttggagccttttacgcaagtggtggagcatccgtgcaagccctggtggagcatctatttccatggtaacgtctgtgtgcggggcttgtctgcgaggctatgagggcttgcgtgcgaggctttgagggcttgtgtgcaaggttgcaagggcctcccatgcgaggttgcgagggctcgaatgcgaggctacgacgctatgagggcttgcatgcgaggctacaagagcctcacaagcaagcgtgcctgcatggatgtgtgtgcatctgtgagcatgtgtgtgagcgtgcatgtatgtgtttgcatacaagcccgtaagcgtgaaagtgttgtgtagtgacaaatgtgttgtttgtgtgaaggagagcgtaaggttagaggtgaatgcatatcgacaagaatgacgttggaggaggaatcaagggacaagacatgcaaggaaaaagcctacagccacgcctcttgcaagctctgagagcgaggaggtatgagtagtggaagcaacgcacctgcaaggtctcaggacacaattaagcgtacattgcagccatcacccctccaattgggggccacctctgtgactggggaccacctgacaccagacaaaggtacgaagagtaaggccacctacgacgcgcaacctgaaagtgacacattgtctccttgggaccaccttgtactttaggccattagagcctataagtacccctttcttaaatatgagaaggggttggaaaatcattcttgtagcttcaccgtgagggcaattgaaagcttatcattttctctccatttggagattgcaatttgaattcatatttcatctttctttttgtcttagatctaagcttaaggcatagttagatttttcagccaacaagttagttgactagttctcaccgtcaacattttggcaccatctgtaggaatgacaagcttaagccaagtcatttctttacacacaattgatacaaaatgcctagacgctctcaccgcctttaaaacgtggaggtttgccttgatggtgaccagttgattgctttggggcggaacatccctccacctgtcctcagagaagaaggtgctaatggtgacagacctcaaggaggaagagaaaatatgaacagcatcaggcctcaagtaggaggagagggtgcaagcgggtagggatctcaaacaagcaaagaagacaatcgttgtgaagagatcctcgtggacgagcagcgcaatagaataactgccttcatcataactgaaggtaaatgtatgacaaaaaggaaggaggtccatcatcaccaaggcaccctccaccactaacaccgcgagatcccagtacctcacgacatcgccctagaaaggagaaacgagctagctctgtgaccccaaaatttcaaacttgccactgtgaagataaaataaattatctccattagaagaaccaaaggctagaaactacgatggtcgatattcaaaaagtattgagcaccattctcaaaggaaaaactcaaacttcatactttctatacagaggtcacaagcaagagtgcgagatttcaaccgtacatggtgacggggagaactccatgtcatcaacaaatggcaccccaaaggatgagagcagaaagggcctattgcgaaacaagaacccaagagtttgctcaaagcaacatgaatccacccgtcggggtaagaccgcaaagagggaaacatcatgtagtcttatgaagggacttcaaccaaaaaattaccatgctagggtacaccatgcttacaccccctttttaagagtaaagcaagtgaaaggtgccacccatcaaccatagtaaagagttgcacgatgatgggataagaggagtactactgataggctccacgcaaactgtagggaaaacccaagtttcactcaccatctctcgagaaaggatgaacaagagaatgaaagagctagaagaagagatgcaagatctacatcgaaagatggctaatgcatcaaagggaaattttgaggatgatgagttcgacgaagaatcccctttctcatgggaaattcaaatggaaccacttccacccaattttaaggagcctcacatgatgttatatgatggtacaactaatccaaaataccatctaggagcttttactgagctaatgaagatggaaaatgtatcgtacaaggcaaggtgccaatgctttgtggttacacttaaaggggtcgcatataagtggttcaagaggcttggactaggagcaatcacatcctaaaaacaattttaagaggaattccttcaacagaattaaacggagagggattacattattcatgtaacgagtatcaccaatgtaatgcaaagggaaaaataaagcttaaggagatacatccagtgctttaatgtcaaagtcaccaaagtaagaaggatgtccaacgatgaatataagtttgtcatagttgctagaatgtgctctggagtagattatgggggaatatgctaaaaagggacttggatggcattgaagacttctatgagagagcggaaaaatatattcgtgtcgaggaatgaaatagagtcttggagatggacacaagcaagtgtactttgggaagctttccaaacccctacagagtctattagacaataccccctatgctcataagccaatacatccaagtgaagtctttgctatacagcccataaaaattaatatccaagatattcctctaaataaagtcctaatatgcgagaagaagttcctagcaatagcaagttcgctttaagtgtgctacaataaaataaagaaggaaatcatatgggccttcgagtaaaagtggatgacgttacacaattagggtgcaaaaaacaataaaaagagagagggaaatttttcaaatggataaggactagctacccttagttaacaagagaaatgcacttacttcttccaacaaaagttacttagctgaaagagaacttgaaagacactcatggcctaatgctaaaacgagacagacgtctctcaagagtaagcaaatgtttgcaaatcaagagggtagcccagtcaagtacaataagctccctcccatctaagtgaaaaggatgaagaaataagttagaggatgagatcgctcaaagagtaatactgcctcaaatgaaaacctgcttaccacactggggaaagtcacttggctaaagagtaaccctcagagttgctttgtcaacaatagttacaaaagtaatctggccaaagggtaaccattagagtctctcgaccaacattagtcactcagccccaagagcaactcaaagtcactcgacccaaagagtgacttaaagtcactcggcctcacagcgaccagagtcacttggccctaagagcgactcaaagtcactcggtctcctagtgaccaaagtcattcagccccaagagtgactaaaagtcactcagtctcgcaacgaccagggtcactcggccccaagagcgactcaaagtcactcgaccttgccatgaccagagtcacttggccctaagagcgactcaaagtcactcggcccctagagcaactcattgtcactcaagctcacagtgacctgaatcactcgtttaaagagcgaacaaaggcactcgacctcacggtgactggagtgactcagccaaagagtaaaaataattattattatactcgaccccaagagcgactcaaagtgtaatgtccccgcttcaagcctctattagacccttacacccatggaataatggctcttatacacgagtacgtcactttggatg

SEQ ID NO: 13999 - DNA, 20565 bp, Cannabis sativa
  modified_base (1350)..(1354): a, c, t, g, unknown or other
ttttcaattctgagcacaaaatcgaccgcctataaatatattgataaatgatataacaatatcatttaatattaacatacccaacttttaattagataaatataaaaatatttatatattatattaatttttttttttgaagaaattatattaataagtaatgacggtaaaattttcttatattttaatttttatgcacttaatttttttatttatttatttttttttttttgtgtggcaaaactttattatgtttatttttctttgtaaatttaaagtgttagttaaatattctgtcaaatactaactagtcatgatcaatgcatatatgtataaacgtaaaagtaaaacttcaaaattaatacaataataatttaattaatattcaacagtaatattcaactcacatctcaaatttatataaaaaaaataaatataagtgtaaaaaatcaaacaataaagtttttcccaatattaatataagaagttgagttgataagttaacttaaaggccttgaacactacttacttactaataatactattattacaactacgtgtgtatgtgtatgaaagttgtaacgtatataactatatatagggtttgtgtaaagaagtacctaatattacaccccacacatcacatacatatatatcatatcataatataaaatatattatattatatgatcactccttttaattaatatattatagaatattacacacttaattattcttagcttgtgtatataatttttttatttattatatttttagatttgcatcgatggaatggaagagtttggtttgtaaaaagtttgagaaggtgctagctaaacaattaatttaattcaaaaaattatattattatttttaaatattattattagtatagtttatgcaaagagttgatgtcaattttaattatttttagaaaaaatatatttatagaaagagagagaaagcatattgtccacacacaaacacacgcatatctaagctaagctcaacaaagtcaaatttatacaacactttaacttttttattatataaaaaaaaaaatgtatatatagtttcgaaataatgactttaatatagtaaatagtaaaggaaatttatgtagtaattctttctaaaggagaattcactatttgttttcacttaaaaaaaattagtttatttatttttataatgctggaaactatttaaaattatttgtaaatttaaaaaaataataatttattgcactaaaacaaaatttaaataattaattattatacatatataaaaaatagttgcgagtataataatatatttcaatattatttttagtattataaattattnnnnnttttctaaaaatttacaaatagtcctacataattataacatacataaattaaaaaaaattaatctaaaaaacttttttaaatacctaataatagtgtactatgcacatactcaatagtaaatagtaatgaaaatttttacaatatacacccttgaaataagtgtatcgatatatttttatttattacggtatttaaaaaaaaattagtctatttttttatgatcgtataaattgtagttattaatatatttaacaaaaaaaatttttttgaaaaaaaaaattaaattaaaaaaatttaacacgtcgaaaataaaattcaaaaaatttattacacgcgtaaatatttttgttttatttttttttaagaaataactctgctttcattaattaagatagttctttaataacataaatatttttgttttatatacatctaaaataaataatttgaaatattctatattataaaatataaattattttaaattttataaaattttacaaaatatcataaactaagaaaaagttagatttaaaaaattcttatcaatatgcctattttaatagagtacagtgtagaaaccagtaataattttaatttgtttgatttgtaataaataataaagaaaagtaaaagaaaatggaagatgatagattagcaatactcttttgtcgtttaccaaaacataacatatcatcaaacgatatattgataaaacgataaactgagagagtaggtacacgatacgatatattctcgatatatcacgataaaagagaatctgatgccgtttttgatttgatgtatgagtgggtggtgctctctctcttctttttctttattattattatttttatcaaaaacccaaatacttctcctttctccatttcttctctcctctctgtaatcccttctattattattataacaattaatatatagatatatatgtatatgtactgctatagctactattattaaccttttttttttcttcaaatcataataactcaaataccaaaatccaatctttaacaagcaaggtctcttctttcttcttcttcttcttcttctttaaagtttgtatctttctgtattttttctttcaaattcatgatctatacatctttttaatcccaaagattgaagctttctccattgattttacgcaagtttcttccttttcaatctctcaattcatatttgtttctgggtatttatgataattttagattgaagcttggttttattattatgggtttttgttcaaatctctattctccccacataaaataacatcttctctctcttctactacttactacttcacatgaaataactatgtgtgtttttgttcttgtgtttaattacaggctcttttctttttcatggatgaagattcaagtactcaagatgagacaaaagtagagggagaattttacaaaagggttattgttgataatatatacatacatatatatacttataataataagaattactagcttcaggataaggtcatcaacagatacaacaacaacaacactgtgtttatctaaacaagaagaagaagaagaagaagaggttgaagaagaagaagtagtagatcatcatcaccatcataatcattctcataataataatcaccaccaagtgtttgtgtatttgcttgtgcttgtaactgttggtaaaacaacagcagcaacagcacaagtaaagagagaagcttttcatcagatgttatccgttgaaaagcatccacctacagatccctcttcctcatctgatcataatcataatcttaatcataatcatcatgagattgatgatactttgcctcaactagatctgtctaacccaactactactcttcttcccaaattttccataaggtatatatttcttctcgcttatcttatatgctgctttgttgtatagcttttgcagatccatatatccaatcttaaattttgcctgtgatttcatgtcatttctccatatgatattatccctctcctcttacagtctgtacttaattctgtcattaaccccatcatccctatctgtgactgaaaaagataagaaaatatattttctgagctcataataatatcatgaccatatcgaatctctttgtttgattgggtctatatcttggctgtttctatactgttcatatgtttatttttttaccccttttctctcttctaaatctaaaatcacatatagggtccataatagaaaaaatcccaacatgaaataaaggccttcctttcctctctattccatgttgtttgtctcatgaatttatagtcatattccccacttggttaattattatatgatgatgttataactcttaattagtcaattaattagtgtttgtgtttttttttttctttgcagagattatgttttcacttctagaaacaaggacatcaagaccaactggcctttctctcagaaaaatttgcagctttgtctgaaacatggtgtgaaggatgtgttaccaccatttcaaactattgattcagtaaagaatcaaactttgaagagatcatgtacggttgaagaagaagaagaagaagaagaagaaaacatagcaagtaatactaatattattactaatagtaatactaatactactaatattaatagtaatatctttgatggggagccttctgaatcacctgttgatgatgataatgatgaaaataatcatgatgatcatgatcacccggaggtattattagactcttttaacaacactcaagctcaacagctgaaccagaagcagaagcagaagcagctaataacttcatgtggttctggagagaatgatactacaacaagcagtactgtttgtcaatctgagttcatagatcataatcaagatcactcaactgagcctgctcctcctcctcctcttcctcctcttcctccttttgttcacaagaatcaaacaacaaaccgaaattcgggtagtaaaaagtgcagattgatagtgaaattcggttccaatttggatagaagctcagctgaagatattgcttcaaattgttcaaacccatcagagtcaatggcttcaaaggtttgccctgtttgtaaagtcttctcctcatcatcaaatactactttgaatgctcatattgaccaatgcctctctgtggagtcaactagtcccaagtggacagtggacagtagtactaaactttcaaggcatagaattaaaccaaggaagacaaagctgatggttgatatctatgcaactgctattccttgcactttggaagatcttgatagaagaaatggatcaaattgggccacagttgtttcaagctttcctattcagcagagtaatgacaagtctgatcatcatgagatgatgataatgcccttggaagatgattcaaaacgagtgtcatcatcatctggaccttcttcttcttctgatcatcatcatcataattctgatgatgttgatgatgatgttggtgctgtctatattgattccaatggtatcaaacttaggatattatccaaatctgatgatatcccttctgtgtcaaagctcattgagcatcttcgtccaaggaaacctttgaaaggagcaactaataataataataataatattaaaggaaccaaatttctctctaccagaaagaaaaagaggcgtcagtataagtataacaagtaccttaacaaacttgctcaaacaaaaaggaagttactctcttcatcaaagtctcctcgttctcctctggtaagccatacaattcatcatgctattattagtttcaccacttttattttacttctcctccttcacttgctttcttcatttcttcaacactgtactatatatagagatagtgtatgtaacaattctgaaagttgcttcactgagagaagtgaaccttgtctttttatatttggtgtgtattgacttttactactctaaagtgcatgtgtttcaaagttagaaacttgcttgtttgttgcacacaaaatgatatgaaagactttagcttttggaacagaaaaatggtggtcaaggaaaacagtatggagctgagagaagtaacatggagaagcaggtaaatcccagcaatcctggaactttaggaaggtgggtgtgttcgaaaagaactggggttgctaagaaggtcaacagtgaagcaagacatcaacaagtgcaacgaaaatggcctggaaatgaagattccggggttgagagtcttcaatcacgtttggaccgaaatggtgaggaagaagatgttatggatttgtctcctgagaacagtgacagcaggttggagaaagtattttatgaagcccgggcttgtcacaagagggagcagccaccgccttcttctgggttaaagagatcagcgaaaagttctttatccagcgccacgagtagaggcaatgttgttgagagatcctttgcgacaatgaaaccccgtcagttgagaaaggacatatcttctgcgaatgattatcgcatgctgaaacctcccaaatgtacaagcccagttgaggatttcgaacctccacctggtcatgcctccaagttcagatcaaaagcaaggaaaatctcctcagctagagaacatttgttgtctagccagcgatcatcacctgtggctgaagccgacgattctgacgttgctaataacttctcagcccttaagaagtctcaagtgcatttgatgacagaaacagaaacagatgatgaagcagcactatggaattctgatgccagcaatgaatttcaccgaaaatttgctggaaatgaatctgaaagcgatgatgatatgaataatgaaacctctctttgtagaagcactggatttgaagtcagacaaaacacaggagttttagggatagctggtaggaatgcagccaaagtttcggagaacttattttcttctactttggacaaagctgatgatgatatgggaccaacatgtgaggacgaggatgaggaggaggaggatcttcaatgctctcaagatgaccctattagggacagtgctcttgctaattggcgtaaatctgctgaccctgaagttgatcacaaaccgggaaatcgttctaagatcctatcaaactctctacaatacaagggggctttatttgatgtggaaggactaacaggtccaggtggaacaagttttgtaagcgagcaagagacgttttattctgatcgattaggagatgatggcatgcttgtgcaggatgttaatataggggaggaacaggaatccgatgaagatggggaagcaagtaggtttcctgaggttgatccaatactaattccaggaccaccaggctcatttttaccaagtccaagggatatggggtcagaagattttcaagggaactcatcattaaccacgagccgagttcaatcttctcaagatcagcatgattttattgatggggattcatcagattctcctgtttcagcaacatcaactatctctaattttacagctacacgagatgatcatcatcgtaagcatgcagaactattaccatctgtagtacatcagcatcaggccattcaagacaaaattagatcaagcctctcgggtggtagtgtggattcttcaatagaaaatgttcccatagttcctcggacaacaacgaatacagctgcagagagagtcacatatgacagagagaaatttaaagcgaacaacaagatacctctcaacgacgagccatgttgttgccaaaggaaagagagagctgcgcagggtgttgttttagattatcaagaatctcagctcttaaggcgacgagcaatgacttcagtgattatggagaaccagcaaacaagttgcaatcttaacaataggcccaacaacaacaatatggaatcaaggtctgacatgtacactccaagcagtacttgtccaacttcgaaatctgaacaggaggtggttcatcgtccagctgttaattcttctggcaatcaaaatgctatgaggggttctgctgcagatgctgctgtagccaagtttaccagtcgtggcgattgtgattccatgagtccatcttctaactccatactcaggttgatgggtaaaaacttgatggttgtcaatagagatcaagatgaatccataccacaagcccaggctcaatcacaatcccaactcaaccatataacttcaccattttctacatttaccggtgtatctcccagcagtactacacagaaccatgtctaccgtccattccaacatcccaacttccaacgaggttcaatttttccaggccagcagtgtgttgatccaaggatctcaaatggtatgagaacttatgagggagcagcatgttcattttcaaaccaccgaatggatagcggttttgggatcaatatggagcttcgcgagtttgaagcagattatagtattgaaacaccacatagaaagtttaagactgtactttctggtgtcagtcctgttaaagaaatcatcaccatcgatgatgctcctgaaaccgaagctgatttgaccggtgatcacactgcaaaatactcaagagggtttggggagaatcctatagtttcatcatcaggcattatgattcccaactataatgcaaaacgctctaatacttctttctatagttgtcagtctgatcatgaccagtctatgcatcccgaaccaccattagttcatcatcatcatcatcatcatcatagctctggcttccattcactgtcctccaggcaaccgaattcaagccctgcaaggtggagtacttgtcccacagacgacggttctgctggcaatcatccttacattactgcatcatcttcatcttcaagagggcatatgagatcacctgctgcaatgtataacaacaatcgtcaaagcttgagatagtgatgatgatgataacagctgagatatctggaatagagttggtatataataatccttttttttttttaaaagtttttactaaatgaatgaatgaatgaatgtttgggtggaattttgagaggcttctgagagggcatagctttttaagcttaccctgagagagacttagtcaattaatgtataagcaagcaaatcatgaataatagttaacaagaagaaaacactttaaatagactcaaaatattttcatctctatatatatatagtttttttggtttatatatcagagtttgtaatagtaaatttgcatgagaatgattaacatgaatgtgttatcatatgtgttaacttaatatagttgacacaatgtaatgtaagtacttaactaatcatctaccatgcagtgatatacatatgtatatgtatgttttgaaggtgagtgagtctgacaacagagaaaaatgcagttgtagtagtagtacttagctgtagtgaatggtactctactaataatactactactgtactagttgatgaatgagtcaacaaatgaccccatcacccaactcaaaacacttcattcaaatcaaaccccacttcattcatacaacttaatagtaataataattaagtttttttccttttctctaaaataaaaaagagatcatgtggtgcagtagattccttccttactcttttcgatccttttgacaattctgaaaactacgtaccagctataaggattttatactttcagctgctttaattgggttatcgataattaccatctaataaaactaatccttatcattacaccacacaacttaaattattttctttggtgtagttatcacttatcatcatccctactactcatgcatatagtctatatccacttcgtgcatgtactatagtgtatatatatatatcataatgtagatgttaaaagaggtcaatattgttggcctagctacgtacactattacaaaaaataaataacaaaaattgaagtaaatggcattccatgttttgtttgatattagtattttaattaataagcaaataagtaaaagccacctattcttccttgttacatgggtgggaatattattatcattattaattatacttaattaattaattaacgtggggtttgggttaatggggggtaatgtaatttttttctttttgcatggtgaaaagtgggaccctttctctttgcattgaactgtttttttttcttcaaaacacaaaatggttcttctctctgtcatggtgggtgggcccaatccttgtctttctctatgtctgtctcttctccaaactttattctaaacctttcatttcaaacataaaataaatgatattctcccctactattgtaattgcccacctatattagaatctttggagccaaatggacctaggctaggcttggctacaccactatctatatttattactatacatccccccttattagtatagtatcattctttcatctactagaatcctctcttatcatatttttttagaaaaatgttaaaagctagtgtaatgtttttttatatattaatatcgctatatatttaattaagtattaagttttatatagtttaatataataatttttagaaaatatcgctagtcaattataaaacgacatgtctaaaagtgctagacattagtagtgctcaataacaatgctcatatttttattattgagtaattagtataataaatacttaagattaacttccggttatagataaatacctaagtttatatttctaaaatttctacaggtacttagtcgttaagtattaagtcaatgactatatgacagttcttgattagtccaggttattaaattttattttatatttaaaaattaatttaaatataccaataaaaaaataacatgtacttgacgacttacaaaaattttaaaaatataatttaattatgatattgtcgaaaattaaacttaaatattaattcgtaattgaaagctaaatttaaaaattaatctttattattttataagaagaaataatgaaaaattaaccaattagagcttggcttctttcaaatataacaaatttacaaataaagctctttactttgtgaaaaagtgaagaattttaccattgcccaatataacaaattaacaattaaagtgataatgtttaatgttccaccacaatgaatcatgattcatgaacatgaacacatgatgatcaatgatgatgatgatgatggtgatgatacaccaaaacaaacatgaaacttttttatataagaaaaaaaatatatttctatataacaaagtttcaaactttactatttcctttccaatattatattattgaaatatttaatttgtcgttgaaataaatattaaaataagctatcaattgattaaataatttcacttcaatttttaacatttatatatcaaacatattaaagtataaaacaaatattaaagagtgtgtttaaaaagttatagtgtaattagatttatgcataaatagaagtaattatataatttagtatgtttgttgactatgtaattacactaaaactgtataattagagataatgaaaaagtttcaattacactctctaattgaagtaattgaatgtaattacactgtgaagtactaaaaactttccattttaaatattaattactaaaaatattatttttccatataattactaactattttaccaaacaagatattgagaatttatatatatatatataattactacctcatatccaaacacacattatgtaattacactatttccaaacacagcctatattttttttaagaaaaataaaacaaaaaaacaaagttaattcaaactttactaaatgctttccaagattttatacatacaatactaatgaatcaacttatatatctatcattcatgaatatgaacaccaaaacaaacattaaactaaaaaaagtttcaaactttagcattggattatacacatacaatactaatgaatatgaattatgaatatgagagcttcttctcaaatcccaatgtgagaattatatagacctcacatcctccatagttggatttccttgccacctcacttctacaccaatgccaagatcactcctttatggagttgggatcgtgtgttatgcagttcatgttcttctcatggaccccagacaatggactctgttgatatctcaacaaaaagaagtagaagaagaaagaaggccacagctcatgagcaaccatatatcatctatatatgtccatctgacttttgtgttccaaatagtgttttcttttttcactatatatgggtaaataggaaccaaaattttaaatttactatataaatttaatatttatattttagcggtataagtactcaatatttataaaattgtaatttttctttaattttgtcagtatagactttgttattatcttaaacataacacatataaagcttagattttaaatcattggatctagacaaaaacatatattatcagttacttctaaaaatattcattttaataaattcaaaatagagtctgataaaattaaataaaaattatagttttataaatatttagtaaccattaaaaataaatattaaacttatattgtttagaaatttaaagttttagtatttatatggctatttatctatatatattgaaaaatgaaagtgttgattttgtgaaaaatccaattaaatttgaacccaagtggcataaattgtagtcagaaagtacttatacagatacaaatacagacaaagatacttttcaagtttcaaacttggaactattcttatcttcacccatcattttatttttattattttggctcaatggactcttttcctttttaaagagattaatattttattaaatgcatataaacaccaaacaaagatgtgaaatttggatttgtgtgcttcatattacttccattcttatagaactttgttgagatttggtcctcatttttgttaggtttttcttttgctattacacttgtttttgtttggtttctaacttgtttaaaaccaaagatttaaaggttatattcaagagttaaaaagtagagtaaatactattttaaaattgtattttgtaataattatcgattagattatctattttgttaaatgataatttagaccatgtatttataaaaatagtacaaaatagaccataagtttaattttcgtcaaattaaaacatagtaataatttaagctagaagtgttattaccatattggttacaattgttgcatctgttcgtgttagatattgattttcagttgattatattaaaaacataaatcgttaaaaattgagttcaggatctatattgtactattttgaaaaatataaaatctaaattttcatttaacaaaataaaatatttaattagtaaactcttacaaaatacaaggttcaaaatagtatttacccttaaaagtttatatacatgtatatataatagggttatttacagcgaaacattcttatattttgattttttacacttaacttctttttttttttgtgacaaaacctctttatatttacttttctttgtaaatttaaggtatcaactggatattacaattaaatatcaattgaattattactgtattggcttcgaaatttttattaatttttacgtatatacacgtgtatacagtgattatctagttagtatttaacagtgatatttaattgacatctcaaatttgtaaacaaaagtaaacttcaagaagttttacaataaaaaaaaataaagaggttaaatttaatatacttaaatttagagatgttggtcattcttggacagaaatgcgagacttttgggagggtttggtaattcttaaacaaaataagaccttttcaaaaaaagttggagacattcctatagttcaaagataaagtttacacactttggaaaatttgaggtttattaaagaactttgtatacacaatgggaaacacatattagttgagagaataaataggcttagagattgttcaaaaagttgatttgtacatttctaactctttgaaggattagcaagattgagtaaggtaacttttgaccaaaatatatttgagttcttcaaactctattaatgataatgtggtggaaagtctcactgttaaatatatttgacttgattaaggtgactagtaagattgttcaaagagttagattagtgttaatttatgatcaaaataatcccatatgaaaatgctacttgggttaaagaaagaaactttgatttctgattttttttgtaaatatttgctaattgaacaactaacttaactaactttgatttgatcactgcaaaaagtgcaacctttcactctaatatgatgtaaatatagattatatatattcataagtaatgtaaaacaaaactgagtcccaaagaagaaaacataaactagaaagcctctttctttgttttttgttatatcttgcttctcatcctcacgagcttggccaaagtttcttgagcagccaaagtgtgagcatggttatgaccaagcatcacagtcctaatactaatacatgttctacaaagctcttctccactgtcaaaatggcctcctctcatcaacaatttcgcccttgtctcgagcagggtagccttaagcagtgtcacatcttgccacacgtactcgtccaccctctgattgttactaccgccgccttttaacttgttcttccaacacaacgagccgtggcaccagtcttgaatctgtgacacaaaagacttctctacttcttctagcacattggtgcaaacctttaagagctctagagccgagttgcatcttgagaacgtggtgaatgctcttatggcgagcggtagagctgttcttttgatgtataaaaccatgtcaatcgccttgagttggactaatggaggctctgatttgaatccaaacacaagaaatgctgaaccccatagatgatcagagttcagtaaaggatttccactctttcttataccgtctactgtggcctttgcagcctgcaacccttggtttcttttcccatatacttgagttatgggatggaattggatccaacatccaccctgcttgttagctcgacgagccaatcctagtttgacaagaagaagagctgaatcttcttggctcttccagttttgcgctgacagacaactcgagcagcacacaaacgacatacttaggcaacttgtccatttcctgaaccgattccctgcagcaggcatgttctcagctgctgtaccgagcaaactcgtggagattggagacggggcaaaccaagcaccaactagcagcattcttgcagcgagtcggtttgctcttccactagtttgttgtaagatggcaaagcaaaaagttaggactttgatcaagaaagggttgttcttgcagtactgctcttcgtctatgcttatgaacgagcaaggagagctctcgtcgagttgtaaattgttgatagcatcaaacaatgcagatggggtgattgcaagttcggagagtaagcaaccaacaagccacaaaccaaagctcaaccttgctagtttctcatcaaatctcataagaaactccaactcttcagcagggtaatctttcttccttcttcccctaatcaaattcatagcatctgagattggcaaaggtggaaggtgcagcattgtgtcgaaattcatcaccttggacaacctagtagtgattataacatgtgaaccacctgtgtttcttgggatcaaatcatttaaatctttcccttcccaccactccctctcagtctcaagattatcaatgatcaacaaataaggcatgtccctaaacaactccctcttaactctcttaaacgcttcgaattcttgttcctcaaagcttctaatccttcccctctctttctctgcatcagaactcacatccaacccaagattaagtgaaagattaagaatgttttgcctaaagtaccttgcttcaccaccaacccacaacaccatcttatacctttgagaatatctataagcatactcaagaacaagctcagtctttccaataccaggagccccatttatgcaaataacactactaccatttttagacttcttacactttgaaaaagaccttcttgttgagtttctaacaggttgttcaatccaagcctctaactttggctctttacacttaccaagctcaagattaatgaatcttcctcctcctcttgttcccacatcactttcctcatcagctaacccttcagactggccacttgcttcacctttagtaaaaggcaaagaacattcttgctcaaaacaatctccataaccaaacaaagtagcttcaatttccgaaatctctttatcccttccaacaaaaaacttgtttctcgaaaagggtagttcctcaaaaccgccttcgatatcagctacagccacactcttcctcccaagctttcctctaagaatcccagcaactctagctatacaactcctccagttactcccattagcttcaagcttaaactcattacaacatttcataagcccatcaatggcttccctacactctttatcaccaccttgttgcagactcataatctcagcaggcacagtctcaaaaaagagaggaatcaagttctttttctgagcaaagaacctaatctcctccaaactaagatggttaagaaaactcaaaccagtaacaaccacaaccccataagtaacagaacaaataactctgtcagcaatctcatggctctgagtatcagaatacttagctctatcagcagcaaaacaagcaatcccttgaagctcaagctcagacttaacccacttgcagaacctaatcaagtttggattttgaccatggaaaccaacataaacatcacaactccttaacttaacattagaagaaggagaaagagaccccccttttgcaaatgaaatcctaggaactgggaaagagaatgagatacgtgggggtgcagatgagtcagaaacaggtaagcaagttacaaacttttggtccccaccaacaccaacaacaccattacagccccaaccatcttcagaaaactcatactgatctgaaggtggagtgtatgagctacttggaatgtcatctgactgagaaccccctctgaaggaaagtgggggagaagggtaatttgttggggttattatggctcttggtgatatgtaaggagattgaagagctgagacaaatgctgaagagggtggtgaaattagggaaggtgagttgtaaacagaagaagcttcaattgatgattgagataaagagagttgctcattggatttagttcctgatattttgatagttaaaccacttgaaatagaggtttcttctggtaatggggtttcctccatggctatggctatggctgttgcagatctcagttacattcacatgatgatattattattatctactgattatttttcctggtttgaaaggaaaatacacaacaaaaagagtgtcagaacaagaagaaggagatgaatgcaacagttaataataggaaagaaaatatgagattatgtgattgtgatgtgatatgatatgagtgggccattatatatatatgatgatgatgattatgaaccaagcttgttcattgatggcttgacaatgataaggactgaatttttagttaagcattggaataaagaaatgttttttattattattattaccttagaagcatcataagagagagtcaagtcatcttcttctcagctggttttagttttgtgagtttaaagaagaaatggttttgatgaggttggaatatggatctataaaaggttttattttgaacatttaataatagttttatagaaaaaagagacagttcttaatggtggtgcagcaacacatacataattatttgtatttgtattttttgttttatgtgttgtaagaacatgtaatgtaatgactaatataggccttaattaattaattaattaataattaatagtataatcaaatcttaatctctctttctttctcactatatagatataatctaacatgggttttctctctcatgtcagaaaaaaaagatattgggacttaaaaacatgattcagatttcagaatttgttgggtttttcaacttcattttcattcataaaatggccttaaactaatttttcttcctatttttgtaaatttttataattttttttcaatttttatcatcagcattgcaatatgtagcaggttattatatctgacacagtttggaaatatttaaccttggaaattggagcttggaccagtccaactatcacccctaataatatatatcaaataattcaatttttaattattattattattaatattttacctgtttttggttggaaaatttgaaagctgaggagaaagaaagaatcttttgaaagtatttcattattattattattatgttatttgaataaaaatttaaatgataatgattttttcagaaaggctttttgagtgagtgatgattagtgtaatatatggaaaagggttacaacatatgatatcatatgatgaatgaatgttaatcttagtttagttctacatccacttagttataatatatatattataaagtgcttttataatatacattcttaaatgatacactttttatatgtttcaattttataattatttaaaaaaaatttaaaattttaaaaattcaaaataatttataatataaaaagtagtgttcaaatagttattttaaacccatataaaatataaaggttacgtttacaaaagactatttaaatcttattttcggcacattaaatttctctaaatatctcaaaattttacaaaatatcttaaataattataacgtacacaattataaaaaaaatagactaaaaaattatttcgaatactaatataaatagaaatgtatcagtgcatctccattcaagttttctaatatatatatatagttagttgagttgaccacttgtaaattaaattgttgtattatatcattaatattattaattaattaataatgtttgatagaagaagtcggtgtttaattatgtgcaactctctcattagtgggtggtgtggtccttttcttctatagttttgatgcatgtttatccatgatactaatttagcataggatcatactagctagtggttttaaaggaatgaaaatgtcaatttcaagaataataatgaaaaatgaatattaaggttgggttagtggtgtgaagaagataagttaattgagtcataataacactcattagccatttgcaccatgaatttcaaattaatagacacattactactatatattatagatattgcactacacattacacaacaaaataaacacaacacacaagtcataacattttttttataaattattgtccatacttcaatgatatacttcaaggataacacgtaatttcacttgatttattgagaagaccacgtggaatgatccacgtggtactcaataaaaagattgtccaaatgtattagcaatagatattgctaataacccatatcactaccggaggtaaaaaacttcccttaatgatcactaaatgagcgtttcgctcttgaaggccaaagccatctagaaggagcagtgaaaatacacaaacatgatcctggactagagagtttcagaagcctaagataaatacggtcaagtgcggtcctcacttgtcaacgagaaaaaatataaagttacactttcattatataaaagaatcagagtttagttctcgagacaaaatctctgttaaattttttagacaacacccgactcatgtattgagattattttacaatcccaactacataaaaatcatattcttttcttgcttattaatttattctttttagtctctataatcacatttcaattttaattgctcaagattcctatctacatatataaaccattacacaatcgatacattgattttatttatttttaaaaaatagattatataatattaatccttaacttgatacaacctactaaaattaaaaagactacaaaactcttccaaaaatagtaaagagatgagttaattgagtcatattaaacacttattcacaatgctatatgtatctatacgtagtttggtaagtgtgaatctcttttgcggcctataaaatatggtttcgagaagagtagttatattagggcaaggagtaactcttctttgtaaagtaagtcgcgattaaagtttatgtagtcattataccgcgtaaacttttatgactttattattttagatatgtttgttttgtttttaagatttaagattggaattggctctttttcatttgataatttattttattagttacatattattaattaatttatatatgcttttgttgtaattaccttttagattgtctttcttatttatgtatgccaagtcatgatcacgtaggtttatattagtggtctatatatgtattattgttgcttgttcaagtagtgatttataatatatatttttcttaacttttcaagagttattaattagttgtttggttaataaaagctaagtctttctttaataaatagtaagtaaataacaccattaagccactttgtccataaatttattcaaatttgaaaaagggatacatgagacaattaagtattaataataatgcactatactacactagctagtacattacacatccaagtaaggacaacaacacaattaatattctatagatatatcgacatatattcaaaagaataacaaaaaatgttaaaagatgcatacacaaaaattagcataatgttattattatattttaatattaatttttatatattttaatttaataaataatttagaaaatttctaactaattattgtgtatcacatcgatatgttattaagcactttaaaataatacataacaataataatacaaaaaatcatttaaaaaaatagtataaagataatttataaaaaaagatataaaaattgtaaaaaattactaaccaattattaagtaccacattaatatgacattgagtaccatactaataacaaatataaaaaaataccaacaaaaaatagtaagaaaaaaaaaacaaaaaacaaaagaaagtatagcgcatgtttgtcatcataactaaaaaactgttttttgtttttaaaaatagaaaattgtttttaaaaataatttgacttgtttggcctt

SEQ ID NO: 14000 - DNA, 7419 bp, Cannabis sativa
  modified_base (59)..(59): a, c, t, g, unknown or other
  modified_base (684)..(694): a, c, t, g, unknown or other
  modified_base (3852)..(3860): a, c, t, g, unknown or other
tataatagtttttagggagtatcgctaaccaatcacaacgcgacatgtcgagaaggtgntaggcaccactggtgcccaataacaacgctcatttatatataggagtgtcctacacattaagatgtactatatttagctcttcatttgttatgatgaatatattagtgagatattataatttaaataattaattaattgattgattcagtttaatgttaaaattatgatacaatgggccagggaagactatggaatggaatatggatattaatacagttttgactgaatatatatatatatatatatatatatatgatgatcgatctcgtaaaagtagagagatggatggagaatattggcaatattaattaatggacttattattataatatgtatgttaaattgttaatgttagtaataataagttattagcttaattaattagtctctccagtccacgtgcagctgggttttgtaagctaaaatggtcagttaggtctgaaagaaggcgatcgatcaaaacctaaaacgttaacatccataagtacgtactacacatccatcacacacacttcatttttaaaaaataaataaataaataaatcaagttatataaaataaaaaaagtctaacaagatataccaacctccctctcctttaccactataaatatatatatatatnnnnnnnnnnnttttttaaaaaaaaaattaagtaacaatgataattagttaaaaagaattattacatacatctatctatatagtatttatagtatttattaatattggataaaaaaatatatattcatgtagagagggagagagaggtgggttataaagtagacgttgtaggttagaaacttagaagatgttgaaagcagaacaatatttcacctcaccaagcaacgtcccttaatttttttctttctttcgttttttttttggtttctttttgtcacatatatatatatattaggtattataatttataattataagaaactagctagggcgttttgattgattttttaattatgttattattgttagccaaaacgttgcatcagtcgcaggtgtaaggtctgtccaaaccctttccactcaatctctaacggaaaacactttcccatcttctctttctttctctctcttaaatattattccaaacaaccaaaccccttcttttatttattttatcttctttcttttttcttggtgtatatatataatactgcttgaggattcacatatatctccccctggcctcttattaattcctcatcatatatatcttattttggttcaattcgatctaacattaattagatctcttgtctttctgtgtgcaattattgtagctaaatattattaattgagctacatatattggtctttttttttgtaatttatgtgtataaatcaagattgaagaggccgcatacaagaggaatattaatcatttaagccatataatatatatactagctttgaagagagcaagagttagcacttaatttagattaacatcgattaatcatcatcatcatcatcatgtgtacaagaggccattggaggccagcggaagatgagaaacttagagagttggtggaaagatatggccctcataactggaacgccatagccgaaaagcttcaaggaagatcaggtatataatactactgctttattattcaattttaatttaaatatctctttctcccttctatcacgatctagctagcttcttcttttattagttgcttaaaaatattaagtaaattaataagaatatatataatatatatttatatattatgggtaattaaaacaaagagagatatttgcttccatatatattataatcttaagcactgagtgcaatctggttatacttaataattataatctttcgtctccttgagtacctgattgtcatattaattttgttgtattaattaatttgcttccatatatattatacaaatatatttatacatatgaattatctacatagaacatttatataccgatacggtagtgtctttactcaccaacccttaatgctaatatatatatatatatacatgatcaatatatagggatatttcatttaagagattggaactgtaactatttttatagtactgcttgttctatttttgtttcgttaaccattaacattatctccacaaactttttttattatatatatttatatgtataaaaacctgcatgcagcgttaatttatatgtatgtatatatatagtgctatagggtttaggacgttcaatctttgtttgtgtacatccagaaaaatatacttaattaattaattaaatcatcaatacggttttagattttgtcccacaacagtgtacagcacaattaattttcttcttcagtgcttttttatgtaccgttgtactagctttgagttcacagttagttataatacctattataaaattttcagtggtgcatataattatcagtgcaaccgttcccgttgtgtgttaccggacaaaatacaatcgtacatatatacatatatatggtactatatttagatatactatattttgaataagataatatttactttttattaaaaatggtcgatatatgatatatatatatccaaatacaaaatttaaggtagcttttggttggagtaatgtaatagaatagaaaggaaataattttttattttattcctttatttagttgtatttcaaaataatgaaatgctctttctgttaattgtttttatgcattttaaattttattcaattctatttttattcatattaccatttccatttctattcatattctcatttttatttctatttttatattttcattccttctaaccaaacgtaggataaacttaatttccggtttcttatacttaaatacctaaattattatttataaatgaagaagtttaattagatagtattttgaatgtaattaattaataaaagtagcgaaatccaatacgttagggttattgtctattcaggtaaacttttttgtggatatttattaattgtgtaataaagtagttttggtgtaattaataagatgatatattaattaaaatgaataataaatatatgcaggtaaaagttgtagattgagatggttcaatcagctagatccaagaattaacagaagtccattcacggaagaggaagaagagaggcttcttgcttctcacagaattcacggcaacagatgggccgttattgcaaggctcttccccggtcgaactgacaatgctgtaaagaaccactggcatgtcatcatggcccgccgctgcagggaacgctcaaggctctacgccaaccctaacaccagacaaccccacccccaaccccatcatcatcatcttattcttaagcaagatcataataataataatcataataagatcatgctcatgactactaataatactaccactactgctgctgctgatcatataaaccttgtctcatcttttgttgacaattacactactcttgctaataataataataagcgccaagactactactaccctttaactcctcctcctcctcatcgtcatcgagattattattccagtccttgtatcacattaatgcaacatcaaggtacttattactttattatctatctctaattatataaggttgattatttatttatagtatgactatataatatatattgatcatttatataatttacagaaaaaatacacgatgaggccgggattgagttttatgattttcttctagttaatgcggatcagtcgaacgggagcgaagtaatcgatgccaataataataataataatannnnnnnnnataataataataataataatggaacaagtacaagattaagaaaaaatgaggatgaggatgaggaggaggaggtggatcagaaagctgcagcattagtaatgggatcatcatcatcatcacaagattatggcagtactactactactgctactccttcattcatagacttcttctcagttggagctgctggttcttaattaattaataattctacctcactattaccttcattattatatatatatttatatatttctctgctgatcgagctggataggccaccactcaaatttcaatgtaaaaaaacaaaacacacatgatcgtcatattcatattatacaccttaattaggctaactatcatgatgttgaagaaaaagcatcttcaatgctggttatatatattaacacatctctacaaaccaaatcctcatgacgaacagttcccaatgtataatatatattatatatatttttttaattaattgatcaaggcatccacatatgtttatacaattgctagctaggtgtgtcaagtgtttcaccttctttccttacgattagaattttggattattacttttgtcagtttttttttttggtaaattaatgagaactattattaataatatgtacaagtacatattagttaggcattcctaacttttcaaaccacaatttatcttctaaactaaatttctcctttttaaaaaaagaaaacctatcacaaataatcctatgaaccaaacaaaagtacaatccgcgagtatcatattattatatatatatatagttatatatacatatataaacaaaggacacaaaaaattacaaatcatttttgtttcatattcatattatatatatttatttattttggggtttaaaaccacaaaccctttccagaactcaaaagcacgaatgtaattttggatcaatcacatgaataagataagggaaaatagggagaaaaaagatcacctcaacgaaagatcacctctgtttaccaccaaacgatgaacctatgcaagaaaacaaaaatcgaactcaaaatccttggcacatatagttttattcgaaacaggaaacatgtgtgaacaagcatcacaaacctcatattcaaccttgtgtttctcggaatcctcaaggggaacgtagtactttgcctaatgggtcttgccttgctgattctgtaaaagtatgaatcagatctacaaaattggataatattcaaacacaagtgatattcaatcacacaaatacattaccacaacattttatttcatctcatttcaaattaagaaacatgagatggtaccattgctttataaatgaagaacagacgaagcgatcgagaagggaaagagaagcaataaggtagtattgtggtaatgtaagcttagagttcaagtaatttgagctgcaactgacatatttcaaaattcaaaatcaaaaggatatgaacgaggttcaccttgctgatttactctatatctccttcaatcgaccaatgccttcgtcaatcgcacgctgccaatggcatcgatggtaagaaatggccacgagcattttactataatcacaagagaaaaaaaaatggcagtttctttctcaagatcacacagcaaacaagtatcaacttgaatgcatccaaatcttatcaaacgatcctgagtttgtaatctttgcctggaagctaaccaacaaatgaacctgtatttaggatcactataatgattccatataagagagttccacactctagaggaatcaatttgaggccacattctatcacaatccttagagatcaaaaaatccatgccaataaaatctttacagccaatttgcctcataataatgtccttcacttctataatttttttttttttttcattttagcaatatcccaaatatatcttcccaaagtaccagagttctaatgctcaatattcctaaaccccacacctccacgagatttagattgacaatttaaatctcagaccaagagacaaggcctagagaggaagagtcagtcggacctttccataagaaatttctacaaatactattaattctccttataatatatttatgaagaatcattatttgagtccaataggtgtgtggatagccacaagaactgagttaatcaacacacatctaactgcataagagatattcttggtactccatatattcaaattagagtaaccatatttttaatgatactatcacattccactttagagattttttttgaacatataagaataccaagatatctaaaaggcaaaaaactactaacgtatcccaaaaaatctaagatatatgttgaatatcctcatttgtcatacctgaacagtaaactgctattttactgacattagcttgcaaactcgaagtctcaaaaacctcataaaagctctcaacatgagcttcattgaatgaatatcacctcgagaaaagagaagaagatcatctgcaaagcataaatggttcaactttcagctagtacatcagggatgatgtttaaagtcttttctcaaagtgattttagccatcaaccgagaaaaatattccattcctaaaacaaatagtaacagagacaaaggctccccttgtataagccctctagaagaaaaataaccatgacggttatcattaatgattagtgaaaattttcgagtagtgacacactccttaattaagttcacaaatgataatggaaaatttaaagcttacaacatctctctcaagaaatctcattcaacagtatcataagttttcttcaaatccatcttgatcatacaagaaagggtattattttgtctgccatattgcttaactaaatcttgacaaattaagatgttgtgagcaataaaattcgcatacacaaatctcccttgattagaagcaattaaagtaggaagactatttctatgtttggaacaaatcaattttgtaactatcttataaaccacattacaacaagctattggtctaaatttaattacagtattaaggcaattcactttcaaaatgaggttcagagttgtagcatttacctctttaaggattcttctaaattgataaatagagaggacaatggctgtaaactccttcctaattgtgctacaagtttttttttttttttaagaaactactactaaacccattatgtctaagagcttttgaatttggaataacacatagagcattctttatttcttcctctataaaaggttgcagaaggtgactagcttgattatccgagatcacatgaccaactctaaccaccttagcaatgacagactttctattatccatcttagctcccagtaaatggccataataatgtaggaaagcatctcaaacagtttcggacatgtcaacccagttgccatattcattatggatggcataaaaaataatttttaattttctcatctttaagcatcgatgaaacaatttgttattactatctccatcaataatccagtttatttttcctttttcagagaggaaagagtgataagcactagatgttgggttttatgccc

SEQ ID NO: 14001 - DNA, 6994 bp, Cannabis sativa
aaataaataaaatttattatgaattaaatattttaagtctccatttatgtttccgtggcgggaaaaataagactttatataagttaactctccatttcttctaattctccattgacttgtctctcctgataaatgccaggccaagcacattgcttttccttcctattctcttcatatctttcctcaatttcactaaaaaaaaccctaaattctctctctgccgccatttttcactctcgtcgttaaaggtatatgtttgtttgttgttcatttctatatttgccttcttttttttttttttgagaattcaatgagcttagattcttgtgagtgaatgaatttccggtaagcgttatcgatgggaaaaaggaactatattattggtagaagatttatttcgttatgattaattacagattatttatttgttattgaatgacagtttcgcttcagtattttgggtatttagtctaagattgaatcgtttagaatgttgcaatggatgggaggatcgaggaggaaagtcactactgtgagtatcagctttctcttgtttttgaattgtttgatccttcgtgctcttttacatgagcaatgtatggtatacaaaagctgcacatcgtgattgagaattgaaaaacttatatttcatcgcgttacaatgacaattacgaagaatcagttagaagctgtaggtttctttgcctttaagaatgttatgagattgggatcaaggtttatttgagcaaacttgtaaaattctgatattctttactatactgtactttaagatggttcaattattttttttttcaaaaaaatggcactttaaaaaccattagttgcagatttggtgattttgtggtgcaacttttatgcacacctagcatctaatatgatgccttaaattctgttctgactcttgaagcatttttgttgtgcatgatgccactttattaaatgggaaatttattcagtcgaggagatccacacagaaaaggtaaaataagaaaaacattttccaattctgtaaattaaccttcaattgttatttatgtaagtataacttgctgctgaatgatatcctacttcctagcttttcaataaagttggttagaagtttaagactgagcctgtaagaatattacaatgcatgggaactaaaataagtgctattcaatctatacaatttaactgagagctagatgaaagatcatgactactgaaatgtaatcggtctatcgagtttatatgttttaatgctttcaaaaatcttcaataggcaaaagcaatactttgaacaaaggaaacgacaacagcagtgtcaaccacaaacagagaggtgtgagacctatgctgatgaaatggacatatccagacaacagcagaaagaacatcgatcgctggacatactcagtattttgaacttgtcagaaaatgctagagaaaggaaatctgattgtttaagtggtattgctgtattattttaaaactaaaacatgacagctgcactttgttacttttttatagacgtttatgatgtttccatcacttacctcactcataacaccgcaggaagaaaaaatccagatgtgaatgcttcaacaagggagtataatatcaccaatgattcacctgtaatccttcctgacagagctgtacttgccaaccttgttggaattaatgaacagtgtatgctttctaagtcttgtttatgcttttctttttttagtattatgcaatgtttaaggaatggtgatgttttctgttacagcgattccatcagggtttcacatggagacatcatccctaaagaagtaaggcattttctgtattcgcatactgttgtacgcacaaaaaactatttcctttaaatccactggacaagtagctttttcacctgtaaatgacttgatgaacaccaagaacttacattattattcttaattaactcatatttctcaacttaaactgtgctcaatgttaaaattttatttttgaacatttgatgaattattgcctcacagtcacaggatttcccctagtgctcctgatagtcataacaatgccctcaatggagttgattgtaaacgtgatcagcgaacatcagctacagagcaaggtaagttgcctcaactattaattttaatcatgacagttttgctgcatcatattgtgaatgaccagactatagttatttatttatgctgataattattgtgccttttctttcctccccacccccaaaaatctgatggtcattaaactttgtgtagagatgtctgttcttgatttgcttggtgatgatgggctgaatggcaatgttgttgaaaatccaggacatgaagctcatgttgcgttttcaattgaaggtatggtcttgtaaacttaatatctatcagtgtttgattggcttgtagtcttctgtgatgcaactaatgcaccttttaggtttgggtaaagtaggagcggaaacaccagtccattcacctcaacaatccagcaggtaactagaagcagttccaatggactatttatgttattattatttattttccattctcaaagtttgtcattcattatatgataaactcttactgcatcattttgtgtgcttacaaacattccagcttctaatatatgacttaaggtttatgtggcgtgcataaagataagttataacttgcataaaatctgattgtatatcattagttgatatgagttgcccttagttctccacttgaatacatgtatttttatttctctgttacaaatttattctcattgttcatattttcagtacataagatgtgggcatcatatgcaatataggggttgtcttcatttaagaagaattcgttcaagaccgtattatttctgagggaaagaaagatggaagattggagaatttgacctaattattaagaaaaaaaattggcaactgaaaaaaaagggattttatcatgagctgaaacgtatcatgatactttaaattgacctgattgtagttttcccaaacaataaattctactaaattacttaagaactcaacaatacatttctgttattgtagaaccttttcctatggtatctcctctcctctgaaagctgcagggcggcagaagtcatctagaaaatttaactctcagatagatgaccttgaatttgaggtggtacaagctttttgagtatctctacagttgattatttttaaaactgaaaccttgccaccaagctaccaaccatccttcactcttaatagaaattgaagttgtattatgtcaattttgactaggctgattattttaacttgataaatgcaggatgcaatgttggatggtcttaatgatcccctgagtaatattgagttttctccaaatattgtggactcaataagtccagaaaataattcttttactgtcagagatagttggcaacaggataattacagtagtaaaagatatagtgcctttggtcatggcaatgaagataaatggactggtagatatacacttccttttcctcatgaacaatcattctgaccatgctgatatagatcttagttttaataccgccaactgaataaggatatattaccagtaacaattcaaagattatgtgcataaatttataatccgatccctatgtcaagctttcatgcaattctctgggtggaagtttttatagtttttagcctctgatttaccattgatttctgagttataaggattagatactgacaaggctgagtagtgctgtttcttttatatacatgtcattgtattctctataaacattgaacttgctgtgctttcattcaagcagttctctgtgccttactaatgttctcaggggggaaatgtaatctgtcttctttttctcttgcttctgtctgccaggtaggcctaccttttcacaccacaggttctttgatgaaagagaacatgaaaagtcaagaaaaacctggcaaagtcaaattcacgacagttctgctgaccatttgctatatagaaattcagagaatgacatgtcagatttctctttcgaaggccttcaccaacctatgaggtctttaattcttacttttccctgcactatttcttgatgcaacatgcaaaccttcgtggtaaagttgttaaatctgtacagggctggtgacagaatctcgagcaagtttgatttattaggtgctctctatctcacccctattttatctcctatattttttttttcctttatgttcttcatttcttttgagtagatttcgttttgctgttttcacttccaatttttggtgaaaaacacttcattcagaggtatttgttgttgtggtcacatttctagcctctatccatgggtggcagtgtattaagctataaatagggactgaatcctcaatctgtttcaaactagttatgtggagaatggatatttttgttgtgctgtatatatatatgggtgacttagtcaaggtgtcttgggtttttattccaactattatggtcttgtttctatggaggttgatgggaaaatttttatgctgtattcagttatcttattatgagctaaatagctatctatgtttgtgttcttatctacgtcgctgcatcacttctcttttgtaatcagattcaacattttcatatgctcggcatccaactgcagaatatgaccacgattactatatgtccaactgggataggtatgcctactgcttagaggtctaagcatcatattgcaaactatgttgtttcttgggaccatttcaatgttctcaaggctcagtaaaaatgtgacggtagacagggccccaactgtagaaaacatcttggatttcaaaccagaaacaagcccaccagatcggttttgctttatgacagaggatgcaattgataattcgagcttgcagaggtaagcagttaatgtgacacaatgatttcagaaggtttcttttatgttatagttcgagtttttaaatttcatcttgtaaattttgcagtgaagaatcatgctcatcaagtgcaggtttgttggccaattattttttctatccttattttggcatttgtattaatatgctgactggttttatgcaatgatctcagtgaggtatcaggcaactggtaatttcctatcaaactcatcaagacagggcaggagaagacaatgcaatgtttttgctggatccggcgataagcatgcttttaagaaggcatttgccaatgtaaacaaggatgatatccaacaagaaaatatggcaagtggctctgcaaagcgcataaatatgataaataatttgaggtcaaaaccatcatatccctcaagctttcagagaagttttggagcagaagatatttcgttcttcgagggagcacatactacaattgatatgaatccaggctcagactctttcaatcaaaatttaggaacaaaaaataatagctttcactctgattttttggacgaagaccctttctgtaaatttcctaccccaaaattacatggtggttctaacccttcttgtgacagatttaactgcgattcagctgaatgttcacctcctgagcttttcatccccaagattcctctgcatgcttcctcaatgaatatggagccagatattcatgtagattgtgaattgaggaggaggcctcaggattcatcttctatagctggttctcagggtgagacgccatctcctgatttatcagctcaagaaagctttagtaaagatgttgaatataaaccgaaatttgaaccatccaactgtggaccatctgagctggaggaagaattttgtattaggaatggggatttggtctgcaaggacaagaaggctaaagatgcttcacatacaaaggacaatgatcacaaggataggaaggaaagtttgcctgatcttgaggagacatcacgatccgttgatatcactgataaaattgggagtccagaatatgatgagtatgttaatcaaagataggaatactgttttcccactcatttatataagcattcttttgcactcctcaaaaaatacttatacttacattttattttacttctttccagggatgatcgtgctgataaaactcctcattcatataaaaacatgaaagaaggtacttaattgctgttacttctagcaatatgtaatttgagatgtttatacttttgggcagattaatgtgatagtcatgttaatgcagaagtagaggattttgggtgtgaaggaaggtttggttataaacaaaagagcggttatgtggattcatcttgtcaaaaaatgatgtttcaaagctatgttttccagttcttttgtgtgcataaaaggttgatgtaggcaaaggcatctactcccgtgaagatggcttgtgaacacttacgtagcattctagacatgatttcattttgtttaaagcagtggaagtttgatttttttctacacaaatgggttcaggtgaggcctcttccaatggcgaaggaagaaaagaataatctagtaatgaacaatattaaactcatttcaggtctgaaactttccttgatgactagtgttattgcgttttatgtattcctgactgaatgtgtgctagaattatttatacagtatctaatatctataactatattagagagaacaagatgacgaattaaaatcatagattaggttaatgataacttaattaatattgccctagaagaaaaagaaactctattaggtgttcgattattacatttgcttaattttttgttcttttgttttgtgtgtgaaatagtagttacatatgaacacattcatatctaatgtaaaggtgcatctcttgtattaatatttctttgtcacatgagaagatttgtttggtgaaggtcaacgtgtataagatttcatctcattgtttcttctcaaaagtaaaagaaagactgaattgtcgatttaaaatgtcgatgaaatgatgacatcttgtaagtaaaacaaaaaatactacaaacaata

SEQ ID NO: 14002 - DNA, 6758 bp, Cannabis sativa
attgtggtaaaagctttaggttagaatctttcctgttttggaaaacggcagatttctggtgggcagagatggttgataaatagctaccttttcttaacaatcttcataattaatgtgaagaacaacgatgtgttagctagctggatttaaatcaacaaccagttgtgaagtataatgccttttaaccttagttatatagtagttagtagtacatgctttaatttgatcactgatcatggttctgggttttcagattcttttacttctttatttgaccatgagattaatgagtattaataaataacaaacacttcatctttgttttggttctaggggagattataggtttatttgtattttactcatatatttattaacttagaagattggattattttttgtctcctttactctaattattattattattttatgattatttatttttatttattggattctgactctctaccctaaacaagtgtgaatatcaaaaatccttaggcagattatttgagtgaaaaagctctcctctgatatctgtaatcattagacaactgtcatatgtttattgtataagttttgatttggctcctcctttatcccttctgtcggaatcttggtcatattcatttaaacattaatttaataattttaatcattcatatataaatatataaataactcttttgttttaatttcttttgcaatatattattgtaatgtgattctccattgctttttcttaaatgtgaatcaacctgctctcccctctctctatgctcaattttatagtattataaaataaataatactttggtgggtgggattggatagatgatccgagtggaaatgccaacctattactttacctcaccgtactaactaaagattctttattattttatttggttaataaaattttaaagagttattagtacccagaataataatcaaccatagctataggcatttatttttgcctatagctatgcttatagttagagcttcaattagttgttttgctagtacgtgatgatttcactatgcatgtattaatattacctgtattaattcatgttaatttgatacctaattaatttgttaataatgtagacacattacgttctgttgctctgttcttttaaagaacaacttcaacaacatgttcgagttcacgcaatggaagctgttatggcttgttgggagattgagcaatctctacaaagcttaacaggtagtacttagtgagatccttttcttctttctctgcttgcctttcagtactactcgttttctttcctctgttttttttaattattattattacataatatactaataattggatgaacaggagtttctccgggtgaaggaaccggtgccacaatgtcggacgacgatgatgatcaagtagacagtgatgcaaatttgtttgatggaagtttggatggtcctgatagcatggggtttggacctctaatcccaacagagagtgaaaggtcgttaatggagcgagttagacaagagctgaagcatgagttgaaacaggtatatagattaattaattaattaattaattaggagcgtcgaaacttgattttcatcaaataattaattaattattttgtagggttataaggagaaaattgttgatataagagaagaaattcttcgaaagagaagagcaggaaaactacctggtgacactacatctgttttaaaagcttggtggcaatctcattccaagtggccatatcccacggtacgtacaattattaataaaaacgttaatttaatttaatacacacaatccatagatcacttgtttcgattgccatagaaaatccaaatatatatttatatatatatatatatatatacatcacgtctacatatcttattaggtaagaaatgctagagttgctcaaatttaataggctaaatagtggcaaaattattcgttgatttgagtttataagcaatataaatttaatgatttttttagtagtataagtacttaatatttgttaaactgttatctttctttagtgtcgttagtaaaggtttcgttttgaatttattaatagaagatttgaaagtactatatgtttgaatgtttccgtccagaccaaatgatttagattctgagagttatatgtatcatgtttaagataaaaatagagtgtgtactaacgaaaatagagtaaaattacagttttataaatattaagtatttatgtcgctaaaaaaattattaaatttatgtcgcttacaaactcaaaattttgagaacttattccattatttacccaatttaatatgggaagtaatataaacaacgagtaattattcatcaggtgccacttcttgtagtgttaactacatcttaatcttattattacttatagctatagctttaagctacatgaccaagtgacacatgccttagcagtcaatacaaatatgtttagttatttaattgagaaaccctaattaagaagcaccatgatatcaaataacataaaaaatgtcacatcgtacattcattatagagttcccacgtttttttttatgaatcagtagttgcagtatattaaactcaaaacgatttacaagaaccaatcaatgaataaattatttacaagctttacataaagcttcccccaattcttatcagctatacttaatttcccatttgtcattgaaataaattttatgagaaacaattttttttttaatcacctttactaactgtgtaattgttggaacttttgcttccctctaagcttcaagcaataaattgttttactgatattattaggaggaagacaaggcacggttggtgcaagaaacaggtttgcaactgaagcaaattaacaactggttcatcaaccaaaggaaaaggaattggcacagcaacccatccacctccacagttttgaagagcaagcgcaaaaggtacatacatacatatacatataatatattaataagagaatctatatcgatctagctcgtttttcataagtaatagttcagggttcatttacatttctcaactttaattcagaaaataatagtactgcaggtgaaaacagcggagatcggtatgcgtaaatggaagaaacatattatattatatatttatatatatatatatatgttattacgtacctatcaatatacatcggtatccatgggtgtcaagatcgaacaagtgaatccattactgtatatgatcaaagaatcaagctttaccacatcatgatccaacatatataaatatatatttatatacatggagacaagacaagacagatcagtactaaggctttaaggaagctagagaaggccttgatcatgtgaaagaagcatattttgcttcaacagttgaaagataaacaaaagctaacactgatagacaatgatggtactgatgatgatgaatatgagtcatatatatataatataacagatatatatatacatgctcatgagggtcatcaaaggtatatatatataatatgcaaggcaaggcagatgggcagatgggaagatggtatagctatatttataaatcatgaaactgatgttttgtcgtacgtatctctagctagtatataatggcatatatatccaacacaaattgattaattaggaattatattattgggactactcaatttatggatagtttcatttcatatgcttaattaattaattattagtagccgagtcatataagttttgcttcttcttccttttgtcctatttgtgaataaggatagcgaggggttttttttgtggggggtgtatagtgtaaagatctgtgcatgtttttagtatacaatgatcgcattgattatatagttctttttctttggaaatttatgtagacatatataattcctagcaaattgtggcattattatgtttatatatataaatatagcaatcttattgtttatgtgctattatttgatcatgtatatatgaatgtgtaataaccatttggtatagtggatgggatgcactttttagggcatgttcaagttgccttgtggggttcaaaccatggcgacatttagtttatgggtaggtcatgttttccacccgattaattgacaacatgcgtgtacgatggatatattgctattatcaacacaacatcataatattgctagctaatatattcagtattatgttgaactgtcatttatagaatatttatatatatagaatatatctctatctttaccttataatagcatatatatataactctacagtaaaacataaatttttctatcactgatgtccaagtaattcatggctgaattattgcatcaattcatttatttccaactacaatatagtttcaaatcaattccgtataattttaaagacattttcaatgtcaaaatgacatagttattagttttaaaaatcaaataacagtgaagtgcggtttgacccataaaacttaaattcaaaactgcaaacccgcacaatttgataaaaatgcaatccgcaactgtaccagaaagaatttcaaaccaaatcttttttgtgtacaatgtggtgcggtgtgggtggtgtgatatacatctctagtggtaatcctactgtgtcaacaacgtcagttgtgaattgatgctaaaaaatgaaacagaaatgttgccttctccgttgtcttgggtatgccatgttggttgaagacaattgcaatgacatgatcaatgctgccatccctgaattatattaccttttttttcaagttttatttccgttagttttaacaaggtgattatcacccaccgtctcactacattattgatgggtttagttgtttttgcggtacatgcttctctgtgttggctttgtagacccagaaagagaaaaagaaatatcgacagccatacaacatgtattggatctaataaatatgccagaccttttggggttcttgctttagcatatgaggtaataaaattcttttctatttttatctagaggagatactgatttattcagccatatagccagaaaactcttgaatggatcactttgtatatctggaagtgcgcgcggtttgttcgaatgtgttattgatctcttatcttataatttgttgacaccatacatttggttattttaaatatacgtcttgttgattgttattttatttttcataatttaagattataatttataaatataatgtaattgttccccgtaatcttttgaaagatattattgacttgtgttgtgtggtaattggtggagttcatttatcatcacttagtacatttacaaataaaatttaatcagtttatttcctatatgttggaaattgaggattgtttgttctttattaaacttgttattagttgaagagtttcccttggaattttctttctattgattatcataaaagacttaatatatactttttttttttgttagttgatttacataaaaaaaaaaataataataataataaacaaagatcacgtatataaactcacatattcttaatcatttagtcgatactattaatatgtttctccttaataattaatatatgaagaaaaaaaaatatgaaagaacgacacatggaaataatatgccgtatagaattcagaaaatgcattttattttattttatcagaaaattcaaggtgtgtgtatacatataatacgagtccttatgatcatcatatatattcaatatcattggagctatcaaagttaagtgcataactttgaggatcatattgaaattgcaaccgtcttttcttggtataataataataataataacaatatgatgatgatgacgatctggtagtactgaagcggcgaatgaaattgttccacttccagtagtatttggatcctgccaacaattctgaaacctctctaaccttctttccactcttaacaccccaaatcatcatcatgaccacatgcttattattattattattatgatcataatcttcttcttcatcttcatctttttgatgttgatgatgctttaacaaatgccactgctggttgtcccttcttttccgccgaatatttgttagtccctcaaaacaattcccacataacgaataataagagggagaggccaccaaattattattctcattattatttggattttttgccatggaaaagtttataggactttggtctatatgcatgaagctctatatataactaaagtttatttgagaggaatcttttacaagcgttatatatatataatgtcaggctgtcatgcatgtatatatatgtatatatattgtcagatgatcagatatcagtcagcgatctgcagctcaatattacgaggccagggtgagataggagaattggtctaggattattagaacgtggttaacgttatatatttattggattgttattatatacatataaatataattatcaactaatcgaagactaatacttacttggtttgccggccggcacgactagtgttccacttagttttgcagctgtggcctctaaattgacaggcaaaaggcccaaacacaatggttttatttcatcgaatatattatgaagggatcggttgttggctgcactttaagcttcttttcttcatcaaaaaattgttaaagctgttttctttttaaaaaaataaattagaactaaattttatgtaggaaataatggcaattccgaaactgcccctacaccaacaccccaacgttcataaa

SEQ ID NO: 14003 - DNA, 63374 bp, Cannabis sativa
gagggggctggtggtcatcgcggtgggtttggtccttggagcgttcttcaatacccaagacacactccccaccgggagtatgatgttgccggcaagagcttctggcccgttggtgaaccaagcttcttttcccgccccacaggatctaattgtgatccctgaggaaagccaagacgcgctccctgggtgagcagcccaggatgggtgccgctccagcccagacaaatcctcttccctcatataatcctgccggttcatgaggagctgtgccgccagcgaatccagcgggttccccgggcgccgggccctccgacccctatccctatcaaccaaatcaagaagagggaatggaggggttcttaaccattttttcccgcatatattcacgcttattttttcaaaaaaaaaaaccgagcgcaactttccatccgaggcgaaaagcaggactttgattaacctcaaccgatatatccgctgctattatccgctcttaggttgttgctctttgagttctctctttctttatgggtctttccaggcggttagatcaagataggacagataagaatggtattagatgggtgtcttctcgataagaagaaggacttctagtagtgaaataggagtcagtgctcaactagtccggagactatagctcagtcgaacttctaatccagccacgaaactgtaaaaatagaactcaaatagataattcaagtgggcaaggtaagctcagtctcaggcgaaggaagcttttaggccgttaatctttcttttcatcgatgggagttagcgatgaatcaaagaagttgtcagtgaagaagttatctaaaacaggaaagtaaatccaataagtccagttctgtaggccgaatctaataaggtaggcgaacctggcaagtagttaacaggctcattttccgttctatgcccgttcctgattctaagcccgttctttcagcgagctacaagagagggtctatttggtcactatgcctgtgggtggaaaaaccctcctgattcaatcccggtagatacatcttttgtttcaagtcataccagactagccgacctaccttgtgtctctgtatttccctaagccaacttatacaaaaaagaatgaagcaaggatagtcgtagactacttgccctatctcttaaagcttcactagcgaaaactgttaactctttcatttctacgaccaaccgagagtccctgtgctatggctcacacccggaataaggttttttttcttgatctgctttagccgttgtttaaagccttgttgagctttaaagtacttattgcaaccgcggttacagaaataagaaacttctctttgactgaagcacttgaacttcactttccaacttgttgggagtaggggctttcactggaactgaaactctattttctgttcaactcggcttccttaacttaaagactttgagggtttgtagggctttacactcgcgctacccgaaaggaactagaagtaaccttttctctaagctaagccgcaaagaaactggaaaaagataaataagaaaattccttccggttgtaggagtcaatttctagaatccgtagcaggtcgttgttttcctcatttctttaagccgaaaggtctaatactgaggtttcctatcaagccaaggaagtggattcccggtacgaaacgatagctattcttcctttgctttgctaccgccctccgaaagaaagaagttaatccgtagtaaccacagaaagggaaactatttgaacaagggcaagcgaaccagaaaaagcatttgaacaactcgcctctatttaagttcatttcttcttcactcgattcctattctttttttcttttgcaacctcggctcaaagaactgggtcacggaactctctgcccttcgccccttggcttggctgatttcaaatacaactatgtggtctattgagacttctaaagagacaactactcggtctataccataccctactctttagactgagactcgccaacttaaccaatggcttagagggcgaaggacaagaaaggaaattggtcacttacaagaactaaactctttcccttccggctctgctttcttccgagagtcccctttctttcttttgttctctcccacttgtgaaagaggtgcttcatgccattcaactctttctcgtcaacctataaccaagtaagtttcattcacttcttgaccaaagctctatcctggttcaactaactttctttctctcttctttcttctagaggaattgagtcgttcttttcggtttaagttcgttactgtaccctggtctcactccgaccacgtactatccgagacctctgtctatcccgacatggatagaaattcatagttaggttagacagcctggtaaccccgacaagtggggggctccgaactttccttatcatactattccgccagactattctatttcattcaatctccattcaaaaccgtctatattcccggaacccataatctgacgattctttcatatgattttttttcgtgaattcgacatcagtgatccactaccatcctttcagctttccattccaaaagggaatagttggcatgtggtccgtccttagaaatacccgggaatcccccttcttgttcttcgagctcaacaggtcatgcttctttctcagttgcgcgattcctaactattagaccctagatcagaggatgtaggtgagtctgattgttctgacttctactgttgtaagttgtcttaaggcgcctttccagttccagcccaataggggaactctccggtgaggaggatcccatttagaagaaggaagaaaaacctacgtatcctttcgccgggagctagggaaaaagatcagtccaagctaggatccgctctcggaagtcaaacttctcctctgcagctaggtcagttcgggctacgatccttcgagcagggcagttcatgagctgctatctccgaccgaggttaggtcttcttttgctctgctgctgttattcttcctccaacctacaggccaaggcttctcgaagtcaagtacatcaaaggtaggggaagaaagggtcatctcatgatggactcaatatctattatcttgccactcacttccctttctccaaatctttcgtttcaagcgaaaatatactaaaaaaagtcataagagaatagacatataaacaagtaaacccggcccaagaagaatgtaccgaaacatcatacatatcagactgaaagcttcgtctaccctttctcttgtgaaaatttctgtattgatagacctgtgtgacactagccaatcaattcattcaatcgacgaactggtcgggatgataaccagagatttttcctgttcttggagctcaatcactaaggcaggctgctttccgagtctccccatttccgtattttaaaaaatggggatcccccctctctatcccctgctagctggataaggtgggttgttttctcatagtctccatttcgagatggtggatcgggctaatcagactggagctgtctggaatggaaaggagggatgcttaagaattcctttggtagtaggtatggggcacgcttctttcaggggacaagctacctgaggcaagtagctagttgactgtaggtttagatagagcacgctagcatagattctaactaattttctatctccggtcttggtcttcttcttgctaggcgagtgggctttggtggatccgatccaccaataaaggggtgcccccctgcttggggggttgttgtaaatcactaggagggataagaatgtatgagctgttagctctttttgcctagtagcagtagcgctaagctgtcttctctttgtaaaggggagagctggatggcgaacggggtctttctttgggaattcttaaacagtttaagaactagcagggattttagcttacctagggttccctgccattgatctagttcttgggatgaaatgactattcagccaaggtatgtaataattctcactagtactcgagcctgatgaaagaagaaagagccctaaacagagaggcagcattgctagtgaatgattttgtctttttagggaaaggtggaattcaaaataagatgagcagcgtatagtccgccggggatttgggaacgcagggaagtgtacttgactctggaagtgctgctagtcgaaatctactttgtccccaattcttcgcctacaaaggcttagcctaattggtgaattgttcgtcactctgaactgaagactttcttctgtggtgttcccactatctggacttgtgtactttcagccgttcaggtccgagaacggtacaaacgtacaaagaaagtggggtacactgtgaagcttactgtttttggtctccatgaaagggaatatagagagaaattgtatatacctgttgagcgaaatatcttgtccggggaaagaaaaaactgctcagctccagtgactttaaaaagcggaggcgcccgaatcactcctttttccttccgagagaatccactaacccaataccccaaagcgctttcctctgaagtcaacttcctcagaaagcaatctaccttcctatgctgaatcaatcgttcagtgatcgctacacttgattggggcaggctacccacactgttttggctaacaacccatcttcttgctgttcctcattacctactcaaacacgaagaattggaaggaggatcgggaaccagctaaggcaccgtagcgtggcataactgacaggttatgttctatcatccgagtccctcattgagctgttgctccccgggaacacgaagattatacatcaaccccttactataaccagtctcatctctctgctctaggagtcaagattaggattatttaccccgatcgtgtgtaacaagagatagactcattacacaccggagtttgaagctcctgacggaatggattttccgcttcttcctcacgttgaagcagggaaatcctagcccttgaaagcaagcagcccacttcggactcgctcacaggagaagcacgtacctttatatccttcgagaagactaagcggtgagctcttacttagagagagttgggtagagtcaatagctctaagatcacatcggattggtccggctagatctttgtgaaaaaaagcaaagtgctttctccttcacttcaatgggtaaagaaagaccggttgacaccgcttttcaaagattgattgttagcagcaagcaaccttgccttttccctttgattacagtctctcaactctcactgtaggaggcttcgctccctgctgaatcagtcagtgaatcaatagtggatatcgaagagttcgagtagtggatctcgaggtgttcaatctggtcgtggtgtgtctgatggttgagctccgcctttgatctgcgactcccttgccccgagcgctgggagaattggctcacccgggtaccactgttcgttttttctttttactacgtgacagctggatcggttcgtgcggagcaaagccctactttggttggagagaaatccttcagttgcgctattctattggtgtctgaataggaggaacatgataaactattgcctgcccctaactatagaagcttgttgccactgtcctatcaaagaatgagagatagagttcagttcccaggtaacctcaaccgatatatccgacctcacacacttggttggaaggcccgcctgttcgtcttctaccctatcctatggtgtctattgccagatgaaagagtcctgagagcaggacatctgctcatcagtggtcaacatttaggaagcggtcttcttcccgaacagcggaaggaagaccgctggccggctagctcttccaccctagacgggccattgctcgggggaagcgggcccttctcagccccatagccaccgttccgaaagtttgaggaactcttctattatggaaacgggggtttaaacctgagtacagagccgcagagctgacggaggaggcttttgcgcggctcaaagcggcgctcgtctcaacccgccgagatccgctgcaagaacgcaatgagccggcgccgagtgccccgaatgatgcactaaaacgggggattgggggacctaggaagcggaaagccaacagggctaatccgaaccgtgagggcctcacgaagattgtacagacagtgttacaatctctcgacaaggacaagggaaggggctaacttattaaattttcatttaataaacgagctgaagatcaaaatgtttattattatatatttaaggcctcctgtcttactttcttccttgccctcttgagtaatgggaagcgggctagtccccgaaaatgcccgttcgcttgtcgttggggagaaaaatttctaactcttttccggtatgccgctccgcttcttcggcagttacgcgatgagagcctctgcacctccttttcttcagcagttccatgacaaaggcttccacgccgtactttctttgggccaaggatatgcttcttcaagccaagcgtggtttaaatgaaagtcaagaaaatcctcttttatcaaatcgtctgtgctcacgaatcgattgtggaagcaacatgaaaatgaaattacattgattgtaattatagtaacagtcaacacagtagctgtaagtagttttccaatcgctatgaagttctaattatgctacttaagctatatgcttaacacatgcaagtcgaaccttgttctcttggaaacgattttagatttcgtattgaaaacagagctcttttatcgcggaattctccattttattaagattaattgaattatggaattttctcccagagcagcggaactaacgactctattagaaagtcgaatttccaacttttacacgaattttcaagtggatgagatcggtcgagtggtctcagttggagatgggattgcacgtgtttatggattgaacgagattcaagctggggaaatggttgaatttgcgagcggtgtgaaaggaatagccttgaatcttgagaatgagaatgtagggattgttgtctttggtagtgatactgctattaaagaaggagatcttgtcaagcgcactggatctattgtcgatgttcctgcgggaaaggctatgctagggcgtgtggtcgacgcgttgggagtacctattgatggaagaggggctctaagcgatcacgagcgaagacgtgtcgaagtgaaagcccctgggattattgaacgtaaatctgtgcacgagcctatgcaaacagggttaaaagcggtagatagcctggttcctataggccgtggtcaacgagaacttataatcggggaccgacaaactggaaaaacagctatagctatcgataccatattaaaccaaaagcaaatgaactcaagggccacctctgagagtgagacattgtattgtgtctatgtagcgattggacagaaacgctcaactgtggcacaattagttcaaattctttcagaagcgaatgctttggaatattctattcttgtagcagccaccgcttcggatcctgctcctctgcaatttctggccccatattctgggtgtgccatgggggaatatttccgcgataatggaatgcacgcattaataatctatgatgatcttagtaaacaggcggtggcatatcgacaaatgtcattattgttacgccgaccaccaggccgtgaggctttcccaggcgatgttttctatttacattcccgtctcttagaaagagccgctaaacgatcggaccagacaggtgcaggtagcttgaccgccttacccgtcattgaaacacaagccggagacgtatcggcctatattcctaccaatgtaatctccattactgatggacaaatctgtttggaaacagagctcttttatcgcggaattagacctgctattaacgtcggcttatctgtcagtcgcgtcgggtctgccgctcagttgaaagctatgaaacaagtctgcggtagtttaaaactggaattagcacaatatcgcgaagtggccgcctttgctcaatttgggtcagaccttgatgctgcgactcaggcattactcaatagaggtgcaaggcttacagaagtactgaaacaaccacaatatgcaccacttccaattgaaaaacaaattctagtcatttatgcagctgtcaatggattctgtgatcgaatgccactagacagaatttctcaatatgagaaagccattctaagtagtgtaaaacctgaattactacaatcccttttagaaaaaggtgggttaactaacgaaagaaagatggaactagatgcattcttaaaagaaaacgctttgccttacctatgatgagatgagtcaaattctaaataatcgaaataaaagccccgttctctttgtctccgggcttttcaaaagcgttttactccgcattcttccattggtaggaagaatgttgttgttgcttttggtaacttctttgatccccttttacctcatacgaggaaatccaattttcccgtattcaagccgaagacctattcgaggtcaaggttgatataatcaaaattatggcgggcctcttacaccagactactttcactatatatacaggacaggaactggtttaacaaaatgagtcgagaactacatagatctgaaaccttcttccttggtctgggagataggttatgcaggcgtacaactgttcctaggttgtattcgatcacgaatgggtaaagaatcgattagtagtagtatgcctgatattgccagaagaccttttcttctttctctttgaaattggaagaggttcttgattaaaaactaaaagtttcttaggcctgggcaattcctttgatgaggtacatacctcagtccaagacggacgcggagctctcacctgggtaacaatctcgcgtgggtaagaagaaagcgtcaaagccattcaaaaaggcgcactaaagtcaagagcatatttatacagtgtgataggctaggacattcaatatattagcatctcaataactgagtggaagtggctttgtgagtacctaatacgcatattttgtaaggttaagagtgataacacagggcttttcaagctggagaatcaaaatggctgtcagccaagaaataagcccctttttttaaggcctagcattttatttcccaagatggaaaatagaataagtaaaggcaatatgttgggtaattaatattgcatctttgcagtcttgtaggatatttagtactctttctgcttctgtgggacatttagttcttttcctgtggctaagcagttcttttgtttgtagcttcttatgctagaatagaaaagtttttctttttttgagtctaatgaccaaacaaaaaaagggtttatggggttcccttctccagttgttccgcgaccaattcagggctaataggtaggctgagaaaaggcccgttgtagttgggttccagatgggtcgcatgttcatatcagacgtcagtggccccccggtcaaagtagtaggcgccctccgcttttccagtactataactatatagtaggactaaacctatactatagtaggataaatagtgggtttccctttctttagtggtggccacgtctcttgaatatataggacttggatttattggatataatctaaaggttctcatatctcgaaaaaatgaaaataacatatagctcccataaaagcctatcaaaagaaggaaaaccaccccagttgggtctcagctttccttccgttcttctatagtgggcaccaaaacctatcatttattggagtggagggcgcagcttcccatcctcattccgaaacaaagggagtaaggccacttgtgacctatcttattggtccaacccctactttaagaggaaagcacaaatccccttttcgtttagccgatatctcttgaagtatttgttttgaaaagcctgcggtcgtcaggcctttgatatatcatttatctagtgatcgagaaatgcaactcgatcagggtcgagccaattattgtaatgcttcactcacagctacaagactttattggtccggttcgaatcccttctgccttaaatagttcgtacgcatctttttctttgccttttgtgcagtagggtctttagacacttgagttgctgcacccctggtatgatatatactcgattactcatacttgattgcttgatatatccatgccagtagggagggaaatacttaattggcttcgagccgcccttctctttttgaatatggaattccggcggggcatatttctttataaaagaaagccctatttttgttagctgttagcgcgcagtagcccatctcatgatacggagagagccatttgatatgagtaacaattagtttcctttcaccgggcgtgtggcattaagagccccttgggatccttcctcatcaagagaagagatccactcatgcatagcttcgactaagaataataatacaagggagtcctctttttcgaagtcgccctaggttccgatccaccatcggtgagacccctcttgcttaagtactggttcccttcactaaaagaaagaactcgttgagacttggtccattgttaggagaacctcgtctctccctctctcacctcaaggtatggtttgggccctgtggtggtgcagaactaactcgataagatcaataagattcaagatccattgaatcctcccgtagagtagactaccgacctttattagccaacctcttcgattgatcaagttgagacaagcaaactatgtatggcttgggggttagatacgagggacttcagaagactacacctaagcggaaactggcacctgagaaattccaactcctgctgacatattatttacccggcgggtaatagggagaaggacttcgactgagactcttgaaacatcaagtgcgcgtcctatcaaactatacctgtcgcactataacttttgctggggtgggttccggagctgaccacgacgtattaagtcaccaccaaaagggcttattgtgcatctccctttaggcgcaagaggcgccagcaaagcattctttaatgaatgcaagtgggatgctgtccatctcaagcacgagccgagctgcctcacgactgactttcaggctcgggctcatcagacaccaagtccttagtcgcagctcacaggtacgtaggtccgtccatccgttcccttcccactgccatttcccgctttcctaccagccacttcatgattgtttcagaggggagcatctacaacccataaagaaagatcttgattcccccgctaagttgcttgttataccgttcgggcccaatacccattcttcactcacttcagagagggttaacaagcttcttagtgcaaggagaaaagaaggatctattctctcttcctgcgctagccgtagctccctagatacactaattcagtttctgaggccgctaaaggttctataaactgcagagagttttcttcccccccccccgtcagagctggagggaggccctcgcctacggtgttatagctactgttccggggatggggataaggagagggggtatagaaagaccattacaatatcgttatcttatctttcaaacttcctaaaaggctttgctttataaaagcccttataggtctttttaagtcttcctcctttcgctcctctcacattcgttcgaataaaaacctgcccctttcctctttagggctcctactgctgcccggttcttttgtcattttgaatcggaacaggcacaacccagttcatccgattactacagggattaacccaatccgaaatatgaaccggaaaagaaaagacctattgaaccgatcacaggaataccagttacagtacctatccgccaaagaggaatcctgcctgtagtatcggccatttaccccacttccctccacatttcatcaagtggtcatgctagagacataagcagtcatggagaattatgagatgatatccttgataagagaattcctactattattttactattctcttttcttctcttaattgaagaaataattggaaaataaaacagcaagtaaaaaaaggagtaataaccccccagtggagagactggtacgattcaattcaacattttgttcgttcgggtttgattgtgtcgtagctctataattcggattaggtttctcgttggatgaactgcattgctgatattgaccccccaaaaaacttcttcgatacagtctgttcgccaagatttcataccttttagcttgtcttatgatatttcttgcttcattcttgtcttgtggaaataccccttttttgctaagtagtctcacatcggttcaaaccacttcggcccctcggttgagtctacgttctcttctgctacaaagacctctgctatctctatcaaatcgacatcaaggaaggaagtaggtatagttctcttgaccacctttatctccttttcaacttctgtgtcattaatttttatcttagaagcaatcgtagccagaaagtcagcatgacttttcttggaccgagagacatggtcaattcgtacttcttcaaacattcccatcaatctcattgccttcaaccaatagaataggctttcggacgattctctttgactttgaaactttcttcaatctaagacaccactagaaatgaatctcccagccacttccaacatggggagctttcgtatccctgccaatattgcgagttcgagaccaatcaatagtgcggaatactcggctacattgtttgtgcaatcgaataccaacttaaacgaaaatgaaactacttaggttgatggggcgcccccagaggcattaaagagtcgttctttcatgggaaacccaatcaaaaaaaaagggaaaggccctacttattcaggggggagtcgaggtgcccgtggtaggcgatgaatggagcagtcgatcaaggcaggagggtggtctacgatcaggcttagtcttctatccctgctcttcccgggttggtcgataatttctaaactattgggtaaacatagatcctagagagcgagtttaagcagatcactagaagaaaggagttgatgaggtttttagactcaaggcttctgtatctgttctggtttatcaaaagaaaaggttattagatatccgttcaaaacccaggttttcaaatatctggtcctcgatggattggacggaaaagaaggtcaaagcggacctattgattgaccatagatgcgaactcccacacccttagccagtaccagcgactagtcttcgggctacgaggtatatagggcgagagcccgctaaggtaacccttaagcctaccgtgttgagcctcatgcatgtactgaacctagacatagcctgctaaggaacccagtagccgactcagtacgcacttttttccgggaccgcttgattcagcatacagcagtgcaacatcggacgttaatcaggaagcatacagcagcaagcacacatctttgcagtctttctaaaccttaaactattaacccggtgtcagcctttaggcttgcagacctaatcttgagtgttgttgaaccataggttcggcacaagaggaatccttcttagactcggttcgccgtcagtttgaaaaccgcaggtgggtgcgaactactagaggcccgtccaggaggttagtcagaatagaagacctagaacgccttggtgaatcaaacccagagatagagatcgtggccaacaacgccagtcaccgaggcaccaggaaccctatctatgatggggacaatgaagagtccactggctctaaccatcagctgaaccctacagccccggcaaatcagcaactaactaacgaggcagttagccgtcaactagctgagattgcccggatgttagcacaattgacctcgcaggtagccatcggaaataccctggctgcacctgctgctcaaggaacaaaccctccatctaccaccccgactcagggggcacagatccacaaccacaaagccaaccaagagtagcagatgctagacctgtagacccagtacccacatctctatgtgcccgcagttcctgatcactacgaggaagagatccgaagagagcctcctgcagtaccggccgtgtacttggctcccactcccatgaatcagatagtgccatacgtcccaccacagccgtccgatcctctgatggagaagatcagtcgccttgaacgggcagttaataagttgagtggggacaagtatgatgttgcagatcttgagaatctctccctataccccaaagtcaggcttccgtacggttttaagtggccagagatagagttgtataacggaaccggatgcataacgaaataggagaaaaagaggcttacctcggaggaagatccaattgctatgctcttgaagagcctgaaccctgagtataccaataggttgactacatcacccaacttttcattctttagtttgtgctggctgccagatagaagatgcattgacagctgggcggtcgctccccctctctacgccgttgctttgcaacgggtcctcgaataataagaagaaaaagtctgccgggacctatcaggctaaagcagaggtgaatacaattggagcggcgtcgctgaaccaaaggccaacctatacaaggggcaggcagcacagccatttcaaaataaaaaccccagttttatcaaaaaatactcaggtttggaaccccggcggactccgcaggcccaagctcagtacccacaggcccaacagcaacaactgggtaaagtgtcctatcagcaaggtcagcaaggggcccaacagggtcagagacaagccagaagacaggaccgaccactccgttaccgcttccgatgagcaagttgatgggaggtctggtacaggtacagaagggggtcttgcccctcttagagccgaaaccgacgccaaatacattgccaatcgggtatgatccaaacgcgatatgccattatcaccagagccgtggacactggaccgacaactgctggaacttgaggcatgtcatacaggatttgattgatacaaagcagttcgttctacctcccgcgccggccacaacagctcagccaaacatcaataacaatcctctgccggctcatcctgcacaaccctctaacggggtcaaaagtggctcttttgaccccactcaatatattacgcccatcaacagactcgctgcagctgcaccggcgcagtcaacccagaatattcagtcaggtgtgatcaatatgattacacccagcccatgggaaatcggccagccctcatcctcaagggatgcgcccctacccctaaataagtaaggccccgttctaccgtactccagaccctcagcctagccaaggcccggtaactctggaagagatcctagccctgtctagtccagtctaccaaagccctttcacattatcgagcgctaaatgcaaacatcgaagcgcaactctttttgcgtatcgagaatctcgaaaaccaaattagttatgggcagccccctcaactaaataatggggaatacgcgcaactggtaagggagaacttagaacaggccttcaacataaattcatatagagatctgttggccagggaattgttcgatatcaaaataatggaactcaaaagccgcttgcaagagcagctctttgataaaatgatggctcagcccacaatagattccattagggagatatctccttataggaatattcgagagacagctttcgactttagcaaggtacgccaaagtaagtaaagaacagatcttactttatggtaggttcagtaaaagcaaaaaagatcagatacacaagaaaaagagagagtttctaatccaacagcgagcaagactgactgccagccctgaagaaaacattagagctcgaggagcgaagccactcgaacgaatgtgagaggagcgaaaggagacccttgagaaatgaacagatttttttctcttattcttgtcaaaacccgaggaagaagtttcgaataggggccgaagtgagtgcagtagacgtttgaaagactatatggaactcaaatctttcatcccttcatcccagtttcgaaataggctgtgtcgagactgcaattattgctttcgggttctttccccagccagtcgcccctgtgtgggaggggtcaagcttggagacttctcatttgtggggaatcaaactatcacgcaacttgcattccggttctacatattggggagttccgcttttctaaggattccctattgctggcatagcagggactaaagaaaccatagtcgcacggaaattgcctgccggacagagggctgttggtctaattaattacacaattctttattaacatatggctataaaaaattatcctatcttttatcagcccccttcaacaatgagatttcaaaagacgattctttctttctccactgcttcctaactcactcaaaagacgatacttggtatataatccacgccttcccttcggaaatctcacgttgcattggaccccttcgaactctggaaatatctcccttatggtgcgcgccgcggtgttctttgacgcgctttctttcttggctacagcgtgatagtggaacccgccattctcatgcatttcccttgaaaccactatggttttacacctgaaagtagctaccaatcttttacaaacttcctcctgagaaagatcccgcgtgagatagtgttactgacacataaggcttcagcgtgcttttcgccagttgcttctcttttcttttcgttgttatgatgttccattttcaaatagcatgagcgttgaaagggaaattcctatagattagagcgttatattcttttttttacttctttcaaaggggaatgaagaacagaagagaggaggaaagtggttcactggagtttgtctcttgaaaatggttttctttctttactctcttgagggtctttttctctattttcttttttggtatcagagccaacaagagaattagggtgctgaaacaataacccaaaacctgcttgcttagagaatcaaactgttcctgtctgctttttccttttttgattttatgaccaatagaaatggaaactcttttgttatatgccttatacctaaaaaatatctttggtagatcctaagacgaattatgtacacaatgaggatcacaatcattgatacagtttgggtaccaagctatcttatcaatatatttaaaaaaaattcgatgtagtgatgaaattttgatacataaaaactcctatttgtttttgttcattactaaaatgaatcgaatcctatcaaatatttatatttctcctttgaattactcatatatatcctatgaatttcatttcgcaccggaaactattctaggagaagttcgaatccgttccgttcggatattgatcggtcttggtttgacatggtttacgcgttactggttcccggaagagttaatatctccattagctaaaccctttcttaccctgcctttggactcgtattttgttcgtacacaatcaacggaggcctccccgacatatgttgcaacgtcttcaatagcatgctcttatttcgtctttcccttaataagtcatcaaatttggtgctttttgatccccagttgctatggagaacaaaggacgaaatacaatcgattcctctatttaagtggttctcgcttctccttgttcctgttcctaactcctccccgggtagttcccaatgtttggcactttccatacttcgtgggtgcaacatcaacaaattcgctcatgatcaagttacaacctaagatctatgaccatattatgttaactgttcgtatttcgttcattccatcggtatgctcccaggtacctgtaattgtgatccgtttgccagaactaaggggtctttctgtggaaaccttcacgaacaatcgtcgttttttgatggtttttccgcttctcacagctgctctttccacacctccggatatctggtgccaaatcgtcgcccttttccttatttcttcgataatagagttggctatctttgtggcatcgattgtacaagttcgtgaagaaggctggacgagtggaatgagggaaagcggctcgatcgacaaaaaagaagagtagcccaacccgcaaagtaactatcaatgaattcccgagcaattctcaaccaacatatgcgattcattcccgtaaatattataacacacagaagactccttaccttaggagcgggatgagtgatacatccggcgagcgccggtgaagaacgcaagcaaagctggagctcgggcattgttatattccatcaagagaaaggaggcagactggtaagaaggccgaccacatagggggggcgaaccgaaaagctcagctttgcggcgcggaccaatcttccgtaccgccccccttactctctctctataaaaaagcctgcgggaagcgcgaagggctaaaccactaatgtcgtggcgaaggttatacctcagaaagtcagcgaagctaaggtttcgtatgtgttatatcctttcgatcgagcgacaacttcgtttccttcattcccctttgaaagaaaagaagtaaaaaaaaaaaagagcgctagggatacacccatttagagagagaaggttgcagaagtgcttctagatctcatggaataaggcagaatttagaacaacactttccatctcttgctttcatagaaaaaaagaatttagtagatgaaatcctgaaaccattaccgcaggccaaaatttgatttggaagagcaagccagagaaaagaagcgttgagataatatactttcatcctaatctcatctactgaaaaagggggccctcttgactagaaaggatttttaggcagaattggcataattattaccgtgaggattgagctgccaaaaaagaaattcttccggcgaaaaaagaaaaaaaagtattctgaagccaaatgctcttggatgggcggttgaatagggagagaaatccttttttctccttcatattgaatgtagtctatcactttgaggtcatgagaaccttgtgaattgatataaattatggcatgcatctctgaggagagtggcacggccaaacatcatcccagaagcgaatcagcttaccattgcccaaccaaagtctagcccaagtcctgcctgaaagtctctctgtaccaaataataccaatacctttctagatgcaggatattttagaggtgggttggtcaatccatttttgtcattggagaggtacttagcagccaaatatgagcaccatggctttttcttttcctttggaaatctccatagccacttcataagaagggctggcttggttgaagtccacctccttcgttaaggtgattgaaaaaagaaagaccacaaaaattttttcattttttgtataggatgttagtaaagatgaacatgacgaggtcttattgtattacttttttagtttttttggaaaattcaaattcaaatctatctcaatcttgtggcaatttcctcttcaaatcacatcaagatgcactttgaaggagtagggaaggctactctgggaattcggattatggtggggtcataagagatggcaatggtgctgtcatgtggaattgaacaggtctcctctagggatcaaagatgcaacctttgcagaagcagaaactctcctgcatggccttttgtccaaactattgattcttttcaagtcatcatatcaaacaaaaaggggttctcttaacatgattagatgggcgaatggtaagaatcaagaaccttggcgcgctttattctgagaaaacatttctcaatatatgttgagttaaaattcatcatgtgaagagggaagcgactcatttagctgaccgtcaggctaacttgggtttaggctgcagtcttgtagtcagttgatgggaggtcttccattccagtccagaagagatttgaatttcactctttcccccacaactcatctctctgtgggacttgttccctcttcaactcagcgctttatagataggcatttttattgagaatgcggtcccaccttacctttcaaaaaaaagttgccgagccgaaggagctctcacaaatagaatttgagtcccacggagaaaagctagctggataaacaagacagggatcgcccgctcggcaatgctaccttggggaggagacaaaacactttaatataacaattgaaactcatattcaaaagctttttcgatatatgaagaagattactatggaagagttggtgaacattgttctgactcatagctctaagatgactagcatgaataagccagcttcaacaccacctagactcaacatcatagacagacttgcaccgacctcaacataaaaggaggaacctggtctgtctatttgtacgcattggcttaactcactcctaagctccctagacactgcaaagaagacataatgaaaactgcctggtaagggctgtacaagggaacgagaaaggagtttgataagaaagagtttgggaatgcgcttagttaacaaacatcgagtttggagtcggggcagcatggatacgagactattgaagtgaagtttggaatcattgtggttttctatcttcagattaccctattggagaatcgccaaggcctttcagcgattcgacgcgcccccctaagctagacgcttcacctacctgacctcagagagaatagaatgagtcgccctagccctagtcttactcttagtaagaattgctctgtaggatagtagggcgaatgaatcgcattagtgcgatttggctagctgaatcgcccttaatatatatttatataccaggtcaactgacgccagcatcaccactcactacggaaacgaaatttccttagtcctttttctgtgaaacaaagccaagcctaaagcggatggacaagagagcaagggaaagacaaactctggctctttcatttgccaatggtccccatcgggcgactgtccaaagcgagagaagctgagtgccttagttgccgaaggagcaaaggaagtggaatctgactctgagagcccaacacgagtcaatcctctgcaattgttgaatgccatccatacggagtcctctcgtcttgtacattaaggttttgcttaatgggaatgatgtgttggctatggttgacacaggtgccacgcacaattttgtggctgaacggatggtgcagacccggcgggtaagaatccaagcaagattaaggatgtcaattcggcagcccaaccagtgctgggtatggcctatggtgtgcacatgagcattggttcttggagcggacaattgaatctaatggtagtgccgttagatgatttcgatgtcatattgggcaatgacttctttgtggctgcaaagtggcgttgatgccgcaccttggtgggatgttgatcgcggatgagaggcaacttgtgcctggatgcagcctaccagacaaaggcaggaaagcaaaggcatgggatgctatctgctatacaagtgggcaatggtttgaagaagggtgctgttacttacctatcggcttttatcgaggtcttgaagagccacaaggtggaaattccggacaaagtggctgagattctcaaagagtttgcagatgtaatgccatcagaactccaaaagaaccttccccctagacgggccattgatcacaagatcgatatagtccctggtgccaagccccctgcacgtgcaccaactcggatgtcgcccttggaactggcagaacttaggaagcagttgacagagttgctggatgcaggctttatccagccttccaaggcaccctatggggcccctgtgctgttccagaagaagcaagatggctctttgcgcatgtgtgtggactatcgtgcactgaacaaagtgacagtgaagaacaagtatcctgcccctttggtggcagatctcttcgaccgattgtccaaagcctctttcttcacaaagctggaccttcgttcgggctattggaaagtcagaattgcagaaggagacgagcctaaaaccacttacttctgttaccagatatggctttacgagttccttgtcatgccatttgggcttacaaatgacccggctaccttttgtaatttgatgagtgatgtcttttataacaactaactatattgatcgctttcttgttgtctatcttgatgacattgttgtccatagtgagtccctagaggatcacttgtcccaccttagaaaagtattaaaaagataatgcaatacaggattgaaaaaagaaaagtgctttcgcccgggccgggcattggtttgcttttaggagaataaaactctgtaactaaattaaactagaggaatgccgctttgcgatatcgattctgcgagtactagacttaggattacagaagccactaagtcaaggaagggccaccaattactgagccggtcaagcttaccccgccctttgactagaactgccctatatgcaattgcaatttatgtaacaaaggaagatacctagatcttttcttagttgggtgcctctcttggtcggttaatacggatagatttatgtcaggccgtagacagatagaaaaatacgtaatgccatatctgaaaaaagaggaacacttatactacgactataggtaagtgttttcgctcgagtagagggagtgaggtgagccaatagtttttagttattcgccggctgggcggctcaagcgaaaaggtaagaaatagatctacaagttcaggaagttttgtcctgtctgggcaaagggagaattagcttttcgagtcaaaagagttccaagcggtcgaattgaattggttgcatccgtcttcccgcttagtgaatctttaaggggcgtaattaatccaatctctcaatcggttggtcaaatgcattgacatttgcgcattcgatttcttcttttccaaaaagtgggaaaaaatccccttgccttgctgctgagtatgccctagttttttttcttcttgaggagtggctagcttatttcttcatctaccattggaattgaaagttgcggaatcacccatgatggctgtttcagttcttgattcagttgaactgcccggccgagctcttcaattgcttcaagcgcgtttcgttcttcaatctctcggaaagaagaagaggtccccggtcgatccgtgtatttaacattttttaatgttccttcttctcctctgcttttgctctggcctaggagtaggagctcaggtcaggcccttgattcttgccgctcatgccttgccttttgcttgcttaatttagctaatccgctaatcgtgaatcccttgctcgctttgttccagttcatctttcttctgttgttaagcgagggaaatccataggttaattaatagctttctctatttttttgtaaacaataaatatgtgtccctcccctcttctctgttgagttcatctcgtaaagggggctatagttcaatagtatgggcatttctccaacgttgagggagggcgtgttaaagccatcgcataggggctcccgtagttgctcccacaaggattgataataagcatcaatccggccttctgcggagataaaaggaagaatatatttgaaatattctctttatttccatctcaagctcggtcattggctgttctcctcaatcgattagactatggcgaatcgcttgtgtattggtctttgggaaagtataagacgctattgctcgcaactggtcggtcccacaaagaaatccactctagttgcttcttctgtctggtcggaaactggtattctgtttatggtgtaagggtcggcagcaagcataggagctaaggtcgaaagcggggtggagtgaaagtcggcaacagctaattggatcaggcgattcttgttgtcgggcgtagggtactctttcgagtttcagaggtgaatcctcatatgaaagatttccttccccggagaaagccccccttggtggcctcgagaaagaaaaaaaaggaaaaaaagaaacatcagctcaaagcaaactacggctcaaaagaaagagagagaagaggcttctgactcataagctactagcccgaaagccttaccaactacgtctacgttacttactagctagcctaacaagagaagtactggccaatggaagtacttacttagcctaccgagcctatcaataaaggagaagcggacagagagccggctaagccatatttaccgagtagaatgaatgtatgtagattggacggcagatcagggcattaagattttaggactcctacaacttcaatcttggagaaaggtgagtgggctaggatcggtggatcgagcaatggctggctcggtgctccccccaattcattttgttcagaagggatttctagagccgggggaacgctcgaacttgatgcgccagaagctccttgcggggaacatcatatttgcgatggggggtatgacttcggcattgatgagcgctggaaggagcaaacctaccgcgatgaccaccagccccctcaaaaacgaagccactctcgttgccaattgaccccctactttcccaagtatgaattgaaaatagggaatcctaattgttgacaaagaagatacagaaacaaaagcatagtcccaaggaaatcagggtctcagatccgtttcaaaatggctttccattgagaggagagtaagacacgactcgacagcgagacacgaggaatttccgtaggtttgacgggatagaaagtatcttatggatcatggaaactttcttcttattcttctcctcctgatcaaaggctatgctatctttaactctactctagtgaagagccagagttacctcacgaattggatttgaaccaatatcaagccactttccttttagtggatcgtgagtcaagtaagagaccacccatcgactttgcttcccttcaggaagaggaacgaaggaaggcacgagccctatagaatgaataaggagaggcctattgatgaccgagccactcttatactactccttacctcacccccttgtcacttaaagggcgaagtcgctgaagcgagtctaaaggccaaagagtgctctttgaacgctactacgcatccttactaatagtagtatagtgtaaggtaggtttgggtatagcaggacttgaacctgcgaccattaggttaaaagcccaatgctctaccaactgagctatacacccccaaaaagagtcgtaaataaggattggtgcggaaaagagggcggcccctcttcttctcatcatattaaaggggcgcggctctgtatgaggctcgtactgcagagcaagcgaagaaaactacagggcgcgcgttagctaggccgttttcttgcaggagtgctaacgcgccccttattgaaaactcaaggaaagccttgatcgatatgagaaagatgcgctcaagcacccaacctaggttaggggcttgggctcgaaagccggccttactcaacaactttattaggttgggtgcttgtttccactcattgaagattctatctacaaaagaaggtcaacgggggatactaaagtagctctcactgacaccatctacgagaaggtgaggtcgtctttctttccccatacggttcgccttaaagccttaaagacggagaaggggaggagcagttatctatgtaattacggtctttgttggccgttgttacggtcctctctttgtccaattccgtcttaccaaacaagactgacttctgaccaacccgcgaagggttgtgaagttggaccaggtacgaagaatgaatctatatctgtgtacggaagggccggcggccgctcaactgttcgagcgcaatacagtggtggttggtttcgattcgacaagggtagaatgcctggtcgaaggtccagtacagtaggtagcaggcgtgttcgttttggctcccgagcgagaacgagaaataggcgatgcaccttccttgctgctacgtacgttgaccttgacttgacagattcatccaattgaacccacactcaaaggaggaccacaagcccagggctcgacgaaacagaaagtatcagcattaagaaacttcttggggttagcagtgcaagaaggagcggggcattcatttcttcattcatattcatagcttagtctactaaaagagggaccagcctcatcgtggtaattagagggcatcgttgatcagttcgcctctgctctattgttttaccaaacctacggcggttttgtcaacgaacgcgtcccgggccggattgactaacctaacccttaagggggccttgccatagttgggttctctgctttagtgtgattgacgaaggctaggctaggtttggtaatacccaaaacaaatgaaaagagatcggggtcgatagttggcaaggaactggatcccccccaaaaaggggcagctgcggtcgaactctaattctggaaataagtcggggcccttttaccaagtctaccggatagaagatgatagagggccaactatcgttgcgttggacaagacggtgccgtttcacttcgagttccttccttcgtagtcaaatctgatgatacgcttcggcgatgttacctacaaaataaaaggcctgctaggtgatcgaaatcgctcaggtcagtgaggactcactcacctactccttatctatctaatagtttcttctatcttcttactgaattcaaaaggcgacccgccgcgccgggctataagatacagctgttgtactacttgactggtaagaaaaagcttacgtaaaaactggaagactcttgtatgtacggtaaccctctcttccgctactggtggactgttgcacagaaaggccgacagaagcaacgtttcttagcgcgcttttcaagcgcttagcttctgctcgcggcgggcggcaaggccataaagtaagttcagttggaagcctaagccaagaaggtacgaacgaagtgacgggcccctttagagataggggtaggggagcggctttcttgtggtagtaattgcgaacatctctccttttctcttagcgtgcacagtttgcttgcatgccgctttaggcacatctctctttcttagtttcacgctggcctaatgaaagtcagtcttttagtaagcgtatataaacagctgtttaatgtataagcaattctttagtggccgcaccgaaaggtacgtacggtggaggttggttgaagatgatgttacgcggcgttcagaaccagccttgaagtgaatgaattagaaagaacgaagaagtaaggaaatgagacgactctttcttgaactatatcataaacagatcttcccctccacaccaatcacgagtttttctccattcctctcgtatatcgtcgtaacgcccttaatgctaggttttgaaaaagacttttcatgtcattcccatttaggtccgattcggatccctctgttgtttccttttcctcctgcaccttttcctcgaaatgagaaagaagatggtacactcgaattgtattatttaagtgcttattgcttgccaaagatcctacttctacaattgggaggtcaccgggttattaaaataagtcgtgttttctgtggttttcccatgttacaacttttgtaccaattcggtcgatccggaatggatcggttaaacattctattagggagcctggtcttgactcttctgtgtggtattcattctcgttcggctcttggaatcacatccagcagtggttgtaacagctcgcaaaatccaaccactttacctacttcattgcccccaaccctttcttgtacctctattgaaacagaaaggtttcatgttctttcatcgattggttattcctctccgttcgtatctctttttccaatttcggtctcgattagtttacaagattgaatggccaattctcctccggaccctcgattcgattgttttccaagaatgttgagccgggtatgtaagccatgtatctgggaggaacttaaaaaaaagaagagctttaggtttttgcatcctgctttggtcttgatgctattttttttagaatctctttttttatttagaagaaagattatatatatgtccaatctctagtggtggttggttccacagcatgctcctcgctgccctatggagtaatacggagggcaagactctctttctcaaaggctctgttcatgcgagcccccaaagagtcactagttttccactatctctcatctggcatctcagtgcagtcctacagctcatagcctacttaccacaacaaaaagattgtaggtaggccctaatattcgaagcgcttccagaaggcattgcttccttcaccaatcataacacccggtaagatgggcttctgcagatctaattcattacataccttggcaaagaaaccacggcagatctgtgattatctcatgggggaggtgtcaagcttgattggtctccctttctcttttgttataatggaaactattgcaaagatgaaatcttgctcccactattcaaaaggaagaccgagaagacgaatgaatccaaaccagggccctggaaagccgtctctagagagaaattctttctccattgtacttttttttacagggaaataaaagcaaatgccgctctattctcaagggcccccatccagatctgctttctatctcggtagtctggtatgtgtaagttataccagccttacaactagattgttggagttccattaagataaagtcatcattcatcttccatagctgacgtaggcgttcagccaaagcatcaaccgttcagttgctgaaagtatagagataagctttcgcccgggaacaaccttattttctctatctgcttcgtcgaagtcggaaggagtttgtatcggtatgccattactgcttgaatgaataccttcacttcggttagctttgcttgactaatcgatggaaaccctatctttctactctttctttctcgcctgaaggcacaggcaggcctatgatcgatctatgtgaactactcgatatcttgacggaatcattaactaagactaattcattctataggagatcgggaattgtttcctttacttctcttcttctgccaacccctatcttcaaagccctatctgaccttgaaacctagcgcacaacgttgagttctattcgaagtggatcacaggctggagcggagagaggaggatggaacttcttcttctgtgcgaaagaaaagcaacctgaagctagcatcccgtgccgtaaggttgagcccgctttcgcttactgtgcctgggacatattgatgaaaatccaatgaaaggggtttagcaaccttttagtcttctgtatgccctatgccctgccctagctgagatgtcgatctatccctataggagaagacgatgtaaactatcgtcttctcgtctgcgtctgctagtcgaatgtaggctagaatctatctccttcttttagtttgtagcttcctttccttaatgcactgggagttgagtaaggactcacagcttcttgtttgagagctagtatctaaatgtctggtttaggtaagtattaaatattccctcatggcttctcttaagcctttcaacgatcgtttagctatccgaattagggatagatagttacacctgtctgtctgaacataaatatagttagtgtgtcctaagatagtctgtattttctaatatcaataagttaatatttggttattttgagctatcctaaatctgactattttgtgtcaatagtagttcccaagattgtctgctaccaaagtagatttggaaattacgtaagtagatgattgagccatcagcgggcagtcatcgagttgtgtagtcataaggaccaacgacgatcctatcctaaagaagaaggaggagttaattcatacggaatcgaatgattacgagtataagatgagaggactcatggtttcactaataagaacgattctacatctagtactaagaaattttttctttttctgtatttttccatttatttgaaaatgggggctgacttggtggggacctgctttcgtttcatttttttcatggctggattttgtgctttctgcaatggaaaaagaacctctttccgttggaggcggcagaagcgatgcaggcccttctaccttccgccccaccgaaaaactggaaatacccccgtcacagatcgacgaggacctgttctggcaggaggtgatgaatagcgcggaagaaaaacgagaagccgcgcccacccctgccagaataaccggaggggcaacagctcaccgaagcccacttgcgcgagtttcgcgacatgttcaaggcgcaagagaagctcatagagcggatccgccatcttcggagaacggatggaatgcgtatcccggccgaaaagcgcatggagcgcttggtcgacatgatcgcggacgagcctgggggaatgcaaaatcttccgcatatcctaacggatatgcagagcaacggccgggagagtcttttttataagaaatccctcacctacgctcaaataatagaaagaatcccacgaaaggaactggatagagactaagtaacgcctcattctacccctggagcgcggggagttgtattcgctatttcctgacgtactggagttataacatttgaatttctcttacattctacgttcctgaaatggatcctatcaaatatttcacattttctatgatcatctttattttaggtatttggggaatcctccttaatagacgaaatattcttattatgttaatgtcaattgaattaatgttattagctgtgaatttgaactttttggtattttccgtttctttggatgatatgatgggtcaattatttgctttattggttctaacggtggcagctgcggaatctgctattgggttagccattttcgttattactttccgagtccgagggactattgctgtagaatttattaatagcattcaaggttaaacatgactcctagagaattaccaaaatacgaagttctctcgttctcttctttcttttttattttgacttggttggcagggtcagggcctttctcgctgggcgagcgcatccgattctaaagtcctttcctaaaccacttcccgttcagttgctgaaagatagagataagctttctaaatgagattgacttccacgaatatgcaggctagaaagatgctatttgctgctattctatctatttgtgcattaagttcgaagaagatctcaatctataatgaagaaatgatagtagcttgttgttttataggctttatcatattcagtcggaagagtttaggtgatactttcaaggtgactctcgacgggagaatccaggctattcaggaagaattgcagcaattcctcaatcctaacgaagtagttcttctggaatccaatgaacaacaacgattacttaggatctgtttgcgaatttgtggcaccgtagtagaatcattaccaatggcacgctgtgcgcctaagtgcgaaaagacagtgcaagctttgttatgccgaaacctaaatgttaagtcagcaacacttccaaatgccacttcttcccgtcgcatccgtcttcaggacgatctagtcacagggtttcacttctcagtgagtgaaagatttgtccctgggtgtacgttgaaagcttctatagtagaactcattcgagagggcttggtggtcttaagaatggttcgggtggggggttctcttaagaataaagaagacgaatagaatctaattcatgttcatgctaacagaagagcggatccaataccaagacgacttctttctcaggaagtgcagcaagtacttgaggaatttggggatatcatgccccacgagtgagttgccaagtgccccctaggaggggcagtctaccacaagatcgagttggagcctggagccaaacccccttttacttagactggggctgggtttagcagatggccccccaactagcatctattagttaaggggtttggttgagctcaggaaaaaatttcaggaactcattgaggcctatttatattctagcctccaaggctgtttttccctatcttgctggggggggggggagcccctgttttatttattccagaagaagcggtagccttgtgcattgattatcgggcgctcaacaaggtaacctaaccatcaagaacaaatatccactttgattgcagacttcttcgctctaatcaataagcgcgagatacttctcgaagttggatctacggttgggctactaccaagtgcgtatcgcggaaggagacgagccaaagacgacctgtgtgacaagcaagcaaccttactaatgaaggggcatttgatttggttatgccttttggactcaccaatgcccctgccacgttctgcaccctccacaatgagctattccacccgtacttagacgactggtcgtatactttgatcgtgggctatagctatccgttaaacgaccacgttagccacctccggaccgtttttaaggtattaaggtctctcgagcctcaaatcaagtaagtctaatgctcctttggacagacggagatcctattcctaggacattggatgagcatcagagccatcgaggagtggcaagcacctaccaaggtgagtgagctaagatcatttttagggctcgggaactattaccgaagattcatcgtaagttactcgaagagggctgctcaactcaaaaatctcctaaagaaggacgtacggaccgatcatggcactgcactgatcggaagagtgtcaaagagcttttgaggacctaaagcaagcagtgattgatgaccccgtattgcagttgccagatcacactaagccatttgaagtacacacggatgcgtcagactatgccgtaggcggtgtgctagtataataaggtaacccagtagcatatgagagccgaaagctcaatgagaccgaaaggcgtggtccaagagaaggagatgacagcaatagtgcactacttgagaacgtggaggcgggtcacgatttgtggtcaagacggataatgtggcgacgagggacttcctgacccagaggaaactcacgccaaaacagggacgatggcaagtttgattgatatggtgctagagtataagcttggtggacggaccaaccaggtcgcggatgccttaagacagagctggcggcatttaagtgtgaggcagtggcagccaccaacaggcttgcagacctaccgcatcgtattcgagatgggcttgaaaaaggacccgcgagaagccttttgcaccaagctaaggaatgcaaaactcggcttggatcaaggaagggctcttggtcacaaaagggaatctacttttttttcttccaaaacctttcttttttcggtatgccgctccgcgagcaaggagtgccacgcacgagcggagcgaaaacaaagcagggggaaatcctttgattgcgtattgaatatagatccatgtctttcttcttccactagctaggacaaaattctcacatgtccgtttcgttattacaaccttattttttgatgtcaaagaccagaagctacgcgcaaattatcattggatctcggttgttcttaacagcgatggctattcatttaagtcttcgggtagcaccactagatcttcaacaaggtggaaattctcgtattccgtatgtacatgttcctgcggctcggatgagtattcttgtttatatcgctacggctataaacaccttatttttcctattaacaaaacatcccctttttcttcgctcttccggaaccggtacagaaatgggtgctttttttacgttgtttaccttagttactggggggtttcggggaagacctatgtggggcaccttttgggtgtgggatgctcgtttaacctctgtattcatctcgttccttatttacctgggtgcactgcgttttcaaaagcttcctgtcgaaccggcttctatttcaatccgtgctggaccgatcgatataccaataatcaagtcttcagtcaactggtggaatacatcgcatcaacctgggagcattagccgatctggtacatcaatacatgttcctatgcccattccaatcttgtctaactttgctaactcccccttctcaacccgtatcttgtttgttctggaaacacgtcttcctattccatcttttcccgaatctcctttaacggacgaaatagaagctcgagaaggaataccaaaacctagttcactcgctgagtctctaagcatccatggctgaatggtgaaagtgcccagccgggtaaattcgtaggttcgattcctgctggatgcacttggaacgttcattccttgtaaggacaatcctacatctaaaccttgttcttgcagttggttagctagtgtcatagtccttcggtttctttttctttttcttagcatttgacttcttcttacttatctttttctttgccttggtaggagggttttcgtacagagtaggtcggggtttggaacccttgggtactcagtaatagggcgcaccaccggttccttaggaagcttcttagcttcagacatcgtttgaattttatcatgcagtgtagctatttcagactccagagtagcagcggatcactttcttgacctttaaaggtatactgatttttaagcaaagcatattcatcctgaagacaattcaattcatatatgagaatagatatatattgaccatcgatgtctattacatccttaggatgtgtgtctacccaaacattgttattatcatagacagggtcccttttgttacccaccttagttccaaggatcttcaagacctttttggcaatgtttagggtatgccaatcaattctgaagttagattccacggttatctgcttagtccgagacagatcagcgtattgtgatataaaccatgcaatattgccccattagattaattatcccaggccttaaagaaggtattgattagtgaggctaacgcaccgcattcttttctacctaatacggattcataatgaagagaaatatctttagacatagccatgacagtcttaccatagatcaatggcatgaagagagatttgattaatttccgagttaggcgcggtagattctaccacggaagtcgatgaacgcaggaagataaaattgataacccgagtatgcactcgcaagtgttaatacgaaatcttcatacctagcacgctgcacacgcttaactaattcacttaataatttcttacagctacacacttccttaataccttcgttattggcataacatgacctcaataggtcagatgcaccttggagattcaccttcgctagacgtcgatccataagaatacccacctcttctaaaaggtcacgatatttcaatatgtatgataatacattattgtttctctcaaagacttgagattgaagtgtattcaatacattgcacataagatgtggatctttcaacaggatatagaaattctcatagtcatgagaagataatagacgaaacctattatagaaatcccccgttactccgcttaagtatccaccttcaatatcagctaacgttctaggctcgagagaccttcttagatgtccaatctaatggcttgcacaccatgggtagattgagtttaatcggaaggagacttatgtcaaaattgcacatagcgtaacattttaatgcacccttccccttatatacttgtaatacatcttctgtgtagccgtttacagttttcacaataatcaattttcgttcaaccaagaactcaaccaagcagaccccgatagcataatctttcctactcactttgcttttatttaacttcgctgctatcttcattccagcttgaactcttactgtattatcaagttgttcgatcaaagtagataacctaacgacgggtaaatcctttaaacagttgaacacagaccctaatgaattattattgcctcaagtgtatatagacctaacacattcagataagttaaacactcttcggacagaccacacttcttctgctttagatactcctttgctgaaatggaattatccccaattaacatttttatcaatttaattgaacttttaaacacactattttcatcaaaattcattgttagatcttcgatttgtgtctgtaaagagcgcaactcataatctttattgatatttaattcctgaaatttagatttataatccgcccttcacaacttcattatgatatttattaatattactgttattacacatattgatagaaggttgatccagcattttgtagaaattcttccaaaacaatctaagtttactcttctcattgacaccagaatcattagcaaaagctctccttcctaccttagaatcaaaagatatatttcctacaatagtaataaaagcacgtgtttgtaggagcacgtacagtcgcatattagttacccggcgagggcatatagtaatgataatattcatgataatcttttcttttttcgtaatggtacagtgaaccgggtatagtgatgcttactatggtcctcttatgacgaccaagggtgaggtatgaaaagaacgtgtattattcagtgtggttggttagaacctcccgttgccttaccctaatctctctaacaactgataatcaggataaaaatcaactactatcattgtagagaggaccggcttttgggatgttattttccggggagtattaccttactgaaaaggtttttctagatgtatttttgcactaagttagttatgaatatatttaatcaataggaaaaattttcattgtcacaacccggctaacctttttttctttcagaacctaaatttacgacaggcgctaaccgctttctaccagctaaagcagctcggctcgaacccttctcatgggatcggcttacctcactttcaagcatccactggatcagagatctttcttcctttagcggctgagaaagaacaggaagaccaatccctgaacgtagtgcaaccttcggtccttctgaagccgagaaggaactacttctttcaatccctgctgcccggcactgctcctcaaaaccacgctagctgttcagcttctagaactaagctaaatagaagggaaaacccggtgcggcaaactgactgggattgaatagctatcctttctaactacagggcaaggaactttttccaccaagccatatgtgggaagactaaactggactgaaattgcgggaacactgcatgagacagtgtgattgcgcgatcacctctcggtgcctctacgagctgcgaggcagatttaacgctacgcccttcccttagcgcctcactctaggcggggctcacaaccaaaggatgcacggagtgaagttgcctgtctagccactcctttctttagtatccgaggtgggctctttcaagagctccttcggcagcgccgtacgtgacattcattcttatttttatttctttgtattagttatctggagcagcgagctagtctgccgaaagccagtgcttgtccggctggattccatctgcttccttcccccggtactgcccttgttgacagctttttgccttctttaagcgcgacaagccgcagaggaagcgccataagcctcaagcgacctagcctaatcctaagtaaggatgttgattctcgctccgagttttctttttgattcgtagtgataaaatcatttccgattggctttctttgtttggtttccctgaactgaatctaatctttctgccctaccaactatttttccataagaaaaattgggttttttctggtgaaaacttagatgttgaagcatgggcggtggtcggatgaacagaatgtacaaggaaggagaactgtccaagcttgttcataagcttgaatgaactagcgagataggctcaaaaataggataaaaaatatcattcatcacaacaaataagagaaagcttttactcatctccccgagtggggcttctcctctctttcataaattgtatagaataacctgtgggaagaaagtcccggaaaccaggacgtacgattggctttccctttctaactgcttccgtgcttagtcccgcgagatcgtgatctagttctttcgtatagctcagaaagcaaaatagtgatttcgatcgtaagtaagctgaagggagtccgcaagactggtgaatccactagggaaaaccgaattctggcagttcgcgagccagtactttagtttagttatgagtgccctcgaaggaaatgttccaatcgaattctaagctttcttctcagccccagggaggtataggctcagggagttttgagtccgtgtccgtttcagaaacctcctctctcttctcatgcgggattaagcacggaagcagttagcaaacactgaagaagaagcagggctagctcccttcagggcagtgaaactgtagtaaacctgatatggtttaatagatatttagtagttcaagctcaatagatagtaaggttctgaaagaagaaatgcgatgtaaagtaaaggtaagatctgtcttttagcagtcgatcttgaatgcctttgtctcacttgagaaagagaggcgggaagttgctcaacttgtttttccgtagtgagcgcgtatcagtctctaaagtaatcggttgaacgcggtctaggtagaagtgttcctgtttctgcgcttgtgccggaagtctttaagacttttttgatgctagggaagggagtagctattgaatataatcaagttcagcagtccaggcgggaggagtaaatccgtaattcctgtagttccagaggcaggaagcgcatcaacgagtttccgtatctcggcagtagggaccgaacttcaagcaatagggatcagtgttcaaggctaggattgtaaatatgaacaggcgtacctatcaagctgttctcactccaagcaggactcttctatggaaggcgctggagaagattcgtctatctaaggacgagccggctagcaactcgaaatccttttctacagaacggagaaaggctggcgggtaagttgctggtggggatggaaagatagattcatagttcggttggccttggccagagatggagacactggtgggtaggtagagaatacctagagacaactctctctaagcccccggggaagctcgatgcgggtctttgcctagccttctcctctgctctgacttcggttgatgtgccttcgccagtttcaatgacgacaaactcgtttaggggaatgcattcttccaggcagaagcccattccttgtgctcaagtcaattaattaatcagattcaaagaaggagatgaaagagcgggaatttcttattgaccaaggcagagggatttcccagcagagagggcagtgacatataaagaatattccgggttaacacaccgcctttagttcatggactgacgcttatgaggagaaaaggctctggcaagagtttcaaaagaaagaccgggccatggactggacgagggaaggggggatatgacttggaagctgccttttcttgtcagcccaatgaagatggcatgaatagttggagttggtgcttctccgttcgaaagtaagaagaacttccatctgaccgctttcacgcttcctgaatccagccggtgaatctaatatgaatagttcgccagggggaatttgatcttcaggtaaggtgcgtattgtatcagataaaaggctgcgaataggcctcctctccacctaggcgaaagatagggctagaggcgggaaagataggactttccgaacaagcctaaagcttgaatgagacaccgggcatctatcttcttttctttcacatttcccaaaactcattcgacgtgacggagaaagatgggggtagggacttttgatgtaaggtaagatgcgtctaactcgggtaaacagatgagccggttatagcgacagggtttgatggctgagaagagagagaaaccatttctagtgaacccaagggttgaggccagcgcttttctccttggtgagtgttttgagttcccctagttcagctactcgagggcaaatcaatgttcataaggcacggagagacgttaggcgagaaagagtttcaagtaaggtttgaaatctgatctgtgggatggttctagttcataagtgaaggaagaaagctaggcttcgtctctgtctaaggcaggtgaatccgttacttcaaatagaatagaggtagctcacttctgtgttcaagtgaaagaaataaagtaataaaaacctccatccgatccctatcttttatgccgatctcagcaagcagtaccagaaaaaaaggagtgaaggttagcagacttggttgcctgccacggggcccctttgaaaccaactaagtcaagctcaattacacaaagctaaaggtcaaaagaataaggattaagttagtgttcagtgagtgaaagatagttgcctgacgagaggaaaggacacccggtacagtctttctttggccccagcccccggttacaccaaagcacaccacacctgagaaaactgtactatagcttccgatttggtgaaatcaaaaatctcgtatagagaacaaacacctgagaaggcgaaataaatagaaaaagctgactgagtgttgtgttcattaatgcccaaagactcccatgtttttcttggttggaccaacccaaccggcgatttccgacaagtctttcttcatttttagagcaagaacaagtctctcttcttttttgggggggagcagtcaaaaagttaaatagtataatgaaaagaatctttttcttggaagatttgacccaaaacggagtcaatagtgcagcctatacagatgctctgaatctagcggtggtccccagcccacttgagcaattttccattctcccattgattcctatgaatataggaaacttgtatttctcattcacaaattcagctttgtttatgctgctaactctcagtttggtcctacttctggtttattttgttactaaaaacggaggaggaaacttagtaccaaatgcttggcaatccttggtagagcttatttatgatttcgtgctgaacctggtaaacgaacaaataggtggtctttccggaaatgtgaaacaaaagtttttcccttgcatcttggtcacttttacttttttgttattttgtaatcttcagggtatgataccttatagcttcacagttacaagtcattttctcattactttgggtctctcattttctatttttattggcattactatagtgggatttcaaagacatgggcttcattttttaagctttttattacccgcaggagtcccactgccgttagcaccttttttagtactccttgagctaatttcttattgttttcgcgcattaagcttaggaatacgtttatttgctaatatgatggccggtcatagtttagtaaagattttaagtgggttcgcttggactatgctatgtatgaatgatatatttttttttataggggatcttggtcctttatttatagttcttgcattaaccggtctggaattaggtgtagctatattacaagcttatgtttttacgatcttaatctgtatttacttgaatgatgctataaatctccattaaagtggttatttatttatttataattgaacaaaagcgaggagcttttaagcgtaccgaggcccggataagcagtttctgcttctacacgtacgcgctctctggcctcaaaaccacacccgaaggctcttcaagaccttacttagtttagagtcccaaaaggtgttataagctggaagctagtcgtttatgagtaggagttcccatcggtccagaactagaagtaaactcaaaacctggatttggctaaaaggacctattattcttattctaaagaaccattggagctccttttcccgacaacagatctccgatcttactttctcaagtcatacgtcttttgttcagccaacagtgttccgctctacttattattacttactagcgcccttcacttcaacccatactactttttttttacttccagcttattcccaaatcaaagcaacttgcaactaagagaagagcaaggtgcgtagctggcttgttaaagcatggaaaggtatccagaaagcacagtaaccgctatgatataggcgccctctcacctaatacccgctactaaggattgaaagtagcacaatcggctatagaactccagatctacgaatagccgcgggcaagcacctttaacaagcaagtagctagcttccaccttacttaacagcaaggcgcgaattcgcctatagtttctacttctacttagcagcccaaataaagtccccctgcttcctttaagaggctagtacacaagctactaaagctagtaagtagccttttttgtttctatagctttagcccctctggtaaagaagaggaacgaaggggtttacgggtactatatttcggcttatagagcttattttttagccctatgctaaagcaaacaaagccctatccctatcccgcctatgcctatgtctcaagtaaataaataagctaatagcaaccgcgcgttgtagcagcttttgatttcaaggtagctgtagcttcaaagccaaagaggaagtttcttctgatttgaaggtttccgctgtagcagcaaagaagaaggccatttctgctgctaaaataagagttggaggtttcaataccaaaggagtgaacttcactataaaggctatagaagtgcatcactagtttctataaaatgaaagaaatgaaaaaggtttttcatagtataaagaacgcccggttactcccatctcctcttacttacgcatttccaatcaaatcatgatcccatctcgatcaatttcgcattgatcaaggcgggcgctctagtccccagacgactttcttcaaccgcccctgttccaacagctacagataagaaaagtgttggttcttcctcttcctcagccaattcccgaccgccttgacaccttaatatcaaggaaccccaccccagtatcatgaacgcagagcgccgactgtaacaaccgtgatgctgtcgcgtaacaaaaagacagaaatctatgaagcagcttaaatctctttttttttatcaagggtgaggtttggaacccagtcactttacacctagtgggctatgatcaattgaagaagaaaagaaatggatcgaataggaactctcattgacctacttaactcagtggttagagtcttccatacggcatcggttcgcgatccaatagtagggaagcccgcccgcgagcggaggttcttgctccaagacgcctttggaacaacgggcgggcatttccttccatttctatagagcaagggggaagctcgcagagctttctctcctagttagaagagagacggggggtttatcccaaacatctccttactacacgcacaaacaaaaaacaaaacaaaaagaaccgcacccgattctcaaatgaaggttccgtgatgtcgaattttgattgaaacctagttttgacttttcgcagacgttggcgcatcactttgacataagttacatatgcgcgcgaaggtgtcggccaatttcaggctctttttaaatcatttcttcagtgaggggttcaaaaactttttttctgatgattgtgtgtgatcctgcagcgactatcagagggacattacatggacagttataggcgaccctcgatttatttccgaatgaaagggacggattgagcgataaaagaagaacatatgaagaataatctggcttctacgaatgaacctatgctagaggtttgatcaattacaggctcatgggaacaagttaccttctttgacgaagagaggtattttacttgaccaggttttagtaaaaaaaaaagaggttccctcacccgttacgtgatagcacacagagaagacggccgtggtggcacccgcccgcgttgatcttcgtctgaccacggatctctgacgggtattctccggactgagcttaggctttgttggcttctttacaaaaaaaagaaattcctaaataaggtgcctctgcgcagggtcatccatcgaatcataagagaagtagtccaactccgatgagttagtacccgcatctcacgcttaaggctaaagaggaatgagtgcgggtcaaaggtaggacaccgttcatggtttttttccataagataacctgcttctgcattatccttttacagactaagataggagactgagagtttcatttttgtccccaaatctgacgaatagcacggatcaacatctgtatccggcggggggcgactcttcttacgagacggcagatggagaaagagctttcaagttgagaaagaaggctcgagagacctgcacttcttttaaaagttggatgatacagttcctctttttccaaaaatggcgcaaaaaagaaaagacagagcatccgctctggaaacaggatccgccgaggctaagacgaagtagccaaggccagtgagtgatatcgatcgagttcggtaagtcaagaagggctcttggctttctggaagatagttgtttccaaggaccaaaagtcaaactatctcccgctctagcaagagagactcctttcctttttcatcgttagtcagccttgtactttacttttattcagtttgcctttctaatagaagaagagtctataattagatagaagtatatataattagccagattgtctgaagcatgaacagaatcacctttgttccgaaggcctagcgagttcattttttttttcaaaggcggtcagttcagaatacgtggtttccatctgcccacaggagttgggcggagacaaaatggtggggattgctatcttgccctttcactttctattctttgacgaataggtaggcgtacgaacgggacagtccgatcaatatcttcttagcctagttcggtttagtgccccctgtcggtttgaatttgatgtataaaatgattgaagccccggccgaaagactgctcaaatacctgtttcattggcatcaagggcctcagcctaagcctcgtaaccaagagcactcgcttcatcagcggaggttccggcctactaataaaggaaaaagcatggagtttcgcacaaggttcagacctcccagcccccagcttttcgaagagggcttttggtagagtaaagaacgggtaaatctctgaaccggacgatccacttgtccttctttgttgtctatcgacagaagaaattgtttatcgtgccagctatagtaacttctttcttctttcgttctcacttggatatcgatctagtagagtaagcaggagttttctagggttcatgtgatcgttgccacgggggcccccgctcgaaacactacaaggacgtctccttctggcgagaaagaatgtccttccaaaaagctgagtgcttgcaaacgcctcaggtgcatcacaacatgcaggcatgccactctcgaatgcgccgttatgtccctactagttcactgacggactatacttctcgagtgatttcaggcaagggtcacggtcaaagagtggtatactgacttgcttgttcggcgcgagtgcctaaaaaagacgttcttcccctctgaaaagagtgtctctggtacggtttttcaaagcggagattgctaagttggaaattgcgatcttgccccaaagcatcgcacacagcactctgattcattgcctaccatttagtaggggttgcccgaaaggagaccggaaggcgtacatcagagctagcttttagagccccgtggactttctcttatccgaaagcctctctttgttgaattgatctctcgactgttcctcgtgacgaaagatcctggcctacccctccgtcagtagccgttgtttcatcggcacccgggacttctgaatcggtccctgaaccaagagcccacacttcttttgttcatcgcactcgccttgctcattgcaaggggagatcctttcctgtctccatcggcttgtcccgtcggtaggaaacagattattcatgaatatcggttcagcaatgcctcgatggtgaatcaattccactctttctcgcaagctttccggtcttgaattcagggtagttagctgccggttccaagtgagcttcacgtaagcgtaggtgctatacgggcccactgtggcaaggtgatcaattattcccacctggaggcgcgcaccgcccccctaagactaggtagccagactttctccccagcctggatcggggatagattgctgattttgcgttgcctccaccgaggtgtcatggggtttaggaattcttacattatatctttccgaaaagtaactttacagccccttcacgtaatttgaaagtggctatagacttcttagcatgagtaacataaggtttctgacctatagtagcagtcatatcattaatagcaatggctccgatcctgatcgataaagaaggaaatccaccaataagccaataagttagggacattcctgcatgctctgggagcgtgtcagcgtgctgatcgacgtgaatcaaagttagaagctgccatccggaggtactaaatcaatcagcgagctcagtctgcagaagaggcaaagacatggggtcaagccgaatcaaggttgtctactcctcttcggacatagcgatttggtccaggagacctctccaagaactaaccataagagtttgccagtgagattcgagtcgacctatcttctgacttccttgttcgtcaatctaccgccccgtgacttttttgaaagcaagctccattcaaagcggtcgttagaccttgcgacacagccaggtttccatttattggattttttccacaggcttgcagacctcaccttggccagaggagttcctcacagccagtttccatcaagctcaatcaaaaacgaaccggccccgatcagtcccatggggctcaccccaaaaaggggttttctcaatgggccaccattttcatgacatgtatgccgcgctgatgaatgccttgggtcctttctatcggcattttcggactgaccgttctcaggcatatttggaagacaaagatagggcgatgcaaggccgggtcgatcccttgaatcctagtttgagattacccagtactcaccagaagtctgctgtggtacctctttcaagatagagcttgctactaagctagcccggacgaccaagttgatcaatatcaatggattcgcgcctctccgataagatcatcttcacgagctaaatccccaacttggaacgcactttttcaatccgggcgcagggcagctcgcacagacaggtacgttgatatcgattcatccctggatgtctctgaccttcatcgatgataaagtcagggatatccataaaaaaggctaggggcattcccggcatgctggtagccatacgagggcggtaaacaaacgctctcatcaaggacctccttctcaggatgttgaacaggcttgcagacctcctctcgtagtgtgtaatgactttgtctcatacgtcttctttgagaaagactcctcgacccggttgatccctccgaatccttccttcctggaacgtcttctggtaagaaccaaccaatgggggcagcgggcatttcgagagcatggaagtgcgttgtgagcacgggtgtgtttgcgcaggcaagtaagttcaaagaccgtttgcggcacgtttgacatgggtttcccgtctctcgtcataggaaaaagaaagactcattagcgccattcgaaatgaataaccttcgcttactctccaccggtggatcgctcaactgatgaacagcacgcatacttcacaccgatcgaatcttgattcccggttgatgagcaagaaagggaggaaattggaacaaaaaagagatcgcgataaagaaaaaaagaaagaaattctgaaacttcgggctcacttgaagccggagaggctgcggcattttccggcttctatgtgagcgccaactcgatctcggtatccattatctgatgaaaagaagactcagctgcccgaactgcctgaactgatgtacgagatcgttatccagtcaacgagaagaaagagatccattctgcctcgcctgtctctggttgctgccgcacgcactcggtagcttctaccctaccttcccttcttctggaaaccaattgtcattgggttgcttctcaacgcataaaatctaactattgggaacaatgggagagttctattctaacataaactcctcttgccaactaacttgatggaagtcccacacttatgtgatgacccactaggaatgaaaaactcccaccgccccgatccaaagcatgacgtgcatctaactgaagcagcttactcatcgctcaaagcaacaagccggtcaagagagtgggagggcttcttcccatacgtttcaaggtaggaaatcagttcgctattctcctgtatagggctagcttagtgatgacagcttcaatcgggagtcaactatctaatcaaatcaagtgagagggtggcattttgtacattcgggacagaaaacggatcgcactaaagagatccgtgggcaagaactcttcagcaacctatgaaggaagcatcagcagctccctgagagactctttccacgggtgaaagagcaatggataggtcaaaggcagatgtataaagagctttgtatctctgggttggtgctcctaagcgcaggaaggggaatcaatggctggctttggttgatgtacaactgacttctcaactacgttgatccttgcttgactcttctttcatttcgatacaacaaatagaaaaggccggggatcagcactcctcttcacactttctcacagacactctgttcttaaaaccaaaaggtgagtaatgggcctgttcaggtcaaatcatccatgaaccctaagtgacgaccctgacatcgcaggtttgatagccacatcttcagtcaaataaatgtgaattgttctggttctagctcggctgcttcccttcttccacggaagcttcccactggacgattgagtcacctacccaccctcacccagaagctgtatcagctgcttcttttggttctttctatcaagggagaccccggcatctgtaatggacactgggcagtctgattctacggcaattgctcttaagacaactcgcctcttctattctagtttttttataagaccttgtggattgtgagaaatccgtttctgtggaagccgcatgggctatctttctggttttccgccctttcacctttccaactccttaaaggctttgattcttaacctaatttcttcgattcgtctcccgcaggagagaagaggaacaagcactcgtgaagtgatccttttcaagaacatgcgtggaaacagccctatttcgagattttccatttccgcgcggttagacgcagggaaggctgactttccgcgtaggctggatgcgccaacatctcgactttggaaactcaatcctttttattaagtggttcacatggatttgacaatatggaggaggagggtctttgcttcactttgtctcaatctcctacctatcgccggacatcctgtcatctttccagcatcgaacatccatatttccagtcaattcttttggtagaacaagtgtttccaaccatttcaaaaggaaattccatgtgaataggccaagtcatctcataagagaaatcgagtcctcatgaatgtgatagttcaagttattctactgggaaatagtacccaaacccctctacttcttgaattgaccttattcctaccaatctatactcacctaggaagaatgaaagcaccaggttctatgttgcgtgttattgaataatggcaaataggccccctagggctagaaagaatctctatttgctggttgctggttcacctctctggatgataccaggttccattgaacaagaaaagaaagcagacggaaaatggttggcattccagtaggttggtccaaattcaagctccttggtatacgcatcatgggtaaccccccaaagcaaaggggagggacaaagaaaatccaaatgggaaagaatgggctgatgtgcttcatgtttcactgcgaagcttttgttcgtaaatccgaagataggaattggtgcgttcagttcaaaaagattagatattcgaatgctatagttattgggaaagaagtagtattcaccgcttataaggaagttggccgtaggctcttcaagacctatatctctcttgtttcgagaagagatgatcacaactcggcacgattggtattcaagtaagtagagctttgctgcgtactttcttttctggcataatggcttaaagctcagactttcactattgttgttggtggatctgtgtatcactcattcccaggttggtcttttctttcattaacgggctaagcctctttctggcgttttgatcggatgaggtaattccatcgtgcatggagtggatcggtccagtatcattagggtagacttgcacttatttatgtaggtttcgcctgatttgattcactgcgctctttctttttgtgtgctacccgttttctgtctcagggatgggattgggcgctttgtctcataggagtccgttcgatcctttgtctcagtaatggggaatggatggaatcggcttattctgactatggatctttactaattggatttgaattcctgtgcgcatcgcgatgatcgttctcttctcggcatagacaaacaaaacaagttctcatcttaagagtcagtacattcctcatctcgaatgggctagaccgggattatagggacctctattgaaggacagatcgggagggcacgtgtgcttatactagctaaggggaggttacagcagaacttctttcatatagtagatagtagtaggtagtctagcccataacgacccaatctatagctcaacagttaggttttttagccgttacttaggacctagggtcttgcaccactgatctcatgcgggtatataggatacgttcaaacagatgattccggtattacacctggggctgcaacacgaaaagcaagtttaggcgaaccaagcagcaagattccgtcaactctattagagcaaaaagatgaaatctttccaactgccccaatggaaagctttgaaatcgcagtgaattcacttcgaggaacccgaaggcctttcttcaacattttctcctcaacctgggaatttttctttctctgcgcttctttatctatcagtacggcatagtgtaccatctcaatgttgccaggaacgaaaagagcatcatggtaagctgtcttcaacgtgtctttttttttttttcaaaggcggtccccccggaccgatgactcgcttgttcagtactgctaaaacaattataggaggatgccgtcccctcgagactaccagtagtttcggttgttgaatctcgtgcaagttaggttgtggttgtattggctgcaagcggaacgtaggcgctttaggtgtgtgttgaccatgcactctcgcgtcatgtaatgtcgtatgtatgatagaggtggtgtggtgattgacctcaatgctaatggttatccccaagcttcaacgaatgaatgaagctatgatcgtacccggatagagatgatggtcttcctctgatgtctccaagccggccataatagaatagataggcgaagcagtctgttctcgcctatcgatagatagtaggttgcttccaagctcaaaccatttgaaactgaattgctacttaattcttgttattgatagagtggtattctccgcccctgtcaaataaagtagagggagagaactggaagagagaaggaaaaagagcaaaggatttacaagtctaatgggagaagaatggccgacacgttgactgccttcgagactctaataaaatataacccaagcggtctaacccccggggtggaccccaaccgaaagacgctagacggactaagggcaagcgagataaagaaagcagctggcccttagtgtaaaaccttgccgcgggatagtctttctccaatgagaataaattcagtttttgggcaagacaagaaaggaactcgccttttgacaccaagggataataacttttttctggcgatgacttggtgaagggaatctatgagagaaggttctcgaaccgggttccgaccgaatagagcgcggagccaacgagtttagtcgaacagcgtaacgagtctaagggcgggatcaagcttgaaaggaatggacgggcgtaggcttaatagtgaacgcggaccccccgcttatagatatgagatcaatgacttaaaagacagatgccgagagaaactgtttctttattgcgttgcgaaaagagatcgaagacgcagattttctgacgcagtgcgggcactggatggaaaagacagataagagaacaacccaccggaagggcatacctcaagagcgccaatctcccccggcaaacatctatctgcacgaagccgacctatggatagaaagaataaatgcaggaaaggaaaatgaaatatgaaataaaaaagatgctttgggagtgtgagatacgcggacggggagtacgcagccgaacaaccgcaggggcttccagcagtgatagcggaactaaccagatgggccgcccaaaacctggagctgacatttaaatcggaaatcaacgtcggatcccggctatccgaaaaacgcagactgaagctatggatcacaaaaataaatgcaacacaacaaggggcgaaccaagcgcttgcgcgaaggaagaagcgaatcaatcagaatggagacagggaggttttccacatcatatttgtgctccaagagctctaaaatttcctgcaagcagcaagcaacaacggctgaaagtggcgcgctagcttttaggtaggggtgcccctttctaaaacaactatttaatataaggtaagctttttatttttggaaccctagttttggagttttccccaacctataccttactaataaaaaggggcttacgtttttcagctgcatcgcactgccgcataaacaatggatccgctgggctggatgagcaaccttctctggaaaggaatagtgaaaagccatgtcacttggaactggttgcttatttacttttttttagtaagaccacttgactttggaaagcaaaattttcttatatgggcatggttgcttacaagacaaaagcgagcttctagatgttctttgcctgaacatatagaggaagcaaccttctatctggcctctgtaccagtagtggagtggcttgctactttcaatcagaaaaggtaaattgagcaaggcaagggagaaagaagttgtcccctcttctctggtaaccctagccggtcatatagagtgctccgcccgccaccgcatatgtagaaaaagagggagcggggaaggaagaacaaccgtttgactttggcacatgaggtggcgggtttggctaggtaacataatggaaatgtattggactgcaaatcctggaatgacggttcgaccccgtccttggcctcggggagtggcgagcagcacggaactttaattaatcaaatggggctttcctttgttataaatccacagacaacattctggaacttccaaaccaaagaaatgcaacatgagaaagaaggcgctttttacgcttcaatagaatgaattcggtaagggtagaatacgccctatggtcgatcgaaggtcctgtgccacttgaactcaaatctatcttaccttcaatccatctttgtccagccagcttataaaaaaatgttagaccgggctgacacaaccgaattggttgaggaaaaggaaaccccagcgaccacgcactcccgcccccaaaagcggagaccgaacaaccgccaggttgtcgaggacacgtctgaagaggaggcgggcgccctctaagtttaccaccctacccactaatggactatgggggggcaggcgaacgggaaccgaccgagaacccgaaccgcttgactgactgaccccttcatactcgattcattagggtcggggatggatggaaccaatcagaagtgcaagcgaagccgggaaacggaccgcagcgcaacgactaggactcgtgtcggaggagttttgagcgtgagctaccactcatgcagcggcaaggacccgcaactctcgagggagccaccaaccgcccgaatcactcctttactcaatggtttcactcctctttcaatcaacaaaatgagaaatggggaagaaagaaaagaaagagaaaaagaggtctttattgaagaggctttgcacctgaaataagactaatgaagatccagaagaatgggtctgggctttcgaaaagatgaagatgcaaacaacctgacataaggattctagctcgcccacttagagcagatggagattctcggacggggaaaaacggcactcgacatctattaaacaacaccaagaacaaagccataccatgccctcgggataaactagtgatgattgccatgaatgctgcgaggatctgaaagagaaggtctttgccgattcctatcaacatggtgcacctctcagtagagggtggagactttgaccgaatgaatagggatcaattgatagacattttgattgaggccaggatgaatgcttttttcgttcgctatgtgcttgctgactggatgcgtactcgcgtgatcgatcgatagacgggggaattgcgtgaatgacgagaccggcctaacctaaagtaaaggctcttgatggcgaatcttgattgactgaaactaggaaccgattcggagaaacaagaagcatggcatgagattcgcggcggataaatttccgatagcgaattacttgattcgatggatggtaataaaaaaccaactcaagcacgaaatcaatgttgagtcaacaatcatcgagagtggatggttgaccgccgcccccttgtcctggaggttctccggccggggaggggcttgctatcgtaaccttttctcccggtgtatgtgaaaaagagtgacgaacccatttttgttcggtcataggttggtccaaagaacgagagtcggcttccttaagtccgttgttcctcagtagctcagtggtagagcggtcggctgttaactgattggtcgtaggttcaaatcctacttggggagaatttatagttatcgcttttctgacctagcgacccctgtccttctccttagtttctaaactagcagaatcgtgggacatcaaaagtgggaagttgattgttggtttttattcctcactctcgtataggtgaacttggttcgttcaattcttagggagaagaaggatccactgggaatgaatgggaaggactggagtagtatcttcattagccggaaggaatttgtctccactagcgtcattcgaagaacgaacaaaaaaagggttactgtttaggtaggatagatggatgtagtccaatggctaaagctctgccagcttcttgtagactgaactctcttttctttaggctccgagttgtttttgggtaggatggtagaatttatcttcgccactagtggcaacgaagttcttggtaattaacaagcaagaaaacgtatgcgctaacaagcaacggctttcgcgctagggcgctcatccggaaggaagatctccactcatttcattcattcagtgcctgcggtgaggcgcgacccacaagaaataaagggggaaagcttgctgtagccctgccctattttagtaggctcgagaagggtaggctcgctgcttcgccagaagcgactagtcgcctcctttcctccgccgaaagatgcttagccagaagcgacgaagggggaagctgtcgtagaagctttgccccttgctttacagagattgttaggaactgactaaattactagattctcccggaacgctagctaagctaataaaaagtcttagttcccttcaatcaaatcaataagcttattgattcaggctcttcaagacctccttcttagaacccattgagggggcctcggcccgggaaggggagagtggccgagtggtcaaaagcggcagactgtaaatctgttgaagtttttctacgtaggttcgaatcctgcctctcccacttgtttgttgtagacttcagagaagagaaaggaggcattcgtcagcgtaggaaggcccaccgagcgaagctcttttttttggccgtgccgtgaagtgaaattgtatcgtatgttagttagagaggttggcgaacaactacgatctatagattccccatctatattcaatcccagcgagaatagaagcgactcgcttccggcttggcttgtagtcgtagtcttttagcttatgtagtggtcggccttcctacacgcacgcgcccgccagaatgcctccttggttctggacgaagccaagccgatacatacgataggcaaaggaaagacccccccatttcatagcgcctggggaacgcaagtttgatcgaggattggagaggtggaagaaaaggctcgggatggatttaggagtctttgtgcgagccgtatgcggtgagagtcgcacgtacggtaacgaggggggttcgcgtctatacgtgtagtgtggtggttgggcctacccaccctatttgttccatgatttatgggtctactggagctacccacttcgatcaattagccaagattttgaccggatacgaaatcactggtgctcgatctagtggtatttttatggggattctatctatcgctgtaggattcctattcaagatcactgcagttccttttcgggcggctgtaggacggacggccgcctataggtggtagggtagggtgggtggtaccgctcagattgcggccaatcttcctaaccgcgcgcgggccgggcttagagcgcgtgaaactcatcactacctcgtaagggcgttgagaccatagcatgttacacgaaagcgccgctttctctgtagtgttgtcacacagctgcccgcctagaagagccactcgctctgtagtgttgtcacacaagataagcacgccgcccgcctgctggccgggcgaatcgaagttctcttccggtcaactgtccacccagtcaagtgcaaaaaacacagtagaatcacgcaacgcacgctgctggtgtgcttcctgcccgcgaggaaagaaagaagagcgacaaggtttagttcagatttgactgtttgcagcatgggagcggattacccaataaatccctgggaacaatgaaaaaaaaagatatctcggtaacgaaaactatagggggctgtattggcgagatccaacggtgaacagctgcccaaaagaaaaaccgcctggaagtccgaggacctttagtaccgtaccctacccccgaaccagcagccttcgcgccaagcaagaccgcccttgtccctttcctttctccattccgcccccttctttctttgttccaatagagtctaaggcaaagcaaaagtggttcgtatgcctacttgacgaaaggaaacgaacttcgtttccgggtttatggattggattcagtcagcgtcacgacataatcaaaaggaaggagtgacgctttggttaccggcgaacgcttccaaaggcgaccctctcgagtttccgactgtttcctagattgaagtagcctttcgtcgccctaccaaacgaaagaagccaaacagctcgccctactgaagtaccaaaggtgcgctacgcccgtttcgaatgcttctccgatccggaagttctcgcgaagataataagatgctgctccccctccctctgtcttttctcgctttgctaattttcccctctaacgcgggccgggcggcggcgggcgcgggaggaagaaacctaagagaagacgctcttctcttaggtcctttttttttttttcagtgcaacacaggaaagcgccctctttttgtcatccctgcaccagattttgtattgaacgcatggcgtagctaggaccttcaaatcatgtttgagcctatgttcaaaccaaccctccccccctctttgaataaggctggaaagagtgcccgccaagttcagataagggaatgctttccccaaccattaaaggaaaggctcgacgaagggagggagatgcagcgggggaaggaaaacgctttcggagatcgagattttatttgtttttcatcgaaaacgaagaaggccgaggagggcccacggtgcgtattatctgaagggaacacgcacgctttttcgaccgcggtagtatgattgccgggccctctcctcgttccgcccgctgacctattgggatagcagccttcgggctttgcctgccctttataataaaaaattccggctcggcccgggaaagcgctggcaacaacagaaaggaaggggtccatgtagctgctgcgcccgcccccttcttagtcaatggggcagcaggttcggcatccactagaaaagagagaatccacttcagataaccacgcctccgctaggcagcgtgtgaaatggccgagagcggacctttttggatatataatccaagtcgagagtggagttacgggaacagccgtctgatggaaaactactttcacgttcggttcagagagcacttttttcgttgagaattcctcgttccctttcgtgtgaattccccagcgacgaattaaaaacttgcggggccctatctattccatctctcgagccccgaagaaaaccccctccccttcggactccatatctcttttgactctatatatgtgggcacctgatatctatgagggttcacccaccccggttacagcattcctttctattgcgcctaaaatatctatttctgctaatatttcacgtgtttctatttatggttcctatggagctacattgcaacaaatcttctttttctgcagcattgcttctatgatcttaggagcactggccgccatggcccaaacgaaagtcaaaagacctctagctcatagttcaattggacatgtaggttatattcgtactggtttctcatgtggaaccatagaaggaattcaagcactactaattggtatctttatttatgcatcaatgacgatagatgcattcgccatagtttcagcattacggcaaacccgtgtcaaatatatagcggatttgggcgctctagccaaaacgaatcctatttcggctattaccttctccattactatgttctcatacgcaggaatacccccgttagccggcttttgtagcaaattctatttgttcttcgccgctttgggttgtggggcttactttctagccccagtgggagtagtgactagcgttataggtcgttgggcggccggaaggttgccacgagtaagtaagtttgggggaccgaagttctccgtgcaccggacacgtagcttatcgaatccagttgcgacacggatgggaatgcatgctacgcaagatagagtcgagtctgatacatcaaccgtctactcaatatccttgtatgagtccacaatcactacacgagatgaaccttggtttggtgaattgaagttggccttaggtgtaataggactcccagttactgcgcgcgatcgtatactgaggtgctccccgccggttgttggaacgacgcgagccgggccgggcctcgattcagaaagatgaagggccataaagtcaaaatagggggttccaaattccccatctcattggggggcggaaaacgaattgacatctcgatgtgatacagccttttctattttagttgggaaagaacggcgaagtccatccgaaccgtccaatgaagaataagaggagagcaaagcgccaatggcacgcgaagcgcatgcggaacgggcacggagaaaaaaaaagtgtggaggagaagcagccgagctcattcccttcgcttcctaggcccaaagcagtgcagtctttcctggccaaatcaaggatttggggccgcaaaaaaaaatccttttttttagtaatatatatgaatagaaagatagatccatccatctatcctatccgatttctatttttttattaaaaaagaaagaatcgatttcattcaacgtttgattcaaagaactgcgcttagcccccccgctcatgaaacggctctgctgcaatggatggcagagggtccgtagtacccaaagcactggagtgatccagtagccgggaaggggcctagaagtgcctactactacaccacactacacttggctctacacatttacagagctaacccctggcagagctaaggggcttcaatccttattccttatccccatcttcgcccaggctaacggggccttacttattcaggggggagagtggagcctcgagaagcactgttgagaggaagatccttgacccctcttcattctctacagggttccaaacctttcttcaacataggtgacaacgagcggggcagagatggaagagatcgaacacgggaataagaagcaagctcgccttcctttttgatcattttgatagagggggatggagaaagtggacaaaacagactcgcatttctcatcgaacaaataagggaaaagaatcctattgaaaacgttcctaacccaccaaccccttccttcgtagagccgtgtattgtaagtgatccgaacccgcccggagtgagtctcccatagaggcaagtgaagttggtgagccgtatgatgggcaactatctcctgcggttcggagaggactcagctgttagttagcacccccttggtttcggggtggaccctttcactctattttattatatacgcttagcgaaaagaatgttttttgatacacctaggacatggattctatatgaaccaatggatcgtgacaagtcgttactactagcaatgacttcctctttcattacttcatcctttccatatccctctcccttgttctcagttactcatcaaatggcactcagtttatatctttaagttcgatcattgacaaggttcaaagaaagggtgggccattgataaataatcgattccaaaccaccatgctagcggatggcgggccaaacaacttcatgagctctgactttgcttctgttggtgatagtgatggtgcggggtcggaggatggatactagtactgggagactgattccgatgcgagaaatgttcctaccagcgctgtctcctcatatacacggagtactcgaacatagtaatagagaggggtaacgactagggagttggaagacgaacatcttccgctttgcactgactccattcctaaagtccgtggtcttcgatcataaactatctctccctctcgataaagtaagatcctcgaacctaaaatccagggtagtcaaactccagctaaagcggaaaagaggataaaacgagcctgtcaatcctaagagtgtgcttcgaagcacaagctgagtttccaaattttgacttctaacataagatgcaaatcaaactcatcttccgacagtcaaataatctctttagcttggactggacagttgccaaaccgatttgcgcctccttcctttcaggggggcggttactgctcaaaagacagggcgtgaatcgtctacctcagcgtaccaagccaagggctagggctttatccgaacaaggactcccgcggggtagaagggagggcttccacagagtctgacggaggaaaaagagttgtagtaagctcggcagagcgaaggaaaagccttcagagagcgggggtaggccggaagaaagaagtcgggaagcgacattacgttgaaggatctcgaaggtggttgaagacacattccttattctctctttcttttaattactcgatcttattgccagccggaagagctgcgggatagatcgccaactctcttgcacctggattcaaggtccggatgctttgataacattaatcatagactaataatttcatttctacggatcaaggttcgagctcttcaaatcaatccaatcagttgtaagcgattagaaaagcttgcacgagggggcgcctcttatgtctggtaatcggctttgtttggcagtgggagagcgagacgtatcttgctaggcaaggaccggttcgaatgcgctaggacgggactcaacactcaatttttcatagaaggatatgaaataaagctagggtgtaattaattattctttcaagacgggggggtgctttggtggcaccgcaccggtatatacaaatattaagttttttccgttgaagtagttttttcctgtaccagatatttcatatcttcctgtagtgagtggactctcggggaagaaatgttcataatttcgccctggttgacaggctcaggaagcgagcaagaagttcaaagacagcgcaaagggcacataacttactcttccttagctgaagcgaaagcattggacagcaggtcttgcctgccccaatcaatacagacagagatctcattcgtcccacactacttcatctttcctttactaattccttttaggggtcagacgctaacgcgaccttagcctatacaaaatgagattctcctccccactagaacactcccttctgcttttggaatggattgaatcggttcactggatggaatcggaactttcacttctatgattgaaaagcatgacttttgcagcaagggttcatggagatattgagctttcctaaatataactatagagagccaatcttaaacctatctttctactttctttcctctaaaccgggtcgataaagcgtttatcctagctcatcctatcctataccaccagctgagctagatcttcctcttctaagaaattataggtaaagcgctctaaccgggggctacattttccttaaaacttactttgttgcagcctggttatttcaaccaaaatctgaggaattcggttcttgtgcacccgccggcggtgaggtagggagagttggtatggagatgaaagagacagaaaagctttccattatctggtttctatccattcaatgaagttgaatgcataccttatagactattcaactaacataaggagatgaaagatggaaacaaggtacatatccatcaatacattgaatgaatcccttattcactcttctgatacctttctttaggggacctgaagagaaagaaaaggtgactatcaactaaattaaagatctgcttcgttgcactaccttaactgaatcaagacaagcgctcatttcgttcttgcttgctttcattctgttatgagagagagcttctatacgtatattctctttagacaaatgactggtccgctggagcggctgccttcgttgat

SEQ ID NO: 14004 - DNA, 6084 bp, Cannabis sativa
tttttttgtttttttttttagccatattggcaggtgaagtagattcctgttatgtatcataattaattagaaataataacatcaataattatgttaataatgcttagatgaaaagaagtatatctaaaagaagaattaataaataacaaccgattggtgtgtagatataatattattgtcaaagtctgaattaacacatcgaaggaagtgatctgaaggatttgcttttgtaggacatgggaacccagcttcctcaaagaactgcatttaattaatccactgttaattttatactttttatttaaattgagataagatatttgtggcgaaactctcttaatatttataattattgcacttatgatcccaataaaaaaagtgacggtaaaagtactttattttatgattttgttgcagtcgtacctttttctttggtcattaagtatcaactcaaaaacacatgacgacatattattggatcacgtattaaataagctaaagaaatatatcgctacgtgtttctgaactgatacttaataggctcataattggcacttaacagtcaaaaaaatttactaccacttttttttttattagaatcatatgtgtaacaattattaatgataagagagttttcctgtaaatatcataaattatgaattaaacaaaaattataatttaattaaagttattaattatttcagcattatattattgatattatagtatattacaataatatagcatataataaattagtttatcttttataagtaagagcttttcataggcttttaattaattaggaataatattgtaaacaataatacttgagcttcgacttaattatattcattctccattaaaatagattatgtcaaaagaatagctatatgtgaagatttccttcaattattttaatagttttatatgaattattaaaattactaatctataggctaaaataaagaagcataattaaagtgggatgttacatatatctgtattgcctaactaatttcataacagttaagaggtagatagtagttagtggttagtttagatgtcaatggaataggcactgtcaagttgcaattagatgaaggtggagttatagagctgagacaagtcagacatgttcctgagattaagagaaatctcatcccaatagctatacttaatgaagaagggtaatctgtcaagacagaaagagaagggttatgaagattgtcaaaggctcaatgatagtgataaagggagtgaaggagaatggaatttatatactccaaggtcagaatgttgcaatcaaaacatctaggaatccaacttttatttgacacagaagactttctcacataaacaatggtggaatgcaagtgctcaagaagaaagaaatctttggaaaggatcaaatccaagagatggagttatgtgagcaatgttcttggaaaatcaataagagtcaagtttggtaaaggtgttcatgtgtcaaaggcaattctgcattacattcattcagacttatggggtccttgaggaattgaatccaaacatggagctaggtactttctataatttatagatgattttaccagatatgtttagacttatatcttgaagaataagaatgactcatttaaaatgtttctagaatggaaaactttaattgagaaccaaactagtaagaaagttaaaaagttgagaactgataacggactagaattttgtgtggatatgttcaatcaacattgcaagaaagttggtattgctagatgcaaaacagtacgaaaaacaccccaacagaatggtctagctgaaagaatgaataggaccatcatagaaagggttagatgcatgttgattcactttggattaccaatttttttttttggatagaggttgttataattgcttgctaactaatcaacagaagtccatcatcagctattggtggcatagcttacgctcatatcagataagataagttagagccaagggctagaaagtgtatctttctaagctaccctaaaggtatcaaggggtacaaaatctggagtatagaagtaggtaatcatcaaaagaattttattagtagatatgtggtatttgatgaggacaaggtatacgaagacactcaaaacttagcaaggaaatgatcatattgagaccaatgagagcacacagatggaggtggagtttggcaaggataacactcattcagaacaaattatgtgagccagattatgaaggtctggattatcaattagtcatggacatgaagataagagtagtttgagcacctactagatatggctatactgacatttttaattatgctcttctgtggcagaaatgattgaggatgaaccaagatcttataaggaagccatgaacatatgacaagcttaaatggggtggaacaatgggaagtgagatggttgctctcaaaagaaacaaaatctggataattgtaccaaagccaattggatagaaaattattagttgcaggtgggttttcaggtataaagaaggcatacttgaagttgaggaagctagatataaacctaggcttgtagctcaaggcttcacacaaagggaaggaatagattaccatgagattttctcactagtagtcaagcatacctctatcagaattctgctcagtttggtagcaagtgaagatttggagcttgaatagctagatgttaagacaaccttccttcatggagatctacgtgaaacaactagaagggtatgaagaaaaaggaaaggaagattagatttgttaactaaaaagatttctctatggcctaaagtagtcaccaaggcaatagtacagaaagtttgatgattttgtaaccaagataggtttcaaaaggagtgcatatgatagttgcgtatatatagagaacttaaggttccatgtgtacttgcttctctatgttgatgccatgcttattgcaagcaagcaaatggaagagattgacaaagttaaacaaacatcagggaaggaatttgacatgtaagatttgggcttagtaaagaagattctggggattgagattattagagaaagattatagaggaaacccaagctatcacaacagggatacataagcagaatcttggatcgatttggatttgttgaagtgaaaattgtcagcactcccattagccaacagtttagcctatcatgctctcaaagtccttccactaatgaagacataacatacatgggatcagtgccttacaccagtttggtgagcagtctcatgtatcttatggtctacactagacctgatctatagtgttagcatagtcaacaaattcatgaaagaaccagtgattgagcattgtaaagcagtaaaataaattgtgaaatatctaaagggaacaacacatgttggtttgatttttggatcaaagaaaaacaataacactgatgttatggggtttgtggactcaaattatataggggatattaattgactcgagaagttctcaaacaggatacatttttcaaatgagaggttgcaccataagttggaaggctaatctcgaatccgttgcagcactatcaactacaaaggttgagtatatagcctgcattgaagctataaaggaagcactttggcttaagggaattaccaaagaacttgacagtgatcaaagatcaataccaatattctgtgatagccagagtgcattacatctgagtagaaactaagtcttctactaaagaataaaacatattgatgcaaggctttatttcatcagagacataattaatgaagaaaaagttaaacttctcaaagttcatactgtagacaatccatcagatatgctgacaaaagctctccatagtgacaagattaaacacttcttgaacctagctactatctttctcagctttataaactgttagctcatatgtacattaatagttaaggtagagagttgttatatatccgtattgcctaactaacatcataacaattaagaagtagttagtggttagtttagatgacagttagtcttaataaactcacaaatgaccgttatttgttagttacctgtccttgtttcttatttataaaagggcatgtgacttagtttattactagtactttgtattgacacaattaccatatgaataacagagtttagactcaattcggaaactgtattcgattgtgtgtgtgtgtgagtgatcatctcagaattctattcttgagtatgcaatgatactgaaccgataggaacttgtgcaacatgggagttaggaagggtgtttttcctacaatagctttttaatcattgatgatggatagtcaagatcatataatctagtacaatatatactataatactttaaagtgtgtttagtaacactttttttaactaaaaaagtaaaagtatttttagaaaatatgttctataaaattgtttttttttcttaaatataatctatttgtatttttttaattaatattttggacccaacattctagacttaggaccccagatctggacttgaacctgaaccatgatcccagacccagacccaaacccacacttggaccttggaccttgatccagattcagatccaaactcggccccatatcccaaacgcaacctagaccctggacccaacccttggactcgaaccctgacctggccacgaaccccagcctcaacccaaaccctgtaccttgccctgagactcgaacccggagccaaccgtggacctgggtccgaactcagccttggacccgagcctagacttggccctagaccatgaccttgatccttgacttggatccaaacccggacctcagccttggtgcagaccctgacctcaatctcagaccccagtcttgacccctgaccctggagtttgggctcaaccctagatccgactccattttttttcttctaaaaaagttaaattaaaaaaaaaaatttatataacacatttttttttgttaaataaaaatattattaaacgccacgtttgttaaccattgatgaaatagtccggatcacaccctactaataaacatacactattattactagcataaagtatggtgtgacaaaaaaatgttgattataattgtttatatagtagttttatttaccttgacagccaattttgcatctccaaaataaacagcttctccaccagagaggagatacaaatcatcaaaaagatcaaagagatagccacttggttggtgaatggaacaaacaacaatcctaccattatgagcaatgtttttaagtgtacagaccacaaagaaggcagaagcactgtcaagtcctgtagttggttcatcaagaagcatgatttggggttgtgttaaaatctccaaaccaatacttaatctcttcttctcaccaccacttatccctctaaaataccaatttccaatcttgttatcagcacaatgttctaatcccatttcttctattgttttctcaaccaaattctctatttcttctttgctcattttatttgaaactctcaaatgagctgagtatgttatagtttctcttactgttagagttcccaagaaaacatcttcttgagtgagatatgactgaaatttaattttattacaagacaaaaaacaatagtattagtctataaaattagagggagcaactataataaaggtgtatatatctctattttttcagtttttagaaaaattataacttatttttttatatgacgatttataatattattatggcatgcattatttgtttttaaaaattctaaagttaaaggggtgccaatgtgtaataaaaaaagttaaaggggtgaaatataaattttctaaagaacactaatgaaaattatacaaaatacactataattaatttatcaataaaaaaattgggatcggccaagccctcctcgccattgccatagattcgttcgtccttatgtgcaatcaaatgtttaaattttgttttcgatataataaattatttttattttttaaaagcaagtagaataatggtataaaaaaatttgagttatagtttttctaagtgaaaaaaatagacattcc

SEQ ID NO: 14005 - DNA, 7172 bp, Cannabis sativa
  modified_base (6786)..(6786): a, c, t, g, unknown or other
tgactttccccaagcgatgtgggattgcacagcttactcggtattctcccttacggatcacgagactactgactgtcacattacaacttggcccattgtgtatttggattgggcaactggagtctgatttacattattatgtgttgattgttgtcatttctgctgtgatctattttatttgggttaatagaaagttttgtttctttttattctagtttgttcactgtttagcatactaatgatatgattaaatagagaattaaatctcgccttcgctattttagtaaaagaaaattatcttctaaagataaacgtattcttaatacattgtgaacagctggtagtattttcttgattttgtgttaagcgatgattgtatgatgtatcttttgatataattttgttataagaatacttctcctttcatcaaaataataataatatttaattaaatataaaatataaaaatcttatttttaaaagtaaatcgtaactatatcttagaggttttttttttttttttgagaaaaatattttagagtttagtgtatgtacttttttctaaaaccatttaatatatatttttataaattggattattcagaattttttttcttttaattattcgttgaccagaattttgtttaaattaaaaaaagaaaaatatattttttcaatgatatttaaaaatgaatttttaatactttaacttttataaatattaaaattaaataatataaatgtcttttttatgattttattttttaaaaataaattttaaatattttaaatttaataaataattattttatttatttaattacacgcatgatgccaaaactgctaccctaagctccaaaatcgccacatagagccacttgtgattaaagaggcaaaactctataatgagaatagttcaaggggatttttacccaaaagaaaaattatggccaaaaatttgaatgtggtaatagttaagagggaaaaaatcctacttattctaaaataaatgatagattttatttttttacttttttgaataagaaatgatagatttagttctatttgaaaaaacaaaatagataatactaaataaagagagtctttaataaaattttaactaaataagtaaaaaaaaaaaaaaaaatttgggacctagataattttttccttttactaattaatgttatatttttttcaataattttaagcatcataaattattatcctctccatccatccatactttcttcttcttccattataaattctccaaattgatttttatataatttcattttcctcttattacaaaacataatcatgattataattaatgacaatcattcataatcaaagaagaatccatattatcccaaaggggcctatagtatttctattttttttttaaaaaaaaataatataaataaatggtatattattaaattttcctaaattctctttcaatatttatatttagatccctcaaataattttacacatttttggaccattttatgtataagctagcttagctaaaaatggatagaaagggggaccaaactataacatttattgatcacatttttccaaagtcttaaaatataaataataattcaattaaattattcaaagtgaagtacttcaactttttttttttaggtttttgcttctcttatatagctaagtgctcacctcaccacacctataaaaaaaaaataagaaaaaaaaaaaaaccaatatgagttcaaagccacaaaatatgacattctctacaataacattatatgatgaaccccccaataaataattttgacaatttatgctgaacaaaattgataaaattcaataaatgagtgaaaatcatgacatttggaataacaataacttgacacttgtattttataatttcattctgtctgtccctatgaattttttttggcctttatattaattcaacctattaaaacaggtaagaaatccttctcacataaacaacttactacaaaagaacaacataatatatatgtatgtaataataataataatattatataaggacaaatgctttgaatctttgatgatgaaaaccctaaaagtctcttatgctgaaccaataaattatatacatccaaacataaaatatataacataattagaatgaatgagatatacaaaaaaaatatgattaattagtgatgtgaaatcaacttttttaaaataaaaaataaaaaaaatatgggtggctgtgatcttatcaacagtccaatatgttgactatcattagatacattgtagaccatattatcattggaaaaaccatatgaaaatataattatttaatttaaatatatatatttatacaaaccaacataattactcatattaaaggacaaaatatatgggataataattaattaatttatgggattttttttcttggatttttttttttggataaaaaaaaaatctagtggatttttcttaatttttttttcctatttattacatcaaagtgggtaccccatttttgaggcatgagtcttgtgagcttatgaagataacaacataatataatacttgtttctctctctccaaaatctccatatataaatagagattcactctcacatatttatattgatcatgaatgaataaatataaacaaaatctcttcttctactcttatagtctcttgggcatatacatatatatatatacacacacatatatatacatatatatatattatatagtggtgagatatgggaagaggcagagcaccttgttgtgataagagccaagtgaaaagaggtccatggagccctgctgaggatttgagactcatcactttcatacaaaaaaatggccatgaaaattggagagctctccccaaacaagctggtaattatttcaatttaatatttatctcatcacacacaaaatatctgtttttttactttaatttttagttcttctctataaatttgagagaggtttttgggtaaattttcatcatgttcttattccaatttgaattggtttattttattggttgatattcatacatggtcaagagaaatatacagtgcaatatatatattggaaatttcaaatttattcaagtttgaaacgtcttcttcatattttcatattaataaaaaaaaaatccaaatatactaaattctattctgtatatatacatatatgttaggccaaattcatattatatattatattaaatatcctaaaaaatcaaggtctggttaccaaccttattactaattactatcattatttctttataccaaactaataatacattccttctctctatatatatatatatgtaatattgtatataaaaaaaaggctatttatttattataccaaaaaaaaaaagaaaaaaagaaacataataatcccaaaaattaattatacatatctataataataataataattaattgtagcatgatatggctaaggttaggaatatcttaccaacatgtatataaagaatatgtcatataaatatattaatattttattttttattaaaaaaaaaagtctgttcataggacccaaaacgtcacatcattaagtgtcgtatttgagtctttgcatggttataatagtataatacagttgagttgggtgtcgtttttcgacattaaattcaacatcaaggaccaaacactccactcttagtactactattttttttttttttcaaatgtatatatacatttaatgtaaatatattattattaatcaaattgtcaaaataatttgattattattattattattatttttgtttttttcaataacaaattatgtatcttcaagaataattaaaacatgtcaattttctttcacgtgattttgaattattggttccttaaatatcaatcatactatgataataataatttttattttttttggcagggttacttagatgtggaaaaagttgtcgtttgagatggattaattatctaaggcctgatgttaaacgagggaatttctctaatgaagaagaggaagccattatcaagttacatgaaaccttaggaaacaagtaattaacttctcttaaacatatacaatcttattattaattatacgtattatttatatgcatacataaatcacacacaaatttaatatatatatatatatatatatacttaactagtataaattaaatgggtgtgttaaatttatgtgtgcataatatatatatatatatatcattacagactacttatacagtaaaagcatacttgaaattaaataaattatattctaattaaaaaattataactaaatagagatacgttaaaaaagaaaaatttaaacaataaaaagtataaagtataacaataataacaataaataatttttaatatatatcataataaaattattgttgaatagatgtaatatttatacatgtagaataaaattattatataaataaatttataaaatatatatatttttattaagatataattatttttatatagtggtaatttttttaatatgagatttagataatgtgtaattaattataatttagagattgataatttttatttaaaattgctgagacttaattttttttaataataaattaaaaattattcttaaataaagtatttttaaatagattttttattataataacaaacagcaatacgagttacgtgatattatagaccaattataatgtgttatgccaatttaggacaattgacttgtttgatatttttttattctcgatattaattaatgtttttttcgtataggtggtcgaaaattgcatcccattttccgggaagaacggacaatgagatcaagaatgtgtggaacactcacttgaaaaagagattgtcctcatcatcaaaagatggtgataatcaacctaaccctaataataataacggagatgatgatgatcgtgatcaacaaaaggaagaatactcctccataacatcttcttcctcgtcttcatgtagtactactactttgtctagcggtaacaagagaagtaatactagtaccagtagtgttcagcagcaaataatcaacctcgaatcactccctaagaggcctcgaatcgaagaagtcaataagggtactagtattgttgatcaaaaggaaatccaagacaaaaatgaggcaaaaaatgaaaaagtactggtcatgatgacaagtacaactacttcttctacttcatcttatgattcatcaaatgtgtcaaataatgatcaagttattaagacttcatcaaaacttgatgatcatcaagaagaagatcaagatgacatggatttgctatttagtgggctattacaagaagaagtgaataaacctgaggtagattattattatagtgataatattaatcaacctattccattggagactgaccttgatttttggaacatgttagataatataggcacaactttgcagcctaatcaaaatcatattattaacaataatgacactaataataatattaataatgaagtggtgcaattagttcaaggctctcatgaggctgcaatagtggatattaataatattggtgatgatcaattattaactcatcataatcatgattatgagattaatgataccaagaagtggtttagatacttggagaatgagcttggtttagaggttggaggagaaaacgacacaaatcaagatgtacgacaagaagttgatgatatttttcatcaatatcatcatcatgacataatagaagctcaattagattatgatcatcaaatatggtcatcccaatttgtaacaaaattagattaatttacataaatcattatcaattagtactatagtattttattatatatatagagaaagaaaaagagagagatggtgatgataatttttagtgtagacttttttaaattaggttcatatatattattatgatatatgatgtaatgatggatattttgattgatataatgtccaatccattgccattaattcatcttatttgcaaagaaaaatatacaattaattaatgtagctctatatatacatatatagtgattttttttgtttttttgacttgttcaatgatttttatatatctatattatatagtcaaacaaatttactatagtgggtaggtaatatatgtaatgtacttgaaatgtactaatattttttttaaaaaaaataaataaaaataaaatgtttttattatcttgacttgaaagtacagtggtaggtgatcgacagttgaaatatatggatccaaatttgctgaaatgttaagctaaactacgactctttttttgttgactttttttgtacgtggagaagagaagagatttaatgtaagtgtttgagtcaaacaaaagtagtgtgtatggtatataagttaggttgaactatatttatattattattaatattaaaatttaaaaagggtttattgatgtaccaattatatctattttggaattgaaaaaatattttagtctaatttttttatgttcgtctgcattagtgttttaggacattttgcaaaaatttgaaatttaaaaaaagtttaacataccgaaaataaagtttaaataatttattttacacatgtatagaataaaagagtgtcacgtgtaagataatgatcattttttcatatgctcaacatataaaagtatatcgattaaactctttttgagagtgcattgtagaaacacccactacaacaaatcttacttttagtcacaacanaacttgtgattaaaagtaaaaaatagttgttactaattattaattatcattcatatgttgtgactaaaaggtctgtagctaaaggtatcagtcacaaaaattacaatttgttgtgactaaatgtgagtaaattagtgacaacttgtgtctaaatactatgttttagtcacaagtagttttttgttgtgaccaaaagtcacatttagtcataaaaatttatgttgcgactaaaaagttatcactaaaattaggtgacttttatagtgaccggttatctttatatattaaaagtgcctatctaacggcattttttggtttaacagaatatacttaagaatattctgttaaatttaacgattaggttttaaacccaataattaaaccca

SEQ ID NO: 14006 - DNA, 3259 bp, Cannabis sativa
catgaaaaagatggaagctccaccatcacctgtacagttcttgcctgttgtcgaccacgaaaaccgagtaatgggaatcgtcactctgcatggattagtttctgctggtttataatatgtgtgattctttttcatccattgaattagattatattcttttaccagttattcttttataacatacactcaaatatttattatattataggaactcaatcccccttaagtgaggggttcaagtttattgtattgtattgtgttagtatatgtcttatatactataaatacagagaattattctaacagtgtcatcacttatctgtaataataagaatttgtactgtttttgtgactgaatatgaaacatgtcaaattcatttcattgcaagttcggtgataaactgtaatgcccttagttcaagtttttattgggtcctctttcaggaggttgtctatcttgaaattattcccgatcaagcacgtttaattttgaagtttttttgtgatgggttaatatctacacagtttcagtatcattacacttgaccttctccatgccatgtaagattcaacacgttatccagtattttttttatggatctcaggactactaaatgtcacataaattgttgacatcaatcctacattaggacacgtattcctattatcatgaatttcataaataaagtagtgacgaatctcaaacatgttcttttgaggtatcaggaaacactcatcaaacttgaaaaattagaaaagaagttttccaaattattttgattgtagattcaatttccaaacagacttattacacatgttgtgtaattttcacaagaagcaaaagttgtgtttataaaatttgtgtttcgtgtcgaattcatgtattataaataaatttttaatactaatttggaattgtgtttgaagttagtgccactagattttgggtggtagtaaagtcatatcatggagagtttttctatcattttcaattatagactgacatcaaattcaattcaatacaggtaacatgggtggggtctaattgtaagaatctattattttctagcaaaatatttaatttcattggggtccaataattgggctgcacaaatgtatgggccgaaccaatctgctaatctaagtccattttttatagtaaagaaatataatgtttactaaggtatgagaaaagttaatactactttgtcttaattaaacaataaaaataagtatttgaagagtgtgtttgagtgaaattttatgtaatgtttttattaatttttaccccaaaagattttacaagctacacagctatgctacatcattatattagaaaacacaagctctctcattatattttccaatggtttatcttcaaaaaaatgattataggaagcttaagatatttaatctaaaataaaaagcaaagatctgggtcatcatcagattcatcagaacttatatcacttaaattttcatatggatcctcagatgaggccaccaccatttgtagaaaacaattatatcctatcccttttaattcttttgtctttcctttcattacttttgtgttctgttctttagcctttcctttcggttctttcgaaataggtggtttggcgctgctcgccttaacaacattctcactaacaccgccactggcctttgcagcattgggagtagactcggtatccttatttactgctgcagccatttcggttgaggcttttgattttagacgttctttcaattcggccctgatgttagaaactttactgcttgttcgatcgggtgattccccattttccagtttatcagcagaggttgttgttgaactttcgccttgcttcgatgctcgtgccctcgtttgatggtttagacccaatccgagaatatctttagcaacactgtattgtgatttaaattttccttctaaagcttcaacaagaaggttgagttcattaatatcatgacggaaaaggaaatatttttcagtccaagaacacgacgaacaaagctgctttgcgtgatttagacatgaatatgtgtcttccgaacaaggacaacctgctgctgaaaaatgaagatcatataaacaaatcttacattcccttttggtggtagcatcgaaagttttgtccatcgttcggatctgtgaagagttacagagaaatgttctaccaatgtcttcgcccaagacacgtgactgcacaaagaaaaccatatgtttatcgttcagatatgttataaataagatcacaacatatataaatttgcggctaaacacccttatgtttcaatgttcatacatttaactctggtggcaatactcccttaacttcacttttgtttgcatatttaaagcgtaagttaaatttaactattaaatgtcaacaaggactgcaaccgtgtaaatttaacggttataatatttaaataacgaaaattagttggaccaataaaaatatgtaacatgtacacaagtctgcacagtgacagttccagttggcatttaataatcaaatttaaccgacatcttaaatttgcaaaaaaaaggataagtgtataaaaattgaaacatggaagaatttgttcgtaaattactatatgatactcaagttataagggttactaccttcgttgcttttgttaaaactccttcctttccacagacagatttccaaagttgacagtccaaagattttttcctattgaaatgttcccattgcaccttcacagcttcaaaagcggcttgaagcaaaagcctatcgtgggatatagatgtcttcctccccgcttgacgataaatttctacagcattctgcccgtgaggcaaccaatcaaatggagcaaaatttgctgtctcggaacagttaaaaccgcaatcaaatcccgaatgatatgtccctggaaaggtgagaatgaattccccgggattctgaacgcaacggaagacggggatacctaatgaattcaatgcaaagggagatagttgcttgacctgtatcaaagttcaaattaatggctcttagcaaacttgtatgagattagaacattagatgattcgtgctagcataaccataataactcaccagtctatcacacaactcgtgctcggatatgtcatcaaagaaatttgctaaagcttcctgaaacttacagctgtattttccagggatgccataccatactcttgaggcaccggtgtgcatataattcaaggagtacaagtggtgctcttcaactctctgtacac

SEQ ID NO: 14007 - DNA, 3193 bp, Cannabis sativa
agtcgaggaaatgcagaatcctcagagtaagtctctaaatgttgaatgacacgagaggtgatctcatgagggactggagaactacggctttcaatccctttccaatcaataccgtcaaaccaaggatgacttttgacatgatcagaacctagattccccaaccttgtttgttcgtcaacctcgagtaactatataatgtgaaacaacaaaacagggttaagcttatgagaaccttctaatactctatctagcaaaattgtgttgagtatatatgtctacaagggaaaaggtaaaagaagtttcagcataccttagagattagatcaacagcttcagcgctgaaagtttgcggaagatttagctgtccctttgctatcttggcaaatgtatcaagctcactttctctccacgatccaaatggcatttcaccttttagcatgaaatagatcaacacccccaatgcccacctgaatatacacaaaatgtaatcataaagccacaaactatacagaacactacaagaaaaactagtcccaactgattagaaggtccagccatcttgcctaaactttttaatcagtttgggatacatgtttctagtagaattttgaataatctactcaaattatcattttaaatattagctgcatttatgtgttaaatgtaacaattaattaaccttgttgtggatatcactatgtacacattattcaagttattttctaatgtgacaattaaagcagtaaaatctgtattttcactgttatttacgttcagatcatataattatttcccacagataataaagcatttctacacaattttcacagaacgtaaagtaattagctttggcatctttcacagaagtaaatcattaaacaaattttttcttagaaagtaaaagcaagcaatatcggacataagaacgcttaaacatgggatgaacaaggctagcatgagagtaaacatcaggtggtgggtttaccagtcagctgagaagccgtggccttttccctgtactatttcaggagccaagaaatctgccattccacaaattgtatatgtcctttccccagataatttttttccaaaccggaagtccactacctacgacaaggcaaagtacagtacagcaattaagcataagttgatacacctcccttttctacttaataacaacataaaattcattcagatacttgtcaacaaaaagagcggatcaatcaacctgtaaatatcctgcgtggtccaacattaggacatcaggagatacacctctgtagagaacatcattctattatgccaaaaaagacaaagctttaaaatatcagtggtcttaacttatatgagaaacttctaagactgaagggctaaagtgggaaagaaaaatagtgttccagacatcagaccttgtgtagatgctccaaagcaataacgaccatggctgcacaaaattgtgcagacagttcactcagaggagtaaaaagtatagaagccaagggacacgcaaggtatgtattaagcagtatgctggcatgtgactgatcgatagaagtagacaggacctctggcacctgaggtgaatgggtgatactcttcaataaattcttttctttcaaaacctgtgcctcctttccaagccttttaaccttctgctttgaaaatcttttcaaactaagcaagtgttctgatggccaaccataaaaaaaaaaaaaaaaaagaaaaaaaatcagaatgtctacagctgccttccaatccacaaacatcttatcagcaatacgttctctgcctttcggttataacattaaactttaatgtgcatattaatttataatgcaaagcaagctacaaatgaggcaaaggaaaacccactattagaaaatttgtatcaaggaaaataagcaattaagttataggcaggggacatgatagcaaaattttgaaaacgaacctgaatctcttaaatgcacaagcccgatctcactgcaatcagtggaatacacacatttcttccattcctagtcagagagagagaggaagagaagaagccataagaataagtcactttcagatttaagcaatgaaaatgcaatcaataacaggattactcaccatatcagagaactgcactccattaagggttgacatgtctcctttaacggtttccttggaaaaatctgaggaatggtcccttgatctaaaatagttcaattaaacaaaccacaaagtaaatgccattgtttcaagaaaggcaattctaacttttactgtgtaattaattcagtgtcaaatttcaaggtaaaaccaaaactaggacactaaacatacttgtgatcatccagagaaagctttttcacagggccaacaactgactcaaaattttcctttgttaaaacagcacaagtgacgtcacctacagcaattgcgcttatggaatctatgtgttcaccaagaagtgtccattcaccaaaatagcttccctctgacttctccaccacaagctccttactaccaggaggattatcaccttctctttgattttcaggtttgagactacagatatttcgatcaactaaatctgtgtcaaaggtcattttcactagtcccttctgaataatatacaatgcagacatgccttcatcctgcagaaccatgctaaatctacatgagatgtactctttgagatcttcaagcaacaaaatattctcacatagaatgtataccttttttacgattgtctgcccatctgagaaggaaacctcagacagtaaatcagcaatgtgactcagctgtaagatagtcaaccttgacagaagatctactgatcggagtagctttaaggatgacaaattagaaaactctgacatgagaattccacgaaaatcttcccttctcaaggcccagagagttccacttgtcactgcacgaacagaggcctggagtggtttgttatacctgtatcaccttaaaacaaattacaacactgcggtagaatgatgaaaacaatacagcagagaataggtcaaataaaagaaatatcaattttaactcggcaataatgctaatttgtcaatttggaaaaactagacagaaaaatcaaatgaaccaaaaaatatgattgttaaatggataagagttacattagtgccaattctccaaaggatgatagtttatcagctgtatagcgatgaag

SEQ ID NO: 14008 - DNA, 9978 bp, Cannabis sativa
tttttattttttatataatgataatttttttagtttttttgattaacataatgtgtattagtagatattagcatattaaaattatattattttctgcgtaataaaattgtattattatctagttaggtttttgttctttaattatctattacctataatattatgttacccatttttaaaattataaaattttattgtttatataattaatgtaatcattaattttattaaaataaattgtaaaaaaaaatttgtagtacaaaataagttgatgagttgatattaatttatatattgcaataaggtcaatgtcttattatatttttgttactttgtaactatttttatgttattttttagttgttgtctaggtattttataattgcttttaattgtattatacttttttaattaaaatataatatttttgtaattataaattttaaaataatattttagaaattttgtttttttttttttttttgtaaaaatgtataaaaaaaaaagtgaagaataaaaatataaaaataaggtaaaaataagtatatttatgtaaaaactcaaataaaatatgcaacccagtgttcgtgcgtggtgactgtgcgtgagagaggttacatgatgctaccactcccggtgagtttatcatataaatttgctcataaaaaatgccgaggcgaaaatgtcccgccatttccaattttcaattcttctccctccatatctctctgcccacagtgctcgctaccaggagggcaataacgtccacaaaccatcacttcttcttcctctccgcaaaactgatttatttaccctgaatgtttcatttctagggttccatttttgaagtttttgaatcatttttcaaaggaaagttgaaattatttcctctattatcagaggtatgggccacggtcatttcttttctcatcggcattcagttcttgaatttcaatatttgtgattgtttgatttaatagttctccattgctttgtttttgtgaatttcattgaagggaaaaataattttggaggaccttatgacatgttttgaggattccaaatgaggtcagaaaaatgattcagtgactctctgatatgcattgcatgtatttgttgttctattttaatgtgattttgttataatatttattttgagcttattttttggcgggtttactgaaaatgtgtagtagaagcaactggggagaagaagggtcggagaaagtacagcttccaaaagtgaattggtcacaacatgttgaggctcatgataatttcctaaaccaaaagaagtttctcagttccaattttctttactctttgccaacacaaaaaccaccaaacgagagccaagaccctatggctataaggtttgctttgtcactcaaaaaccattcttttgttttctttcttgctcaaaacaatgatatgttataggattaataaatgtttgttttgttggcttggtttggtatggtatggtattgtatgatatgtttgtggcttgggtggccggaataactcagtccattatttggtggattgtagaaagtttagtttaagaaatgcccatttttctgattcatttgaatgtgtggactaagtaaagcttgattctgtttttttttttcttccttttttctattccgtttggatgcataggtttatctttctaagttttttttgccttttgtacttcttacaaactatgatcagaaggagaaataagtgtagttatacttttacattttcactcccattggttccttggttctgttttacaggttagcagcttgtggaagtcagggtattcaagcactacccaattcacaagttgaaaaggtaaattaattatgtcgttttacgttataagattgatttctttgacaaaagaaacataagaatgatttcatgttagatttatgtttttgtggtcttcatttatttactacccttttattttttggttaattaaataaatcagtaagaggatggagtaaaatgagtcatgttaaggtccaagtatgatttgagaaaaaggaaaaagaaatcattgggcatgtagttggaggtttttttggtccattgcaattattattttaaattaatttccctttctctctgtagcaaaagcttgtttttgattattttttaatagacttttgactcttcttcaggttaaagttcacttctgttatgtttctccagttaatatgtattttcagacaagttgtgaggaccatttttttttttttcttttttttccagaaaagcagttttttctttatttattttattattccatcctaggaccagtttttctgattcttcaatttttaccatggaaatttggcaggcttggcatattctttccaatatgcagatttcttgcaggaattacgcaaaacctgggaaaacaattcaagtaaagggtatcagtgctgaaaattgtcatggtgctggtaaaacgactctgcgatgctcatcaaacattgatagaagttcagctcattcaaagacacacccatactttagtgcaactactgcagctaatgtcaaagttagtgaacctacaagctgcacaggtaaatatattccgccaaataatgttgaagctgcagaaccagggaaaagtgtaggagggcaaagacatatcggagcaccaactgtatatgcttctggtcagcaggttggtggttctgttggcaatcacaatgttcatggccataccagccaaagaaaagaatcccaaaaagtttgtgtcactgacctggatgacgatgatgagatactagaggttagtttaaatgacttggttagttcaattgttgaaatcaacaacaaagacttgggaacagttggtctctttctcttatatcatggagattatgtttttctttttgtttttttccttttgggggggttggagggggatgttttctacagtaaatactttagtttatgcttaatctttctgaaaatggtgttatttaatacttttttgtttaaactttttattaatataataatatttttttaattgtaaacacttattctatttttagtcgatcaaggttcctatttaatatcattttcaaactcttatttttcaattagaaatgaaactacttaattaaacaagccttttcaaaaatagaaaaatgaaaaaagaaattgcttaattaagcaaagaaacatggtcatccaccaaaacccaactgcataggttcattaaggttatttattgaatgatcagacttttacattgaagttgtatcttcttcttctaagtagttcaactccaaagtcttaggccagagaaaaaacaagtgtttttcttactggattgttattaattgtttcttacctgtctcatccatctagtttggttgcagagtattgatgtggatcaaatagtggaacaataccaatcatcttgtacacctcaatcaacaacatcgaggcttcctcccatcactccaactacaaataataagagtaactttgtgcgacatgatgaagcttgcttgccacctgaactgtgctcaacttgcagtcatggatctaaagtatgtttatgtgtattatctgcatcagtatcttcttatgttgacatgatatcacatctcttacattctgaattttatacagctaggaacatgcccggacgctgcacgccatttgcaggaaatgaaggacatgttaatatctgtatcaaatgaactgattgataattttgatagtttaagtccagagcaaacagaaaaacttcgtcaggacaggtttgccttttctttttcttcaagtgtacatagttttcctgctaaataaaaacaaaatattagaaaagaaaaattgttaaggtaaagaattagatgaaggaatggactatcgatggatcatgaagtatcaaatatgtttcttatggttatttttgttaatgcttttttagctgattgttgctttccaagagaggatttaaaaattaacacaatgtcaatacataggttggagttgaataagcaaatccagcagcttgaaatatatcttcgttccaattcagtagatgaagaaaggcaaaattcacatttttttgcatccacaactccccaaactttcaattatgaaacacctcaagcatccgtgtccaggaaagatccctggaaatttgaatcacaggttcatctacgcaatgaaccaggagcatatgaaagttgcaacttttcatcttcttcattctcttctgtagatagatttgatatttcctctagtactggagagagggagccatacatccctaggcttgttgaagttaactatattgagggttctaataacaaaaagtggagtaaccaaaatttcccgtggacaatgaaattggaggtatgtatctgttttatttttacttcatttatgcactaggttcatcctgattgttgtttgctgcaatcacttttaggacaataacaagatagtgtttggaaatcactcctttcgccccaatcaaagagagattattaatgctacattgagtggttgtgatgttttcgttcttatgcctactggagggggtaaaagcttgacatatcaggtaaaagaaaacacttttgtgatgatcctatcatagatacttgttgctttttgttaaatttaattttccaatttaaatttgtgccataattgtcttagcattcttgttttataatttttttttttgcaagattgtgtatgcatcatttttctttgaggatgttgtgaaatattttctttttgtttgaatttttggccttgactattccaccggatgacctcccagtggccccaaggtttttcttagtctctggggatttgaaccttggaaacaactgcctaccagtagtttccaacactccttgctagttacttgtagactacccctttgggctgatattatgcaacaatttcaccaaagagggtttggctgagtggtaaagtttatgttttgtttcatgaggttcgggattttaattccttacagggattcaccctgtaagttttctgccatccaaggattgtaggtttcagttgaatttggaggacatgtataaaataagatgtgtaatattttctctaccaagaacatttgtctctctattatcattcgttcattgtctgtctgtctatcttttatttttatgagaaatgaagtcttcatttaagattaagaaagaaaaagaattacagaaagtgggggatctgatttctcataaagaaacgtacataatctgaaaaggaaaagataagaagaaactaaacactagttgaaacaaattatttttcattgaaaaaacattagggatagtgagaaattccttccaattctcctcctagaaatgaactgaattccctatttattttgaaccaaaggttttctatgaatcttttcttttgcagctccctgctattatatgccaaggcctaacattagtggtgtgccctcttgtatcacttattcaagatcagattatgcatttattgcaggtaatttttttctcgatcagtatatcttgtttttagtttcctttctgttagtattctggcatctcttctgataacattactattcaattgtatcctcctttttgggttttctgaaggcaaatatacctgctgcttatttgagtgccaacatggaatggactgatcagcaggagatccttagagaacttacttctgattattgtaaatacaaactgttatatgttactccagagaaagttgctcagtaagtgtatctccattatttgtatttatgcatttactctctcttttggtataattgggctaatgaagaagcatgtgtggaactaaagccatttttcttaataatagatatgctaaatttacgattagatcaaatttcattatgtaattccttgttttctctgcttactactactagattggcttcattgtttaaatattctttctgtggtattgcagtcctattagcctttgatggaagattgctttgttcttattgtactatttgtcatccatattttgtggtctactgcacttaacactgtttgaatagtcaattgaagatatgtctaaaaagtaaaaattctcatgtcttagtaatctaataagctggtaatggggagagtatttaatatagttttatagtaacagtcgctacccgtattagttaagcctagtatgtgttttaaataatgggccgtttctttttcttccctgtttaactaacttataacatttatatattaatgcaacaaaatttgagctctccaaatctataaatctcaatttttctggcacatagtttattaaatagatttccctagtatcttggatagaaatatatatgtattatgtacaatataaatataatatattatttttgtttaagccccaacctaccatatgattttatctctgtttgaaccaatatcatttccaaattggatttacccttatggatgcaaatggcacatgttttttttattatccttaactgttgttttgaagaaacaaaacacacatgtaaacaacccaaatttgtttagtcagttcgatcattaacaaagaattttcactggcataaattccaagtacgatattcattaataagttaacaaattatatttttcttttttatacttttgatatattaaatgtatacatttttgtttcaaacataagaagttggttagtgttacatgattgagtaaaatattttcagtttggtgtatttacccaggatacacattttcctttgttggttttcattttggattcggtctggttgttgtactcatgcttattgtattcaatatgggctcaatgatattcgtaatttgattaattccccttatcctcaatcatgaacacaatagtgctaattttctaaacattacagattgaaattaaaatccaagtggaaaaaaataaaaataaagtccaagactctgattacaatgcataaacattttttttaatactgcagaagtgatgcccttttgcggcacctggagagtttacattctcgtgagttgcttgctaggattgtaattgatgaagctcattgtgtgagtcagtggggacatgattttagaccagattatcaggttcttgacccctcttaaaacctttaaagtttatcttgagtatttattactcatttttctaataaacattttcatgtaaaacgatcagagtcttggtatcttaaaacaaaagttccccaaaacacctgtgttagctctaacagctactgcaacagccagtgtgaaggaagatgttgtgcaagcccttggacttgccaattgcgttgttttccgtcaaagttttaaccgtccgaatttgtggcaagtatcaatgcactgtaaaaccttctctgttgttacaggaatacttttttaagctgtcattcaaatttaaagataatattttttttctgtaaattgcaggtattctgtcataccaaagactaaaaagtgtttggatgacatagacaagttcattaaagaaaaccattttaatgattgtggaataatttactgtctttcaagaatggactgtgaaaaagttgctgaaagattacaggtactatattatgatcactttggtgttgaggcctttcatacatccagtttttgatgtcatatcacttgaaaaatgtttcttctacttgagtcttgaatttatctatgatcattttgttgctacatgggaagtttaaaagatgttatgtcactttgattacatctggaaaatccgtacaatatttattttattgattatgatacagcttgatttcatatttatttccctatctgtcttgagagattattttctactgatcttggaatctacagatataaccaaatctgctaagcaatggggagatcagatcataagcctttttgttttcttcttcttctatttgcttggagaatatcatgagatttgtttcatttagagttcacttatatcttcttcaggaatgcggtcatagagcagcattttaccatggtagtatggatcccgctcaacgatcttttgtgcagaagcaatggagcaaagatgaagttagtataatttgtgctacagtggcatttggaatgggtaaatgctacagtgctgttaattgttgccttgatcagtttaatttgttactcgatcacaagctaacattagaatttcaggaatcaacaaaccagatgttcgctttgtaattcatcattctctcccaaaatctgttgaaggctatcaccaggtgtttaaatagaaagtagtttggcatttcttcattggaattgttcgtgtttgacatatatggataacattacatattggttaatgatattagcttattgtggtctttcgttctagagtcaggagtgattatatgtcagtgtcattatatgctaacttcttgcattaccatgggctaggaatgtggtcgagctggtcgagatggtcaaccttcatcttgtgtgctgtattacaattacagtgactatgtaagttctagcaaagctgctacatcagatcagttttttttacctcgattgtatcgtgtattttttgaagactgaagcttactaatttattttctcatctttgtatttatattccttggcatatttttgttattctcgtgcagataagggtcaagcatatgattacacaaggtgctgtagagcaaagtccgtacatgtctagaaataatcgtgctaatacaagttactcgggaagaatactggaaacaaatactgaaaatcttttgcgaatggtaattgatacaggcttctgattgtattgactattacgtcttttattttgctgctctctttgaaatcaaatatgtaaagtgtgtgccttgtttcaggtcagttattgtgaaaatgatgttgactgccgacgtcttctacaattaatccattttggagaaaaatttgatccttcagcctgcaaaaaaacatgtgacaattgtttgaatatcaaaagttgtgtggagaaggatgtcagtgagttggcgaagcagttggttagtaatcaatgtagttgtttgatctcatttttttttccttgtaaagaaatgatggagtgctctttatgttgtttactgtttgttcatttataattcatagttcttgcatatccaattagtcacttattgacatgtgcttacaggttgaactagtgaaattaacaggacagcagttctcttcatctcatcttttagaagtctacaggggatcccttagccagtttgtaagttgtaattgtaagggatgtatggtgctttctattactgtaacttatttttacttcttaatttaatgtttgtaatgtgaaaataggtcaaaaaatataaacatgaaaaattaggtcttcatggggctggaaaacatctagggaagggagaagcttcccgtatcttgcgccatcttgttactgaagacattcttgcagaggaagtaaagaaaagtgatgtatatggatctgtatcctcggtgctaaaggtacatgtagttgcttttgtttgcttgtgcatggttctcatataatatcaatgtatacgaaagagaagaaattggtccttggcaactctatctatcttttttctcttttttaaatgtataagagtggtttacttttcatctcaggtgaatcagtcaaaagcatatgatctctgctctggcaggaagaaaattgtgttaaggtttgactttctagtcatgctattcttgctcatacttaggttatttgctagttctgactaatttatttacatgaaaagatgaagtctatgattattaacgcttgcttttttgttcattcacttgcatttgtcatgttttggaaaatgttttcatttctttacagtaatggtttcctttatttatgcatgtcttggtttgtcctatagcctttaactgtactaccctttgctcaattacctac

SEQ ID NO: 14009 - DNA, 7460 bp, Cannabis sativa
gttatataggtgcaaccacctaagttgagagtgatgatttcatcacttttagaataggacacgtatgttcttttgtctaactatgcatgcgtttgtttttatgatagttttttaattccaatatatgattattattattttttttacgtgcacaatatcttttttaatataaaaaaaacaaccctagttccgaattttccaactattaatcattagccaaccaaaatataaactttaagaagcatttattttttaaaaaagaaacaagtttaacccctgtttagatcactgtacaatttcttgtctttcttaactatattaaagtgagaaaaaaacaaaagcaaagcaaactgccaaacaccatttgccgatgtggcatgtgaaattattggcttattgcagaattttagatactcatttaaaactaaaccaacacacacacaagtccccattgagaaaagcaaaataagaagaagattttcttagagtttactcttgtgttatgctctgttcttcatgagcttcatttcttcttcatcaccataattatggaccattcacctcaacatggcttcaaaagaccagaagaaggtgagttcaacttgagagaatggggtctcaaagctagaattagccgagaaaataccaattcaaggagatattctgcttcatttataagaagttttagagaagattctaagtcttttagatcaaacataaccatttctagcacagcttcttcccctggttactccttaagaggtaacttttaatttagttttcctactctctcactgtttcaatcataacccagtttagaaaattcactattgagctgatttatcccaactttttgttgcagatgaaatcgacccatctacatattcattcaccacagcaatccaaggtaaaagaattctctcttcttcttcttcttctttttcatggacatgttcatgagaaacattgtgaaatgaaaagggtgtttgttattttcattgattgcagctttgcaagcaaggtcagcagcttacaactgttgggattgcttatccccagatgggtttgctttaaattcaaagtggaatgaagcagagaaatacatttgtaaccctctttcaggggagtttccaatggagtgtttgtctgcaaaaacactcagtggaagatcctttcgtaatgtaacaaatagaataacaatgtcagctcctctcatttactcttcttcttcttcttcattctcaaggcatatccaaacaaggccttctaatactaataacaatgctttagaagacacacttcataagtttcctattccaggttggttaccttttggtctgtccacacttacaatgttttttggttctcttgtctttgactctattaatatttttcttacagaaacgaaaatggaggtcatgactagagatgtggggactcaaagcaccccaccggagcttagttcgagcagccttagccctgcttcaacaccaccaattacagaaagatcattaaaacgttttgggattgaaggaggagattttaacaattcaaatgcagaagtaaaaccagaagaactggtatgtttctttatagtgtttacattggattagatgttgttcaaatattcatttcaatgtttttgttcttgatacattgtgagatgtcacatcacatcattaataataagaacacaaaaatcgtttgttaatccaatccctcctgtcaattccttatcctgtaggacttgttttttaaacagttaattaagtagccaagtgcttggacatgagacattgatcaacaattcaaaaaaaaaaaaaaagtaatttattgagaacaaatatctcaccaaccttttgcctgtgtaaaaaaagcttctttaccctgaaaaagttactagagcaggaatttctttattgggatgagacaatcagaaagggtaaagataaatagtcctataacatgaccccatggccatgcattcctaggtgtgtgtggccccaaagtggctcttctagttattatggcagtcacacccttatttaatattagtcttggttttcatatatgagagacatttttttactgtaaaagagggataaatgaaaacccagatggaacctttagggagagtcacataacaacaaccataatctccattatccaaatccaattacaaaaaataaaccacctttcatagttggatactacttttgctttttttttattacctcttattagtgttatgcttgctcctttgtttttgttttacacaagctcatcaaagattctgtgaccaaatatttaaagccactttcacttcttttctatttttttttccactttagctttctcgaggttctctctatgaaaaagccatatcaatactgcgtttcttctttttggaaaagatggtcatgtgtttcagggctgatcatcacagaagatgattgtatattttcgcatacatatagttcttgttgcatagttttttcgaatcttaaaagagcacatgtcttgttttcaacagatattctaataaatagtttgtaaatttcgtactacatttttaggagaatgtgcatatcttttatacaaataacatatacacacacatatatataaatatatttgtacgcatgtgtgtgtaactgatggctgatagttattacaagaaaatgacaaagttttggacattacatctttacatcttcatttaacttttcttggattgtagtaggataagataaggtagaattttgaaccttggactctcttccttcatttacttcaggaggttcctacaaatctgaatttttgagaaaggtgttctctgtttagataatgataataacataacaaaaagcgtccttacaattaaaaccttatagccccattctcttgttatataatgtcatgacatgttatatatatatatatattataaattgatgtgagcatgcatgcatggagtgcaggtgagtgtgaaagtgaaagaaacaagagaggaagaagatgaagcagtgagaaaggaagaagaggaaaagacaaaggaaaaagataagcaaaagcaaaagcaaaagcgcaggcatattgggtgttgtttgtcatggtcatggatgagtaaaaggaatagagataaacacaaattgagaagcaaattctttgttcctaataatctaaaaggatgctaattcaagggctacaaagattctctcatatatcttaaccaggaatcttgcagggctagctagtgattaaaaaaagagtccatgacaggtggggaaaataatagtatatatatagcacaatcatgtaagtctatatggggtctatgattgttggtttcttctgagtttttcttcttctggggcagtagtgcccccactgatgtttatgtttttattcttcttgtggtgaaaacttggcctgacagctttgaattcacgtgcatgctttttaattgttgctcactctttcaaactctctccctcacaaattcaccatttctgaatgtatgtttaaactccttaaaacaaagctattccattccacaatttgattaacaatgacaggagctttaggacatttgtacgtagcattagctggttttggtggagcccatttaagggaatatcttttttttggcactctgcttcaagtgacctcaatacaagtacagcaactaatattcagctaagcatgacaccaaatgaaggactaaagagtagtttgttcttaagttctaacttcttgatccactgttaatttatgattatacaatctaatgaaattcttatcagaaccagtactcttcctcgagagaatatttgaaagtacaagttttcacatttggtttactgtttgttatcaaaataatccatcttctctcacgttccaatgaccagagaaatagtaaaattacaaactgtattaaaagccaagcactgtgtctcaaactaccaaggaatcgcagttgatacttcatgtcttttctttatcaaaactgtgcttttaaaaacaatacaaaacaaaacaccccctctaattgtttttcagacaacaattatttttaataacaaaatttcaatatcaatatcataaaaaatctttatttctctatctcaaattctgttgtaataatgtatggaaattgccttttcttttctccattaaatttgtccctgttgtaacaagttagtactctatattttacccactttaattatgcttcaaagtatttcaaaaaaataaagctccaattcaaaagggcaaaataattacaaaaaaccaactaagttattaataaaataatttatttattttatttatgtttatgggagtagaaagaatgattttattttgaataaaaatataaattaaaaaaaataattaataaattgtattttaagtggcaaatgaataaataaatataatattaattgcatgctaaatttaacccatactatattttatactatatttaatacaatttttagcaggtacaaatgtttatacaccaccatgatagatcaatagagatattgctgaaaaatacatattcattggggatgctcaggcaatattcaaacactaattactcagcatggtcaaaatacttttttttttttttgacttttggagggttgggatctcttcaaaattcatataaaatttcttgtaattttatgtcgaatcaatatataagcggaaattttacaagtgattataagcttatagcttgtatagagaatgaaaacaaacaatgaatggtacaagttactaaggtgatgtggtggtactgttagaatttgagataagtcgtacttcatatagatccttctctccctttgctgcacccaataatagttcattatcacaagaattaattaccaaagaacttgatcagcaaataatttctatacgtgcatgcaagcatgcatggcatactctctatgcatctaatctattatccatttccactatatatgaaatatatctcaacttcatgaggtagttaaagactaaactcaccaatttcagctgtaatccccggtccaaagaatgaagtgaatttagcctggaggaatgtttaagcatcaatatcatactgactaaaaaaaagatccatgaagtgcaagtaattatcactatgaaagagaatgataatttgatgggaatgcttttgtgattataatatagttttagttctacctgtctgcgctcaaaatctgacaactgcaaagcttttgcctcaaacactagaactagacagtatttaccatcttccgagacctggtacgagtaacagaaagataattgacaactcaacatggccccagataatataacgaagtacagaccctggtggtggtcatatcagaaacggcctgcaataggttgtaaagggtactgccttttgttttgcaaaatacagtcttttatagttattaaatttgttcttgcatgtgatggtacagtgaaactcattttccatttgcaataaaagatgaaaaatataatccaaatgcataacttgacaatggaagatgcaatgcattagatgaagagtgtgtggatgagattaaatccatgtatgagacacgtacttcttcccggatcatttgcagagttggagcacttctccgtggaattcctccaccctgaaaagtgaaaccggtaattagaaaaaatgagcacacatttctgagaactgaggaaatagtaattttcagcagttttcccagcaagtaatttttctttcaaaaaccataaaaagtttttttcaggctaggctcccccacctaaccctgcaatatttagaaattagagcgatttaggtgctcataagggacacaaatgaattttgtgggagcaaacaacatatgtcaccacttgaaaactactcttgggttaaaagaacaaaatataaggactattgcaacctatttagtagcaatattaaaagaacaaatataccttccaataatacatgcttataactttattgaaaaagtattatagtatacatatgttacggatgtagtaatataccaaatgatgtctaaattgaaatggattctctaagtttaaaagcccaataaaattaagctcataaatatagttttcttttaggattatactaaaatgagtccctgtaaaaccaaaaaaaaaaaaaagaaaatagtcatgaacaaaagctacatggcaattctcccctgaaatttgcgtcgttcttctccatcagtcggtctccattcttcactccggctaggtaagttatctttctcactttgacaatttgtttaataattatatagcatttctgaaatttaagggtttgtagattttcctgaaattaaattttgatcatcatcttccaattggacaaaattgtcttctcaagcaattattttctctatttcatagaagtttttagtctcgctcacttttgatttgcttttgattgttgtatatctagacagtgctttaatgtacattgttgccttgctaaagagagttttgatttcactctgttctcatgttatttctatctatatttgcaattaggttggaaactatagtcgataaacaaatttctcttcactattacttctatcaaaccattgatcatcttgtcaaacaagtttgcgtttcattttgtttctatatttatttactgttaggttttcgatatttgattcttagcaaattacgaattttttttttctcttttttcatactcatagagctctcaatgatcattgttggagttgtttgtgagcttaagttggcacacatatgagatgagaatgagactaataaactttttaatatcaataatggattgatcaacacaatttaaagaccaatctgaaactaagtcagacatgcaatccccaaccccatataacataattacagaacaaagacacttaatggtaaaatttactatatgagatgacaaaaagattagaaactttgaaagtgagtcataatttcatagtacttttcaaacaaaactattatagttagtagacattttaaaatcagccacgcagtcaagaaataataaaggcaaaatatgaaaatctgtcattgaaataaggtcaaaacaatctaccatctattactagatccaactcaatcaaagtatctcagccaaaataaaaaagcaaatgatcaaaaaatatcaatagatatatatatatatatatatttcatacgtgtgtattatgatatggggtaattttttgatctataagattaaagttaaatagacgttacatagtgtgtacctacacatgagattatgttttctgactaaaaaaaaagtggctgctttatatatgtcctatgtatgtataccttaagggcccatttggtacgcaggattggactggattggattgaaaaggattggattggactggacaagattggattatgctgaaagt

SEQ ID NO: 14010 - DNA, 3756 bp, Cannabis sativa
ttcttcttctttcttcctcctctctagtaattataattataataattaaaattaaattaaaataaaaataaataaaaataaaaaataataagtccaactccaccgcctcggattccaacaacttcccccaattctttcaccaaactccgatttagggtttccaaatctgcccccactttttccgatcgtcttcaaaattcataccaagtttcgatttttcaactcattggattcgattctaaaccccttttgtcactcagatgacttcaatctcttcaggtcacttctctctcattttttctctctgtactgatttttatttactccgatgagtatggtaattcttgtttggtagctgagaaagtaaggaaaaattgtgtctttgagctttttttaaggataatgtaagtattggggttggttgagcttcaggttcagcttgagctgtgttttatttatgtgtatatatatatttgtagagggagtaagatgaatctggggaatttttgttagttattttcgttgatgaactagtgttggtagggtttcaggagttatcttaacagtaggtactgtagtttagtttgttgtttctttgatttttgataacataaaaaagctttatggtaattaaagactccttatgaatggttggctcttaagattttggagtaaaagcatgtatttttattattaaattctagcaaaataagaaaggtagggttgaactttacttgtgcttattaacaattaacatggttgggctcactgaaactggttaaattatccagtaatcgcatgactttttcttactttttttggctagtaaatgcataatattattgtgaagcttttgtttgtatctttctcaaaagtgacaatttaatttgtctgaacagagtagtactgaatgaaatgtttattttatgaagctttaagagtttatctgcttttttagtaattaattcgagttatatttttgttatagttaccattggcctaatgcttgaaggggccacaggcaccaccatatggctatgaactatttttgggcgtctctggaattactgggggactcacttatgtaaaatatatcaatggtacccgaaggatagcggagttatggactgttttcgagctattatttattttaaaggtaagttactaagttcaacttctcaccatctagttgaacatcagtggtacttcatttttgtataatatagttattctaaggttttggctctaagctttaagcttcatgtattgaatgtatatgatttatccatcttctaacaggaatttctatacatgtttacttacattattcttacccttttgtacttttgctgatgtagtaaattttttttacttcctttaacatgagaatttgagcgaaagtttacttctttatggttgcaggttcattgccgcattggttattatcattatttctaatatggatatctggttttcaggatgcagtggcattgcagccactgcttaaggaaactaatttttcttctgtatcagagctaacaaaacaacctattagtggattcttcgagccaattgaaatatcaccagctgttcttccgcataatccacgtccagatgaacctttgcctccaatgtacccgacctttccaacaagatataatcctgtcttgactggaaaatgtcctgtaaagttttctgcaatatcgagtatcttggacaaaacagcatctgattgttctcaacctttggcagcacttgtagcaaatgtaatatgttgtccccaacttaatagtttagttcatgtcttcaagggtttctctagcttcagctcagataagttggtgttacaaaactcgagtgctaattactgtttcgaagatattattaatatcttggcgagcagaggagcaaacagttcaattcccacgctttgctcggtaaaaccatcaaacctcacaggtgggtcttgcccggtgaatgatgttcttacatttgaaaaaactgttaatacaagcaaattactggaggcttgcagtagtgtggatcctcttaaggagtgttgcagaccgatttgtcagccagcaattatggaagctgcactccagatttcaggaaaacagttgacgatcaatgagaacaagaatgtagcggggggtttcgctcattttgattatcttagtgattgtaaaggagtggtttatgcatacatttcaaggaaactatcaatggatacagcaaatgctgcatttcgaatattatcatcctgcaaagttaacaaaggtatagtgttggagtatcttgaagatgtgtattgtgtacgaacaaagcattgcacttgttttcgggtttatctaaaagattagattaatatttgcaggataatgctagaaatttcatcaaataatcacattctagacttttggtcatgtcatgttggcacggtgcccgttactacaaatactctattttatttatatcgttcttttattttgttcataaaagtagcattgaaaggcatatgttttgacttagttatcgatatatactcgtgtttcttctcattccatagtcattacttgtgcagtttgccctttggattttaagcagccttcagaagttatcaaagcatgtcgcaatgtagctgccccgagtccttcctgctgcagctcattaaatgcttacattgctggaatacaaaagcaaatgctgattacaaatagacaagccatgatctgtgcaacagtatttggatccatgttgcggaaaggaggggtgatgactgatattttcgagctttgtgatgttgacttgaaagattttagcatacaaggttgctttctatgcatgatattattgttattcatattttgcattacatttttccttcctaagctgatgatttaattctttttccttttatggccactcgagcagcatacggacaagaaggtatgttgggcgtttatttctcttttaccattattgtttggagctttagttagttgcgggaatgcttgtcgctatggctaagtgttttaagtttaaatttttatccgattacaggttgtctccttcgaagcctgcctacagatgtgatattcgacaatataaccggcttcagctttacatgtgacttgagtgacaatattgcagcaccatggccttcatcatcttcaatgacatcgatttccctttgtgcacccggtaacttctcaaaacaatgaatctctttcttattattctctatttttcgttcgtatctaaatttaattggtttacacagagatgtcgctgcctgcattaccaacctcggagacttttaaaaacaccggtgcatttcattgccccccatcttcaaaatattctagttccttaacttccatgtcataaaaaattgatctttcttttcttctgttgctgcaggcggtggtggtatcgcggtggaatttgttgtacccattttttcatttttggttttcggtgcattttggctctgaaaaatactaaagctgatgagggttggttgggaattaggatggttttattagggttgggttgggggggggtccttttttgtggaattaaccttttggtgtggattttgcttgtaaattttgagttagtctttttctccatgtatagcacaagtttctttctttcttcttcttcttttgttaatttcagatcagagttccacattatcaccaagtgtccaaaattccaaattaaaacacaaaaagtcaaagattgactaaa

SEQ ID NO: 14011 - DNA, 4724 bp, Cannabis sativa
aacaacaggagcaccattacacacccgacacccatgaagaacacccctggcttcaaatctctttataagagcagaaagaccctcagcacacaacagaaacaaataaggagagaggggatcatcttgacgaagaccccttaaataatgcatttcatattgtgctctcttaaataatggtacttcacaccaatggaacataataggttgttgtgtacatttacacattagacacttcttatagttagttgtttgttatggttacgtaattgtggtcctattttatagtgttagtggtgtatgttaaactctatataaagagtcgtgcttgtacgaagatcaagtatagcagaagcaataaagttgtttcaagtttaattttttcctcttcagtcatgcacaattcggtagtgacataaattcccagccaaatttgctaattattctttatagtatgtacccaaaaaaagagaaaagaaaaaaaaatccatatagtaactaaattcattgtgtttacaaattttacacttttattgttaattttacaaatttcccaaatctcaaccagattgatttcaaaacagagtgatgcaaataatgactgttagcgttaatggcgtctgtacaactaaaaaccattcgagtcttgaacgtggaggagtaagaccaagacgaagacgatgcctgcttcgtaaaagtgtcaaaattggtttcagtagcgactcaattttacgcagttgtggctcaacaacgactcctctgcgtcctcatatcaatagtttcctctctgattcgtcttcttcgtttcccgttccctattctcgatcaaaaccagttagtccttttctctactacttatagacttattactcttctctgcacttctttggtttaactagaattgttcgactgacagggctcggttgtagatgatgggccgtcgctatattcgacatcttcgagttataaaaagaatggggcaccgtttaagtctgtaccgaggagaataatggcttctccttcacagctgacaaattgtggaacaagggagagtggaagagaccatgtttatgtggctgcatttcctctaagagcggccaaaggaccaccccagcttctaatgtccgctgcttactcactcaatctatgggatttccaacattttgtggttataatcaaaccccactcaccgccaccacattctcaggtctctttttctcccaagagtctcattcaaatgggtttgtaaatatgattataatcataattctttgcagtctcacctatatgggtttttgattttttgataaggtagttgttttacttcatcaaccccaacttttcttattatatattcatagctgaactgtaaactgattcttattttatgtttataatgttctgtattctgtaaacatgtatttggtgcatattgctgcccctttctagcttttcccttttcactctaagatataagctaattagtaattttgcctgaggtcattaaaaatgcccccgaattattgagattgttggatgtaaggacttttgtccaattttaataaaaaagtttaacatggatgaaagtttagggggcatgatttagtatatttcaaagttcgagaggtatgatttgttatatatcaaaatctggaaagcatggtttagtacataaatattcactgaaatagtaaaattgaataaaattagataaaaatccttaaatccaacaatcttaatagttcaagtgtatttttaacgaccttaaaagttcagggagtatgatttagtacatatcaaaattcagggacaaaaatcataattagcctaagatatatataaggttattgtacttttccaagttttacaatagcttaaaaatgtactctttgagagagtgtctagtgaaaaatgaaaagatcttttcatagaattagaagctaataaaaaagaccttattttcaaaaaagctaagcataagcaaaatcattaaaaaatggacaatgtgaattaagctcaggttcataatttataaaagaaaacaattggttttgtatgtaaaattgggtgaaagttgttttgtatactatcccaataaattcacatattatagagatagaaactgaaactagttgtctatactgcatttttggaatccattggtatttcattcattgttacatggtagcaactaataagatcgtaggttagaatgtatcactgaagtgtgtgcgtgggccaaatttcttattttacagatggaactccactctttctgaaacgtattttgcaggtgctggtttacgattttcagcccaaagatccggaaaatatatttgtggctcttgaagttttatctggtagatcaataccaggtaaacattttttcactttgtgcaatatatgactgagtgtcacattgttcacaactgctcatcattttttatttgttgttgggaaagaagaaaaaaaaaccaaaaatgtgacaaagcaccatatgagtgtttttctaatgttgttgctgctggattaccatgctttagttttggttctggtcctggatagtcttcttgccatgggaagtgaaatatcattattaagttaacttagtgccgtgcatttggaaagaagaggggacccaactcctctgagaagtaaggtagctgtttctcaaggatgacacctctttaggttattatggatcgtttttgggtatttgaccatttgttattgagtttacatgttatttttaaagaccctttttacttgttacaggattgtttcaaagctatggtttaattaaattcaattagaagtaatgtgaattcgtttttgcttgttaaaaaaaaagtgttaatttagttcattcacacatactctagtgcagtgttaatagacaaatattttaaaataaccattgtaagtgatttttaggggcaattttgctattcctttccttaacagaaattttggtagaattttgctatcccttgcctatgcgtgatcttagaagcaatttcgggacaatttttctgatttctaggcttgtcttggtgatttaaattgtattgtcgcggctgacaaaaaaggaggaggtaccgtagagcgtattctagggtccgtctctcccagaatttatttttactatgggcggcgggatgaccttgctagcatggatgttaagtattcttgggagagacatcgatgagctggttagagaagccggatagagtcatctgtagctctttttttggtgatttcttttccaaaagttagtgtcaaaaactcccaatgttaggatcccactcatggtttaatggttatatttttgtttttgagagagtgaggggtagagttgtttggattccaaggtcagtcaatcttggggttcatgacctagctgtggggcagtaaaattttgttagaaggggatatttggtttccgggagaatacacccaaatgtacttaacagcttaattgagaagttctaaggaaaagaaaaggaaagaatacacccaaattttatatgaaaaacaaataatttgactgaagatctctgtgtacgcttgcatcttatctttactacagtgtatagtcatggaatttggactaatttccaatttacagtgacaaatgtttcatgagctgagaaaatccttctctatactttgttcttagcctctagattagattgatgttatggcggaaagaaaactaacattattctcatgtcatatttttgaggcctttagatcttttatggttcacatgtggaaactgattttctttcattagtgtacttgtctcaacttgatctctgttatctattactattaggagttgttcttataaggaatttatcaaaactaccaagaagcaactgttggtttgttggttcttccaaagtcaatgctacagctatggcttgcgaattcaacaagaactggggaacccatttgagagttggccatcatgattgtcgggattatacgaacggtaatgaatctctcttgtctctttctctgattattcaatcacagtgcctctattttattttctaatgaattccccttttggtagaaagaaagttctacatatttaatgacttaataagtgcactccaaagatcattagatataataattggaggagaatcaactcatttatttactcttgtttatttgcccatacattgtgatgcagcctactctagatgcactactacttctgatattgccaacttgttgaaagttgactaaagtagtttattgaaccttatttcttttatttctttgttttctcatactttataggattggttgagtacctaactggagaaaaacatgttttggagcgcttgaaaagaagcaataaggggtaatgcatcagtcatagtcattcagctacgagattgatgccaaacaaagttttaccttatttccacaaccatctataggataccacagtaagttatagtgtcagaactcacaaatttattttttgcaattttccactaaacttgagtggaagtgctgtaagtattagtcttgttctctgctttgactgggacatagtcaccatatgtataaatccctacacgtgatatccgtatatatgtatgttaagcaaaaatttcacatttagaatattaaaaataaatgcaaaacacaatttcacctatgccaaaattatagcataagagtttattaatttaagttcaacccat

SEQ ID NO: 14012 - DNA, 6052 bp, Cannabis sativa
aaaaaatagttttgttttatgttgtttggtaagcaagatggggaaattattttcttatatgaaaattactactattttatttatataattttaatttaatagttagtgaggataatttaataaatctacagaagatttgccttcttttattttttctccacttttgaatggatgaattttggtggcctcatccctatttttttccttccatttttccacaataccaaacataggttagattatacgaagttgtaacttgtaagtagtggtagttaatacggctaggcttctctgcttgtattgtatagtatttccttttttagctgaacaactttacttgtatatttagttatgcttatgctagtatgagttaaatgtctgtctgttactgctcatgtgagttgatgtgtttcagttgtgacttttctttttctctacagataatacaaagcttgtttagatcttaattcattgatcttgagctatttcactcaaacacttgttataatttacatggtatggtaatggtataaggtattcaaagaccctttctccttctctttgcttctttctctatgactgctgccactcaagattctgccagtgctaatgcccttcccagaaattccactataccattccttcccaagctttcaatcaagccatgtttgtcaaattagatcccaccaattttcttctttggcaattctcagatgaaagatatcattttcgcaaatggtgtcaagattttcttgatggctctaatgtagtaggatcagatatatacaaatatattctagataaatgtttactattttcttataatcaatataaaatagaaaacatcaaaagcatagttattgtgaactaacacttaaatacatgttacttgggagttttgtagcggaataaatgaatctcttttaattctgttctctattattttgtcatgtaaattgttatgaattaacaacaacagaagaacaataccaaagtcttctaaataacaatttaaagattagttgggcggcctataaagaaactttggttagcattttcttaccaaaaagttcaactctttctctctttaagcacctttgtttaattatagctaaagactaacaccatttatagaatacttattttatttttaattaattaaataaataaatgagagatatatggtgcaatttcttgcactccaatttaatctatgtgtactgccacttaagggtagattttgattttgaatttttgtttccaaattgacccaaaaatcaacccaccttcgccccaatctaattttccatctccaacaaagcatataagattgattttcactttatatgagacatgattaatctcaatgaagtttcagttcaatacattctttcagagcatcaagtagctgatattctcaataatcatctcctcccaaactgatctatttgaggggtggctgttaattaatctcgttaggcttctctgttagttatgttagctcatgtgagttggtgtattccaattataacagtattggtcaactttttttctataaaaaatacaagccttgctaagatctcaactcattcatcttgagtcaattcactcaaacacactttgtattgtttacaagtagttcatacaaacacaaatgaagaaaacattggaactataagtaccaaaggaaaaaaagagtaaaacgaagaataaaatgaatcgagcaaaggagattattaagtaaaagttaaaaaaaaaaaaacataacgaaaagcgatagtgggaagaaaaatgcaatggcattggcactttgttaagaaaaaaagttcgttattgttaattctttttagttagggaatagtgttttgttagttgctttttacagttgtaaaagttgccaagtttgttagttcaagttggtttgagttagtagctcatttgagctcttctttctatatagtttgtaattagtttcttccattgaatcagaaggaattcaattcattcacacttttaacatggtatcagaatagtgactctcgatttccagaaaaaaaaaactattatcttcttcgtcctttctcattgaagctccgttgctatggcaagtctttcgtccagtaccactgctcatcaacaagcatttagagaatccgttacgttcaaacactcattgtctgttaaactcaatgacaacaatgattctttgtcttgaactctgctcctccaaagtatgaaactgagcaggatcacgctgccaataacctctctcctacttatttagactgggaagctcaagatcaactcctcctctcaaggatgttgtctctccatgaacgatcagatgaacaccagaatgatcagacacgaaatgctgctaaagcttggatggcgcttcgagaattcttcatagctcaaaccagttccaagatcagtcaatttaagactcaacttcataatactaaaaaaaattcgttaacaatcagtgaatatatattaaagattaagtccatcgttgatatgctcaaagctgttcgacataactttcctgtttctgatcatgtcaaggctattttcaatggccttgggctagaatatgatgttttttacacttcctttaatatcaggaaagaacaagttagcattgctgaacttgaagccttactcatggcacaagatttcaagataaaaaaatctaccaaagaactcgacattttcaatgccgaagctaacttggcttaaaatggccttaaattgctactttggtaacaattgaggaggtaactacaatcctagaggtggattcaatagtaattttccaccccatgtcctacaacaatagagatgatgccagttcctcctcaaactgtggtggtggttgtggctctgtttgtagaggaaaatggaattctcagcaatataaattttgatatgtttattagttgtgccacaaaccagatcatgtggtgatccaatgctactattgatttgataaatcttttcaaggccttgcttccactagttcaccctcccttcccaccggccagatgcaggctatgatagctacaccagatactcttaatgactcaaactggtatgtagactctggtgctacaaaccacctcactccaaatgcacgaaaccttatgaacaacactgaataccttgttagggagaaagttcttgaaggcaatggttcaggtttgaatattcatcatatcattcattcttcatttaaacctcctttgcattctaagactttgactttgaaaaaaatcttacatgtgccttctatcactaaaaatctcctaagtgtatcacagtttacacatgataatgatgtcatctttgaatctcatgctaactcctactatgtcaaagatcaggtgtccaggaagatactgctaattggcaagctccataagggtctctgtatcttcaatcatactcaagttggagactccactcacagcaccattcctcattcttcgccccaacattcaactgcttttctttctatgcaaattgtactctaattttcaattgtggcatagaagattgggacatccctttgctcctattgtacaaaaaataatggctacttgtaatgtgccttcaagtaataaaactgttttttattttatcaagcttgttgtatgggaaaatctcacaaatcgtcattatccttatcaaatacagtttatacacaaccattacaactcatacacattgatctttggagagcaactccttaaacatcctctaatgggtactactacattagctttgttgatgcctttagcaggtacaattggctctatctcttataaatcaaatctgaagcctttgtcacattccagatattcaaaaaacaggttgaattgtagctctcttcgccaataaaagctttacattctgagtgtggtgctaagtttaagcccgctagatactttgtatagtgtggtattatttacactcagtcatgtcctcacacccatgagaaaaatagtgttgttgagaggaaacacaaacactttgttgagtctggtctgtctctactttctcatgctcaaatgcctttaaaattttgggatgaggaatttcaaaatgaaatctatcttatcaacagagttccttcccccaaactgcaatttgtctcttccctctatcttttattttataggcatctaactaaggctcacttaaggtgtttggttgtgcctgttaccttaacctcaggccttataatagacacatattacaatttaggtcaactcagtataccttcttggggtatagccttgtccataagggttataagtgcctcatcacaaatggaagagtctacctgtccagggatgtcactttcaatgagttttcctttccctttgccactcccacaaatagctccaccacttcatcctcttctttcatccccgtgtctgcatctccacctattctttctacaaacacattaccccctccaaacaccacctctcaatttgaccaatatcatgatgtgtctcacaccaacatgtctactatttccagtgctaacaatgactctagtccatgtttaccatttgacacgcagaattcaacatgttctccattaagcattgatcactctgctatggccattgatgataatcctagtgctgaagcatccctaaatactgcttccacatcaacaaattttggaccttctagcagtgctcttactattgtagttaatcaacatcatatggtaaccagggctaagaatggcattcacagacccaaagtctatctcacatccttgattctagctaaacatgctaatgtcttactatcagttcattggaactcagttatgcaagaagagactagagaactcattagaaacaagacctggacattggtcatatgcctgagagacaaattgttggctgcaaatgggtctacaagatcaaggagaaccctgaaaggtcggtcaataaatacaacgctagattggtagtcaagggctaccatcaataacttggttttgactatttagagacctttagtcttatggtgaagcctgtcaccatcagaatagttctaaccataacacttttttcatagatggtctatgataattatttgtggagagaagaataacaaataaaaaataaaagagatgcaaagaaattagggttttattcaattacaaggtcaaaagtgaaagaatacaactaataagaaagccttatataggcaactaacataaaagactaaaatgaaagaaaacactaaaataaccctaaataactatttaacaccctccctcaaactcatgatgttgctccaagaagcacttagagtttgcctaacagaaaacaaaaacaagaaattgtatgtgaattagtaataaagtcagcaagctgcaacgatgacggaacaaaaggtaaagtaatggtgcccaatttcagatggtgacgagtaaaatggcaattgtgttcatgaaaaactgaattgtgagcaatctgaatggcactttgattgtcacaatacataagagtaggacaagagtgagtaacacccatatccacaagtaaccatctcaaccaaacaatttctttagtagtagacgccatggcaagatactcaacttccatagaagattgagaaacaatagattgcttcttgctcttctaagaaataaaggaatctcttaaaaagatacagaaaccagtgataaatttttggtcggtgggatcacgaccatgatctgcatcacagtaagctcgttactccaaagaggagatggaaggcagcagtaggctctgaaagatggtacctcaaagatagcgtagaatgcgaagaactactagcccagtgagcagtattaggagaagcaacaaactaactaacaatatgaacaacacatgcaatgtctagacgagtaatagtgagataaactagactaccaacaatggtgtgatacaaagtaggatcttccaaaggagagccatcagaaggagaatattgaacattcaactcagagggagtgtcaacaactctagtatca

SEQ ID NO: 14013 - DNA, 4158 bp, Cannabis sativa
gatcgccgaacttgaaaaatatttttatttcacaaataactcatattatatccacatatttcaaataaatctccgcaattatcaaattctgcttattcatccacttatggaaaaatttacaatttatgttaaattaggttagtaggatcataatcctactcattactacctaattaatccataatatataataaatcttaattattcataattaagtttctgggatattacagaattagttgacgatccttctcgatatacttggacttacatgttacatgctaaatcagatgctcctgctgtcatttaatttttttgtactcttatcagcatacaacaccatctcaacataaagtatgttcattcagacaatgcaaagaaactaaatccaacaatttgttttttgcacaaaaaggtatcatccaacacaattcttgtgttggtagaccccaacaaagctttgttgtggagtgcaaacaccagcacctctttaatgtagctcgatcgctggccatacaatccaatctgccattagtctactcgagctacatgatcaaaacagtagcttatttgctcaacataacaccatctattctattcaaagatgagacttcatgcaccttgttgtacaaaaaagcctcaaggtatgaccatcttagaaattatggttgtcttacttatgcatcaaacatacataatgcacacaaattttccctaagatcaagggcatgtaaagtcactagctatcctaaaaaatatgaaagcatatacattgctggacatttaaagaaaccaaatatttcattccggggatgtaatttttaatgaaaatgttttctctctcaaaaaacaagatacaaaacattaatgttatcagtgtttccagcaagggacacatcgacgtcaggtcagcatttaaagtccatcagtgggcccaaagaaaataacttgggtcaagtccaagtcagatatgaccttccaggaattattttagctccataattagacaagcttctaccaaggatagcccgcacccggaagcagttctaccaccgtgatcccagggggccaaataacatgttcttagaagactagtctggtttccttttttatccaagcgcatagattaaggaatttatttttccttaaatctcggatagaagatcgtatcaagttaaaaagaaaaactacctaaaatgaagatcaatcaattaattcataattaattgatcataggacatagtattgataacttaatcgtatcctatatacctagttagcatgtcgaccccttcgtgagttaggcctcaagaagataacccaatcttatgtattttcatgtaaactccccattagagggaaagaaaaactaagtataattctcataatactataaatactcaacaaacccttcagattaggagttgaattcttttacaatatttactcatgcaaaaacaaagaacatgtactcatcttattcccaaaggctcttctagccaaaactacataataatatcgacttgtggactaagacttgttaacgtcccaaccacgtaaaaactttgtgtgttgttcttatttctttttctaaatcatttgttcctttagctctaatttattaaaattggttttctgaaaatctcgataaatattttagtgctttcactgagagttaaaggaagtagtgataccatctgaagattacgttcaacaaccatggtagtcacccaaactaaatgtagtcttcactttactggtcctagtactaaggcaggggacacaaaagatctgaatgaagtgactagtcatcacaagggtgaaggccgaaatcgagacgatcctatagttaaagatggagaatcaagagagaacatttatggtgatgttgaagatgatccccaggacacacctaaagatgatcatcatcaagacaaggctgtggtggtgctagaggaaagaataaactcaacgagtcagatcccgtggttattatatatggccagaaaggttcaattaattgaaaataagttatctcgacaaaatcaatttaatgtgaaactgctcaagaaaatgacgagaatagaagctgtgatgatagccctgaccaaaggaaaccaaactgcacaaactactccaacaaatgatgcttttaagaaggctgatcctaaagatcctggaacctcaaatcctcgtaaggataaaggaaaagggaaaataggtgaaacttcaaagaaggcttctcagaccaaacaacgaaagaaatctaaaattaccaaccaacctccacagaaaaagaaaggaaaccatgcttcagggcaaggtaactagactaattttggaggcagagttgcacaaaaagataaacctgacgctagaataaagaagcttactttctagaaggataagaattatcataatgatgctaatagtcaaagtgatgatgtcaatgaaatacattcagtttcaggtagtgacaacagaagtctctccataaacgatcttggaaggagattaaatgaaaagaaataaagagctagaacaaaaaaagctagacctcgcgggataatttgaggaatcatatcattgatcaaatctaggaaacagagtcttcaagtgataaaagtaaacgcttagaatgcaaagtcaaagagttaataaagctcatagagaaaatctccaaaagcaaaacagattgaatcgtgtccgattcataagaagaagacacaaaatcctgtgtgaaaagaattatagatgcaccgcttctggagcgcttcagaatgtcccaaatgaaattgtataaaggaaatatggacctcagggacctaaggctattaaatttatttttattaaaatatattactaaaaaataaaagtatttaaaataaattatttttattaaatacataatattttttttttattttgtttcaaaatatattttacatttattagatattttttattttcatggttttatagatattaacaaattacgtacctgtagagtttcatatttattatgatattctttctttttacatgtaatttaaaaggtattttcaaattatattttatccaatgcatactaattcatattttagagaaaaaaataataaataaagacatatgaaaaatattttttttgtatatcataaatttagatgtatttatgattgcaataaactagaatataatattattataattaaaatcttaacaatttataacactttaaaaaaatttaaattaatttatttaacactcagcataatttgtttacaattattttttgtcacatcattatacaattaatttttcttggctacacctataatatattgtgtccacttttgagacacttggtttgaaaaaaaataaacctatatatcaaatataataactattgtgttaagataaatatcattaaaaattaatcacacgatcaatttaattcaatgttaattacataaactcaaaattaggtttctatataaccacactaattttcccccaatccaaaatctcaaccaaattaaagtgtttagctcttaaatcaacatcctagtataacttctaacatgtttatatatatatattctcaattaataattataataaacatgctaacacattatttctaggaggtcttaatgacattattaggaaaaatggtcctacgaatataaatggtaaaaaaaagtgagatctatgttaatattccatacagactatagactaaaccatgtctagctagtgttgtagcaccaatggaagtagaaacatctagatcactatcatatatgttcaacaagctccaaaatccaattatcattattcgtcataattttcaaagatattacttactttgttacacaatattgtaaaataattaagttattaattctcctagagttttaatattcattcttgtcatattgtaatatgcaacaacaaaactaatccattttatttgtgacattcacatatataatagtaaaaaatcttgaaatgaaattgaaagaaactcttaataataatgtgtgttgaagattgcttgggtgatttgggaaagtgagttagatgagatcaagaaaaatcattaattaatttcctttgaaaagaagtactatatatatatccactgtaatgtttatt

SEQ ID NO: 14014 - DNA, 14663 bp, Cannabis sativa
tgaatctggagatatctcgacagaaacttgattgtagtgatcccaatagcgagctggaaccattcttctttctgaggtcgacaagatatgtcttacgtcgatcacacgtacacataaatcttttgacttgccagggttatgagcctcactcatgttagttggatgaagctataggaagtttcctcgtagcgagatggtcatctcgcattcttgttcttcgagccgatccgacttttacacttagtttgcttattgcaagctaaggtatgtgttacttttctccggtgcctcgctattttcttcagcgaaatatagtttctcgttaatacactaagtgccagttcgtacattgattcctcgcctaagaccttacagtcagcgagttacaaatatactctgagacttacgcaattaatgagttattccataaaaagatattgcaccaaatcccattccttttaccttgacacgtgtcctccagccgaatttcgggtataacatatagtatattatataatagagtttggaacttgacttttgtattttagatttaaaattaatgtattttttatattattttaacttaatgaatatagattatagtgttatcaatttataatttatatgcttgatttaatatatagacaaaattacataaaaattatttttttttttaaaaaaaattaacaagttgatcaggtcaactcgttgatccagccaactcgaacccgcgagctcaaaactcgcgaacccaaatcatttcacgggtcaggtttgggtacatttttttgaactcaaaatccgattaacctgttcgatgttcaaccctaatccaaatatgtcatattgggccttccttcttctgggcgagaacctgtcccgaactcagatgatctgaccttataatgaatgagtttaagttgttatcgaacatggagtcagagaccaactccctaaatggattgacccactcatttgggcttgaaatgaaacagatattgataacaagtgtgattgaaatcttaaaaaaaaaaaaaaaaattagttttcttaataaaaaaatgctacttttttcaaaaaaaaaatgtttctctattacatattatgctgctgttattaatattattaggtttatttttatttttattattaacaaacaaacaaacgtgaagagtaacggttccgatcgcatcccagcggagatgatttggtgagtggctgcacctgtactggtttcgccaccagctacgtcctcgactcctaagcccctcctcttcttttcctacaattctcttcagcttttgagtttccatgcttcttccaatctcaggttctctatacgactctctatttctttcgtttatttactactcgatttcattttcagcttttcatatttttattccacttcaatttgctcttatttgaaacgtattttaagggctaattaatcctggaaggccttagatgccgttgtttggggctccaaaatgtcttgtttttctgcattttcatttttaggatccaaaaatttaaagatctgttcgatcttgtttgacttgaaattgaattgggattacattgctgtgttgaacttggatctcgtactttttatattaaatttaggttgttttgatctctggtgtgttgaattatgtctatcgattttcttaaattagatttgatatatcttttgataaatgaatggttgattaatacattagccatttaaatttgactagaattccttttgaagctcattagttgaccataaccggtcataggtagcaatgggttgctgtggattttctgtatggagtgttttattacacctgagagacaacgaggaatggttctggagttggtgccgcaatggtggcaatggagttttattgttattatgctgctactttgggtgttttaatttttttttattgttttaagttactgttatacattatggtcatgtagtattggattgaatttaaattaaaagcataataggaaaaacatagaagaataaattagttgatcatttttcaactctaaattaggaaaagttaagttggatgtgaagttgtaattgttttcttcttatcattgaaatgcaataggataaaatcatcttaaactttctgatgggattaagttatgccatactaaggggatcatttagaatgtttgtttagttctttcagttctccctataatttcattacaaaatcacatgataaaattatctagtctaatgttgctcttcaaatggacctataagtatatgcgattgtgcagttgtgggtgttctttcttatatggaattacattgatgaaaagaagattggcataacattttctgtttgtaataatgcccaatgcatttctggctcctaatggcgtagacttatattggtcgtgcatgtactgagaactacttttattatgaaatctttgatcctacggttttattatttattagtgtagattcatggagctcttctttatatgttattgaacactatccgttttcatttctgtagattgtgaaggagctttttgcatatgtttctacactgtatcttcataagagtcagtatctcctagctacagttagtccttgggttctttcttaagaatattgcttcaaaatggggcagctaaagctgaaaacaggaatcaaggcaatggaagaacctcttcctgaatgtgatcggtattctagtaaggctactttatcatgcgtgattaattcagaaataggagctgtgttagcagtaatgaggagaaatgtaaggtggggcgtgcattatatgtccaatgaagatcagttggagcactccctaattcagtctttgaaagcattacgcaagcagatttttacatggcagcatcgctggcataccatcaacccttctgtgtaccttcaaccatttctagatgtgattcgatcggatgaaactggtgctccaatcactggtgttgctttgtcttctgtttacaagatcttaacactagatgtcatcgatcgaaacactgtaaatgttgaagatgcaatgcacttgttagttgatgctgtcactagctgtcgatttgaggtgactgatcctgcatcggaagaggttgttctaatgaagatattacaagttcttttggcttgtatgaagagcaaagcatctgtcatgttgagtaatcagcatgtttgcactatagtgaatgcttgtttccgtatagtccaccaagcaggaactaaaggtgagttattacagcgtatagcacggcacaccatggatgaacttgttaggtgtatcttttcgcaccttcctgatgttgacaactcagaaatgtctccaataagtggagtcaatactctcaccagggtaacaatgctctatttttttttttctttctttctcttcttggaagtttcattgtgctgtcaagtactggataagatgtattgctgatatgtgatgaaagaaaaacctaatgatttggttttcttatgtcaagaatctcttcatgtttgtaatataattatcaatttttaataaatatgatttcttttttctatgcagagttctgggttgaacagtgagcctgcatttgggagtaggcaatatgagaatggtaacatgacttctgaatatgatggtcaaacattatctgcaaatcttgtatccaatacttatgtacatgcaggagcagtaggactggatgatgagacagttgagactggatctggaaaggatagctcatcatatgacttaattctgatgacaaagccatatggagtactctgcatgatggaaatatttcatttcttgtgctctttgctaaatgttgttgagaatatgggaatggatcccagatcaagtactatagctattgacgaagatgtgcccctatttgccttgagtttgataaattctgctatacagttgggtggtccttccattcgccatcaccctacattactgtgtttcattcaggatgaactgtttcataatctgatgcagtttggcctgtcaacaagtccacttattctttcaatggtatgcagcattgttcttaatctgtatcatcatctgcgtactgagctcaaattacagctggaggctttcttttcttgtgtgattttgaggcttgcacaaagcagatatggagcatcctaccagcagcaggaggttgcaatggaggctcttgttgacttctgtcggcaagaaacatttatggtggaaatgtatgctaacttagattgtgacataccttgcagtaatgtctttgaagatcttgctgatcttttgtctaagagtgctttccctgtcaacagccccctgtcatcaatgcacattctagctttggatggtcttattgctgttattcagggtatgggtgagagggctgccaatgcatcagttggttcagagtgcactccatttaatcttaaagagtacactccatattggatggaaaagtgtgataattatagtgaccctagtcactgggttccatttgttcgacggagaaaatacatcaaaaaaaggttgatgattggagctgataacttcaatcgtgatcccaagaaagggctagaattcctccaaggagcacatcttttgcctgacaaacttgatcctcaaagtgtggcatgctttttcaggtatacaactgggttggataagaatctaattggggattttctggggaatcatgatgagtttagtattcaggttcttcatgaatttgcttggacttttgatttccaagatatgaatttggatactgcattgcgactgtttttagaaaaattcagactgcctggagagtcacaaaagatacaaagagtcttggaggctttctcagagagatattatgagcaatcaccacatgttcttgctaataaggatgctgctctcttgttatcatattcattgatactgcttaatacagaccaacacaatgtacaagtgaagaaaaaaatgacagaggaggattttattagaaataatcgaaaaattaatggtggcaatgatctacctcgagaatttctatcagagttgtatcactcaatattgaagaatgagattcgcacaaccccagaacaaggtgctagttttcctgaaatgaccccaagtcgatggattgacttaatcctcaaatcacagaaaactgctcctttcatattatcagattgtggagcctaccttgaccacgatatgtttgcgatagtgtcagggccaactatagctgctctttctgtagtttttgataatgcagaagatgaagaggtttaccaaacatgtattgatggattcctagctgttgcgaaaatttcagcatgccatcatctcgaagatgtacttgatgatcttgtcgtgtctctctgtaagttcacgacgctgttgaacccatcatcgtttgaggaacctatgttggagtttggtgatgacacaaaagctagaatggcaactgcgacagttttcaccattgccaacagttatggtgattacattcgcacaggttggagaaatatcctggattgcattttaaagctgcacaatcttggtcttctcccagcccgtgtggccagtgatgcaagtgatgagttggagctttctgctgaccgcggacataataaacctatcacaaattctttatcttctggtcatatgcctcctgtgaatcttcctaagagaccgtctggattgatgggccgatttagtcaattcttgtcccttgacacagaagagccaaagtcacaacctactgaggaacaactagcagcccatcagcgtacgcttcagacaattcaaaagttccatattgacagcatctttagtgagagtaagtttctgcaagctgaatctttattgcagcttgcacaagcactcatcttggctgcaggaagacttcagaaagggagcagctcgcctgaggatgaagacggtgcagttttctgtctggagttgctgattgcaataactctgactaatagggacaggattgtgcttctttggcagggtgtctatgatcacatctcaaacattgttcagtcaacagtcatgccatgtgctcttgtggaaaaggctgtctttggtctcttccgtatttgtcagcggttgcttccatacaaagagaatctcgcagatgaacttttgaggtcattgcaacttgtgttaaaacttgatgcccgggttgccgatgcatactgtgaacagattacacaagaagtgggtcgtcttgtaaaagcaaatgcttctcacatcagatcccagttagggtggcgtactattacatccctactttctatcactgctcgacatcctgaagcttcagagtctgggtttgacgctttactatatgttatgtctgatggtgcccacttgttaccagccaattatgttttgtttgtggatgcagcaaggcagtttgctgagtctcgtgttggacaggcagagcgttctgtatgtgcactcgatcttatggcagattctgtcgattgcttatcacggtgggcctctgaggctaagaaagctatgggagaagaggaagctgtcaggatgtctcaagatattggtgaaatgtggttgcgacttgtgcagggatttagaaaagtttgtttggatcagagagaagtggttagaaatcatgctttgttgtcattacagaagtgcctgacagtagtggacagtttacatctttctcatggtctttggttacagtgttttgatctggttatattttcaatgcttgatgacttgcatgaaattgcccaaggtcaagctcaaaaggattatcgcaacatggaaggaactcttatacttgccatgaaactcttgccgaaggtatttcttcggttgcttcccgatctatctcaacttacaaccttcgtcaaattatggcttggtgttctcaaccgcatggaaaaatatatgagggtgaaaattagaggtaggaaaagtgaaaagcttcatgagctagtacctgagctgcttaagaataccttaattgttatgaagaccaggggagtacttgtgcctagaagtgctccaggtggagaaagtttgtgggaaatgacttggtcacaagtgaataacattgctccttccttgcaatcggaagtctttcctgatcaaagtttagagcagtcataccatggtgaagcagcagcagatctagtatctgatgaatcagacaaagtaccgtcaacccaaatgtcatcttttgaaggtgctgctggtggaggttaggagtatgtatagtgtattggcaactctaactgaactcattgatggatgttgattgcaactcaagttttcttaaatttagttatgtgttgagatggtttcttttccagaaatcagaacttacagagtctgtacaactctttgttcatgttggttgggaaactttggttgttgtgacttaccacagcatgaaggtatggctatggtctactctttgtcaattatggtgaagtcaaaccgaggcaggtcggtcagtttttcaatgaggaccaaagatcattggtttttctgaattgtgagtttccattgatcttcttcctccgcgaaactttagagaagactttctacttaaatacataatgatacatatctttagcgccctagtcgtagagtgcccattttacagaaaattttaccttttatttttgtgttgtatttgatctataccagtatgaaagtgatccttatataattttgtattattgatgtacactgtacagaaccaagatttgtttcttagtattattttaagacttccttttatacttctatctactgtacttcctcactgctcatcaaatttgttagtgaattctttgaactagctccctctctcttgccctctcaattacggtcgatattcgagtagcacagttattcagcttcttgaatcttgatgctgctctctcacaagtgtaagttttcttcttaggaagtttgtttttcttacctaaagaaatattgttggaatcttgtactgttatttgcgaacaattgaaagtaaagcttgttttaaccacacaaaggctgtactatacatgtgatttagagtaggtatttgattcccaacaaactactgattcatactagcatttattttcaaaaccaatcaatcttttgttggctggcattacctttcttggattattatgaagctttggtcagactataaattccaggttttgtttctgcctattttggcctttttttgtgtgcgtgtgtttgtttctgggtttcttttttaaaaaagattctgctggaacgaaagtgaaaatgaaagttaaaaaatctcctaaaccaaatgctgggaatctttgctccacgacggaatccaactactcggaaaggaaaactaatgagcaattttccttatacaacattttctttaatggatagtagttattgctttgaccatctataaaattacatcacataaattgtttcaatctcaccacactataccaaaaaaagaaaatagactcttatttttaccaacatatgctaaacaccaaagttgaaaaaaggtcagctgagtccaaacgcccaaaacattgaacttcactttgtattagattatataaattacaccaactattttcgttcatatattcaaagacagtaacttatttattaatttaagattgaacaatagagataagagttacaaaattttgttatcatcaatttaaatacttctcaactcattttttttttccttttaatgttcatcaccacgcattttgtaaattcccaatacatcttctaatttgacaaaactactattttactgcactctattgtttatcacataaatatttaaatataatgtatatattatatttctttttataatatttgtgtatagcattgtattataaataatattactattatgaagtcaagccattctattgtgtctttctatatttcatgatgatactaaaaggataaaagtgtataaaatgggaaagaggacaaaatttatttctcctcgtaacaattaaatttattactagcatattgtgaattttttgtacaattttgaggcagaaaacaagtacaaatatattcttcaaaacaaagatgtatgcatttccaaaaaaaaaaatgtatatgtagagagagacattttatgattttcaactcgatctgcctaaataacaagcaaatatatataaaaaaattcagcaaatttttaaagtcaaatgctattttacatattcaaataatattaaattttcataaatacgtttttttcttacatattttatttatatttttacgatctatatttttcttttacaattatataaatttatttatttttttaaaaaaaagtaagtttaaaattttaaaattataaaaatatacaagataaactaacttgggggaataaataagatgaatgttcaggtgacaccaaactacctgctacttgaattaccgtagaataaggggagccatcttagaaaatgacttaacttaaaagacagatgatgtcggtgcaaggcaagggaataacttgtttggtcttgcggtgcactcactctcgttacgagaataaagaaagctagaaaactaggattgtctagaggggcttgccccacgacttcaactaatagtccaactgtgcttgacttgttatcaaaagagagtccaactgccactggaactcaaactcaaaccgcaggagaatggtcctagaaactcctccaacttcctcttctactcaaacttccgggaaggaaacccatccaagagaactagcaattcagcatattagcctaggaatggacaagatggatcaaaacttgcatgagatacttccttagcaagtaaataacagttaaaaagagattggattgaaggaactcgctcaataaagaatctagcataacttaagagggctcaaaggaaatcttccacggtctctagtgataaggctcccctacccctatctctaaaggggcctatcacttcgttcgtaccttcttggcttaggcttccaactgaacttactttatggccttgctgcccaccgtgagcagaagctaagtgcttgaaaagcgtgctaagaaatgtttgtgatttactagttgattcaaggaggatctatctttgatgattgtgaccaatatgctaaagattctcccgaccttttttaacaattacagaagcaaataactgctttaaaatatagattatgatttcaaatcaatagttcactaccgtgaactccccattttatttgaacaagctttgttactacgttactaaagaaagtgccatactatcgaactataggcgagcttctttagtgtttgctatctactttcgtgcttaatttcacatgagtagagagaggaggtttctgaaatggacacggactcaaaactccttgagcctatacttccctgaggctgagaagaaagcttagaattcgattggaacatttccttcaagggcactcataactaaagtactcccaattgtagacacggaaagggtctttctttagaaaagagggaaagcaagttagttacatctatgctaaatagaaaaataaaaaaagaaactcactaaaactgatttgtctgctcatctagatccattgccttccacatttccctctaaattatcgatacataaaagggtggcaaggtcccgcccctctttcttggccgggttaaaagtgaaagtcaccaaaatctagtggaatgctcttgaaaaaaattcacttgagggagacagaggagagtggaattttgtgtgtagggtgaaattcaaagatctacgaaggaacgccaaaagcgaaggcagctctctaggtccctactgacgctggagtgcaaaagcatggggagcaaaaaagattagataccctggtagtccatgccgtaaatgatgagtgttttcccttggtctatccagatcaggggcccaactaacgtgtgaaatactctacggagaagcaccaactccaactattcatgccatcatcattgggcttacaagaaagggaagcttccaagtaatattccccttgccttgtccagtccatggcagattcaaccttgagaagaataagcatggatgttggtcttgaactacgtgaaggctttagagaactgggttttttgcttcaactttagttccacttctcttgaagtgtaacactcttcctgcaagttttcctatccctgggagcttgatttcacactgacaggtttaaaggaaatggaatgctatttggggaagagacaggttcaccatagataagcatgaaggaaagggagtgctagccatctcctttctttctatatgttgattgatatggatattcataccttttctcaatccttttcgttatgttttgaagtttgtatcgcactaaagagaggaggtggcaccagatagtttgttggtgaagaactccattcataagagtgaactgtgggctacaaaaaagtgggattgcacctcagttgtacactcccattcttacatcccttattgatattgaactacgttcatgaaggaaccagacatttgacaggccatccctcttttatgcgccacttttcccttaaaggaaaatgagttttgttcatttgggcgcggtcagaacataaagatcaaagagttaactaagtatcagatcgacaaaatggaacaaatgataggtcaagatcacgttgtgcattgggaattgaagaggggagaacgagtagacattggacaattaatttctatttcttgttatcatggaatttatcataaatattgattgcccccgtcgctgtaactagctcatctatttactcaagttagatgtatcttaccttacatcaaaagtccctactcccatgtttctccatcacttcatgatcagtcttatgattatgagaaagattttttgatcctccactaagaaagggatcgtcacgacaactagatttgcccggtaaacaactttggggctccccatggtttattaaaagggaggggagattttatcttcattagggggagatgaagattttctcacacttagctagtttggctcgtgccagtgggtgaagggtgcacttcacattaaagttctactcaaaacctacttgacttcctcaatgatttgtttggatagaggttggaagaagcaggcacaaccaccaagtttaaggagtcaaaggttagtgattcttaacctgtgactatctcgttgctcttcgtgagccatagcaacaggatttcatagaaagaaagcattcgcagtaagcctagcgacttcctatgatcatcgatcaaatagcatcacgcttaggctctcgagccttaaatcaagtaagtcttccaaaagaatgaacgagacatacataagtcgacatagctccatgtgtatgttctttgtttggccattaatagaatgaaatgaaataatggtgagcctagttgggcgacaaacagggcttctcttcttcactcaaagaggattagtgaaaccttcattttctttgtgacagatggtgtgttgttgcactgttgcaaggtcatctttaaggccaaagaagagtcaaaatcaaatgttattctaaaggaagctcttttctctctcggttgcccaagagcaggtcaagtctatctgaccaaggtaggatgaaattagtctgaactaagccaaaggctagcgaatttgaattactttgacttaaatctttctttttttagttcttcccttcttgggccaaattcctaatcaaagcaggcaaatgcttcttaaattcattcatttcttaacgtagtttgtaaggcttttgggctagtagcttatgagtcagaagcctcttctctctctttcgtttgagtagtagttttctttgaccagatgtttctttttttttgtcctttttttttctttctcgaggccaccaatggggctttctctggggaaggagcttataacacttctcattctgaccttctagcactagcatgttttagactctatacatcgtgttactacttagcagagtcttgtgtttttaataaatagtcgctacccccttgtatgtatcactttcctaattaaaataaaggagagcacccctttctcccaaaattacagggtcattttactgagttcctttgacatggttctctcaagcgccttactatactctacttgctcacctacgtcagtttggggtacagtcagttcatcagggggatcgccctcccaatttgaagtattttcctaaaagttttaaccttgttgactatgacaacagtcgcgactataaacagactcatgtctatggcagggcagcttgttcttcactcttgcgaccctagtctaattaaaacacaaaggcccatactgaagattcaaaaaggtgagcacttaaatgaaaaagtggactcacgatgctgaacgacacattctaaagctaaagcacacacactaaaaagttctttgaaagttatcagcaggtgcgtagagctggagctcgtcatgttcacccactttaaagtcttcacctttagatgacaaaaagtgtctgccccttaggttgccaaacaaactatgatgatagtttctccttactctaacaagtaagtaaaccagtcgcgtagggcgaccgggctaggccaagtcaaaaaggcttttatgatgacatgaaaaatattcaacaaaagacaaaaacaaatccactatttattttacgtcaaacaatacgtggagtaactcccaatatagcaatacgtatcatgtagagcaatgtctagtctaaaatttacaaggactagtccagtgagtcctcctatggtgaacaaaaatatggtgtgagggagagatagctatgtctatcccatcccttctttggttcattcttttgtaagcaggagcgtagcactttacaggtgaaggtgtaggatgtgcttcttcccttttatagcagcctcttaagcctttcaacgatcgtttagctacacgtgtctgtttgaacataaatatagttagtgtgtcctaagttagtctgtacttcttaataagttaatatttgattcttttaagctatcctaaatctgactattttgtgtcctttttactttatgttcttggtatggatgtattttgtgtccccaatggtgcttttactttcataaaagtaccatttggggggtgattcgtattcttgataaaccagcatttatatatagatataggaagatttgtttgtcaaatctaagtttttgcctcccctgggttaatttaaaagaggaatgatattcttggatgatggcgaacataagatttatgttgagggggggcagtactttttttcgtaagtgaggggacattttttttttttttttctatattgtataacatgtaaaaaattgataaaaatttttattttagtattaaatgtagtataaagtaaaaaaataataataaaaatattaggttcaataattaagagactaaatataaatcaaacgagtagaggttcaaaaagtaaaattttaatattaaagtaaacatacttttattggaatagatttcatgacctcaactatgtatatgaaataactttaccattataccaaaacgtatttttttttttgatgaataag

SEQ ID NO: 14015 - DNA, 5887 bp, Cannabis sativa
tcgtaaataactttgtaaaatatatcccgctgctccggcttgaaatccttgttcaggtttgacaagccgaattcagagaacacgactggcttcttcagctctttgttaccatcttcaatgtgagatagcatccacttggagaggtatttcagtttatcttcaaatccaactttcttaaacctatcataataataatgatgaagaaaaattaatagtgacatatgatgatgaatgcacatatttgactaaaacccccctttccatatcttctcgtatattagtttcatttgtattctatgcttaccactgatcagggtatatgtgaacagacgcaaagtctatgttggcaatctgggagtttcgaataaaatcagctcccagccgggaagcccagtcttcagggttcacagacaacttctcagggctttttggaccataaaatccttcaagtcctatggtcaccaggtgacgattgtcaattgatttgatgaaagcagacatttcttctaaccaatcctgaagttttatgccatgaaatcaattaataaaatcatatttctaagcaacttgaaagatattgcccctcagttatacatgttaagtggcaagtccaagaattaacaacttacttggagagtgtcaccagaagcatctgtgacgcaacgtggttcattgattatctcccatccgaaaatggtgggatcatctttgtatctgatgccatttacagtattctttcttgtcaggatagtctgaaaaagagaagaagaaaaaatcagaaagagacaatattattatagcacatataacaattttcttgaaatgcaatttctatattagcaaagtgtttcgaataaataagtgatggtacatgcaccaccaaaatattacacacttattgggcagatattttcaactaatcatatttcattatatacacgtaaatattcattataaaaaaagtgacttgtagtagagtgcagaattggggcactagaggaacaaaagattcatttttctcaaagttaacctcgttacatgccatgctaagtagctctacaggatgttagtttttcctctttggttttcattagtttcaacttcaagaaattaacttttgtaagtcataaatgttgaattgctactaccactacctagtgcctattagtgaattatacaagattcataatgttgccacacatattttcatatccattaagtttaagcacatgcatctacctcattctttctgagacgcacacttagcatcaaagaaatcgaattccaacaattatggcattgtatctataccttagccatgcgttaacggaatttctactatgaatataaatacacatttacttcaccaggttatcaagattattattcatcagtttgcacaatcaacttgctaaactaacttgccaacaaaattttgatccttgttctacaaaatcattggtaagcagggtcggcccgggatattattggacccaagagtttttttgtgttacctaaagtggagtttaagtattattattgggcctcttttataaaattttacaaaagataccatactgcataagataaaagtatactgtataaaaatttggagaattacttcatatactattttttttaattttttttttttatcaaatttacagtttgagtttctagagtggtttctatgcaggttgctatacgatttttagttgcgatttaggttgttccactagttgcaataggggtttctatgtagaattacgtaaaaatgtaaaaaaaacttttgaagtgcaaaaataaaaaaaaccctaaaaattttgatccttgttctacaaaatcattggcaagcagggtcggccaggaatattattggacccaagaattttttttgtgttatctaaagtggagtttaagtattattattggtttattttgtaaaattttacaaaagataccattttttttactgcataagataaaagtatactgtatagaaattttgagtcttgggtttgggtgggccctaggcacgggcctagcccgccttagcccagggcctggcctgcgggtaagagtatagactttcattgtccaaaaaccaaaagcaatatcaaccatgtttgaagtacttaggtccttggaatgcttaacagttttactccattccattataccaattctgactaatactatggtaaaaattaactctcaggtgtcaaattcgttgtctagtttcccaaaaattaaacaaattaaagacatgaaaaaaaaaatatcttaaaatttagtcagcaagagctaactgagaccataagttggccccatgatgagacagcatatatttaagatcaaactcataaaaagatgactgcatacataagtaccttgacatagttcttgaaataatcacggatggtcgggtcgaagaagaaggaatcattagaagcacttaaaccaagcccttcttcccatgcccacttgacatattgagtctttccaccataagcttgcaagttattaaccagggcaagaagcagcctgattccacgttgcccagcttctgcaatgacataatccaaagcctgcagaccaagttcttaatctgttagagctagttaattaattttcttaacaccaaaaaggaaagaaagaggttactacaaagtttagggaccaaattaaaccaactcaaccatttattctagagctaaacttcgtatggaaaacgagtacaaatgaaaagcaagaagtgcaattataattttgacaaatggtactcattaaacattaagatcgaataagacagaagaaaatgttagtggtaccactaacggtaaattagcattcataaacaggtatcccacaccctaataactcgaattagtaaactaagtaaaactgataaattatttaataccgaattaaacatgattacctctcacatcaaacaagagatcggcaaaagaaaatgacttaaacagcaaagacatcttttttttcttcttcattttggggtcttgcaattaagactcaaatatcatcgtatgatttaatgtaaagcaaatccttaagatttgacatggaaaaacaaaacccagaaaggagatcgattatccatggaaataccttgaaaactcgctcgttgaagacaccaggggacatctggagggcattgtaggtaccatcattaaaggcccaagtacgacacacagtgagacccattttagatccggcttccaacatttgcccgacccgatatctactgtattcatccacagcgtggtccattaaccagtaagagttccagccattaatgtaaaaaggtttaccattaaccacaaactgagttccatttcttcctacgaagtccaatttcggtgctttgttgaaattgagcttcaccttcacgtcaccaaacgacatgtagatgaaaaccatacatgaagcaaatccaacaatgggataacacataccatacccagatgccattttctttctagacattattactttcagtagctgtagctgaaccaaaaatgtaaagcttgcccaaattgggaacaatccccaaaactccttttttttttggttaaagagctcctgagatcagcaatacccagatgagattttggaatcacagaaaagacaggttatgaatacacgtttctctgacagccagatccctttttggagagagagcaccaaaatagcttgaacaaaaccaacacaacaatgaagctcaacagttccacaaacccatctcaaaatgcatcgaaaaatgtatcttcgagtgagaaaaaggtttggagagattttctttctagtcctatatggacggctagaagatagggctttctcccttcacttcttttcaataatggaatattggaagtttttttaatataaaaataagaaagaataaagctcaaaactttaacatacccacctcaaaatgcatctaaaaatatctcattgagagagaaaaagaagggacaatggttttctttcttttggcagttgatgggaattaaattgttataacagagaaaaaaacaaaactcaatactttcatatacccatctgaacatgcatccaaaaaaatacaatctttaagagagaatattttgatatataattttgggtgggggtgagctgaaaaaaatgctggaaggtgagattttttgttgctgcaatttgtgaatgatgaaagtttttatagcaagggagcagaagtgtattgaagtcagttcaagaaatgagcaaaaaaaattgagtcaatatgaaagagaaagcaaagaaagaaaagaaagcacacctaacttgtctgtgtcttagaaaaccagtcaaaaactgaaggagagaagagatgaagcagagcagtaaaagcaaagacggtggaagtgggtgtgtggtggaatgttggtatcatctcatcagaacctcttggttaaatcagatctgtgttctaaagagattaatcagaaagagtcttaccacttacttaattaagattaataataattaataatgtaatcaacaagtttaatttagtacagtttactaccagtcccacccctggccccatgtgtgatatactaaaatcttttccactagatattttcttaatataaaaagaaaaattaaaaataaaatttttatgtcagttttaatgtagatcatgtaacattgttcaactttcttaattttaattggttttatatgtatgccacagacaaagatattcaacagtgctaataatctcaaaactaccccatgtgagttaaccgacactcccttaactttatttattgtttttctctatttttcatttctttttttgactttttgtaatgttcttccctcatatgtggctctactcacattattcactaatcactgcaaagaaaaaaccaaactattttttttttttaattttctttttcttttgcaagtaataactttaatttttttctcacttggtgatctaagcatatttggctatgtggggatagaaaggaaaaacaaccctaagatatgattaaacttatgataattgtataataattacactgtattattaactcaacactaaagccaatgtacatgtattttctgatctgttgtacaaccaataccaacaaatataaatcacaaaaagatttcatagtaattatatatttttaggttttagctaaaatctaaaaaatcatttataaaataaaaactctttaattaatttctttttggtgtagcaaatcagaatggatgactatcctaaacccctagaagaaaacaaacttcacaataatgcacaaaggattgggctcacctatcataataagagaagctaacaaaagaaagaaaaaaaaatgtcactatctgaccaaaagaagttattttgtgagagagtagggtcaccaactatgaagaccaagagttaccaagtcatcatcttggtcatggaaataattacaggaaaaatttatgaggtctagatatcatgaactaatggaaattatgtgtctaaaaagaaagtgtaagaatcccagtttgaaaatatttatgaatttgctgatttagacttagaagtaccacaatatttcctatgccaattcaaacatataatgagtcttgaatgttatgcgagtaataataataatgattaattagtctagcagaatggtacaatgatcttttagaaaaaaaaaatggtacaatgaattctcttggcaaaatcttgtgtactgcaagatcaactcctttccaactcattaaagcgaaattgtgttactactgaatttagaaaagctattatagtagtaaaataagaaaggaatttattggaaagagggtgagtattcaatgatgaagtattttatta

SEQ ID NO: 14016 - DNA, 2593 bp, Cannabis sativa
  modified_base (28)..(61): a, c, t, g, unknown or other
atatgatatataatccaattcaatatannnnnnnnnnnnnnnnnnnnnnnnnnnnnnnnnntccaaacgagcccttagtgtattattctagcttgcatcgaaattgaaaaactttatatgaaaaaaagaacggaaaataacaaaacaattaagcttaaagactttggtcttttgtttactagctgtcaacaaaattaaccgtcccaattttacgatttactgctcacacaggcactcacggaatagtaattaaggactaaaactaaactagctactcaagtcaagaatgagtaacattgaccccacggagtccacgtcacactaactacacacgtcattattattattattattaagtcttttcgttcttttttgtttcttgaattatgtctttgtatatagttgccacgtcagtaattagggagttagttatagtaagtcgacagttttctccaacggtttaggaatatattagttaatctctgttgaatgttgtaactaattcttcaaagttctctctctcaggctcatcattataaatactgcctcctcagtcaaaggtcatgagatcgaaaacaaaaaactgacccaatttccttgtttacacctcgaaacctctcaatcaccctcgaaccccagaaactcaaaccagaagaagatgatgactacaaactcaaattcttggtggttgtacaaatgggaaaagcagatggtctttattacttttgtacatctacttctgttgccggcagtgttatcctacagtactactgaagttcaaccgccggaaagtaagggaggatcagataatggcattatctttttaatcgagatcggcatattagggatgatctttatggggttgataatctgcaccatctacaactccctaaaacgaggaatcggaaagaaagaacttgataagcacttcccgacaattaattattcggatgtgagaataattattggtattaatgagactgatgaaacgcataattgtggggtgtgtatgagtagattactagaccatgaaaaaatgcgtatctttattcccaagtgtgatcacgtattccatgcagattgcattgataattggctcaagaaccacagaacttgccccttatgccgtgtcgattttttagacggacctgacaacgctcaacaccgacgacgacgaccgccagacgagatagaaatgcaatcccaatctcacgtcatcgttgatattgttgatgaattacaagaagaacaattagttacgcctgtgatgactagtactggaggcggctttctatcaagaattacaagcccatttctacggtctcgctcgactacccacagggatccggagattaacgctcagcgctcaattttgaatctgaccgaccaggccagggaggacttacagcgccgccgccgccgtcaattggaacgtccggcgaactaataagatagaccgaccggtatatgagtttttctgttaatattggaacaatttttcttttcttttcttttctttttacatattaatgtctatataggccaatgttagggcttcaaaggttattaattcagatacgtaatttgaatcttgatgggcatgcttattaatctttgtagctaatattgatttcatataataatatgaagatttttagtatcaattacttcattaatatatatgaatataatacaacagcttcgatcttgaataattaaagtacatgatttatttattgcgtaaactttttttaaaaaatgtctttgaataagttacattagaagaaaaataaactttttattagtttgtttaatattcctaatcaatattacactcatttaattaaaaattattgtattaattaataaacacgttcttgtgtatgaccatataaacgatggtttttttttttttttactttttattcaaatggaggtataattagtaaaattgttcagtattcgaataattaatttatcatttgtcatagattgcttttaaaattttctgataatgtgtgacattttgaaccggtaaaatgtacggaagtggcaattttaataatttgttaagggtaaattcaaccaaatgaattattgtgaattttatttgaaggtgagaaaagatcgaccttaggtgtaatttttgaatctgttaacaacttataattgatgctttcatctcctaaattttttaatcgatggcgcaacctttgtttctaaatataataaaatttggaaagtttttaaaaatactattttttatattttatttacaattttacgacctacaatttttatttataaaaatatacttttaaagttttaaaattacaaaaaataatttactataaaaaaaagtaagaaaacaaataaaaatcaaccagaaagcaatctcacgatacctataaatcaactataaataaactagaaataactaaaaaaataactttataacaattataatataactataaataaattaaaaaaatggtttattattttactgaaaatgtatttttgtaaataaaaaatttcacagagtaaaaataatttttttttcatattaaagtatttttgtagtttttttttt

SEQ ID NO: 14017 - DNA, 24508 bp, Cannabis sativa
cgctttagtaaacgtgccataaaagttaaaaattcatatataattaccacttcttatccaaacacacattatattttaaaatatagtgtaattattttttttataaatacacgacctaataattatacagtgacatccaaacacgcctctaatgaaatagtttccattcaaaaaagaaatacatatataaaactataaattatacttattttataatagtaatttttgttaattgtattcaacggctaaatacataaatctaaataaaaaaaaattgacagttggcaaactgtaaacgattataattaccctaatttttattatgtcaatcaatcattgatcaaaaataaaaaaatatttacatctatctaagtatctatactttaaggcaaatgaatttctcgattaaaattagtttatattatattattaattaattaataattaataatgcttactctactctgagtctggatttaaacttttagggcattttttttttatttttattattttttttatgctacaaaaaaataaaagaaaaaagttttgggaagagagaagctctgtgttgtttctcagctttcattcttttcccggaaaattcttgatcgaaacctttcatcttctcaagtcggtgatttttttttttgttttctttcaatctacttattctactgtatttttttttgtgctaacatcaattttggctatggcgatgatattcttctgctaatctacaatgagtttttgtgattttgaattgttttaaaatgtgttgattttctcttcgccttctcgcagcactgattctgaagctcgttactaatggcgctgtcagagtcagacctcccagcgatatactcgttcttgaccaactcattgagtggcgacgaaaacgttcgtaagccagcagaggaggctctcgctcagtgcgagtctaggcctggcttttgctcttgtcttatggcgagtactctctatctttttgatttgtcttttgtttcttcgttagaactgatactgtttgcttcatttttatgttgtttggtaatatagcgaatagttttatttttattctagtatttgttattattttgattagatttccgtactgcattgtaggaaattataagtgccaagcatttggccaatcaggtggacgttagattgatggcctcactgtatttcaagaacagtattaatcgctactggaggaaaagacgtgattcttcgtgagacactgttcattgttcttttggattttaatattaaaatgcatatggtgaaagtggtagtttttagagcttagaaattcacaatgtgtgtatttgggtacctgtatcagcccatttgattgaaaaatacttctatttatatacaatgcaatcagtttatgcgagtatgtgatctagtaaagcatttagtatctgcatttgttttcatgtacaatgtgaacatactgttttcaggggaatcagcaacgaggagaaagtacatctgaggcaaaaactggtatcccacttaagagaagaaaattatcaggtgtttgttgcctttgcttctatttttttttttttttgtacaaaaggggtcatgttctccctctatctctctaaatatatgtgatataaatttgtctgcttcatcatatatcgttcaagatttaccatcttctttgaattattcttcttatgtatttgtctttttatatattcattttagaggtgacatttttttagagaaagaatccaaccttaactgtgctcttcatttgtctgatacagatagctctcacattggctgtgctcatctcaaaaattgctcgaattgattatccaatagaatggtgaagtatttttttttacttcttcatcttcttttaggtcttcattgttcttgttgtaaatctgatgtttgttaaaacttttacatattttgtaagtattcatatttctctccaatttccatttaatgggggtagactggttgggtcatccaatgtccggctctctgtacaagaaaatttaatttgtgtctcagcaatttcagtctgagtttgtgatacaattttttaggagaatgttgttgtaatcatttaaaatatttagttgccctgatgtagaagttcttagatatgttttgctgtaattcttttttctttgtttttctgcgtggttttctcttccacactcgttcttataattataatattgattctagtcccttttcttatgaaaaatgaaggaacaaggaagaaatagttgcatttatttgactcttttacaatatgattggacagtgtttttttctttttttttttgaaaaagagaaaagtcttatgtcttagactgatctccacccaaatttaatttgtgctagaggaaaaccatggtattcctaacaaataaaacataggattcaagtgcataaaatagaacaattaatgacaaaagttcctaagtcagttgtatagtatcttggagcaagatacacccccactctctagtgagatattggaaggaaagatcaacaaaacctctggttttatccacgtagcaccgtgagcttggacagtgttttgattggttaatagaagtcacaccttaatctattttaattttacagtaatatgattttgaatatttgtttaacttgctgtataaaatctacaagtttttatagcatgctatatataggatctgaatcattacttttcccattttgagcattcatgtagtatatgatgtcatgatcatctgttggatgtgatgaattatacaggccagatctcttttcagttttagcggaacaacttcggtcagcagatgctctctcttctcacagaatctttttgatcctctttcgaaccttgaaagaattgtccactaagcgtctaatagatggccaaaggacttttgcacaggtaaagagtactaatgtcactctttttcccgttaaagttttacatccttattctttgaggtgattgttttttgtaactatttttctgacattacatgtatgtgatgatacttttctgggcctggctcgtaatgttctttgaactcctgctgctcctctctagccaaacatagcttgttgaattaaatcaacgtatgaaacgcatgtcaattatctgtagaggcatatgggacttgaccgttgaattatatagttgtattttgaaagtggcaaaggtgattgataataaataaagttgtttctgggtaggggatgaggctgttgattttaaaccaaaagagtttggtcgttttggagttataaactatttaaaatgtaacaatgcgctgattacaaaatgtcattccaatactatgagctgtaaattaggtaatgggtaagaaatgtactcataaattggtattgcaatttcatcttaaaattatatgtactccactttctttgtactgatgctttatagaattgcatgctttataagaattacaattgaagaccatttttagtttttagcatggggtagctcaaatggtcagacacgtggtttgccaccccaaagtttgaggtttgagtccctcagtttcctgttcccccaaatgttattgaaataggcggggatcctagtttcaaaaaaaaaaaaaattgccaaagactttaaattctgaattatttatgccaaacaccgagtaagagtattggtgaaataaagtttttcatggtttcattttctactttaatttaatagtcatatagggctttgaatttcaatattttttttacatctgatgatgtgttttattggcagatatcttcccatttctttgattatagctggcagctttggcaatgtgacgtgcagaccatattacatggtttctctacactttcccagagttcaaatgctctagagcatcaagaggagctttatcttatatgtgagcgttggttgttatgcttaaagatcataagacaattaataatttctggatatccaagtgatgcaaaaagtgtgcaagtaattaatttctccttaagttctctttctcacattgttggtcttttgtgtgtttagcagtttagcggacacctcttgcagtttaactgtaaattttgattgtaaattttctttgtctacttcaggaggttagaccagtcaaggaagtttctcctgtgatcttgaatgctgttcaatcatttcttccattctgtaagatattgtttatttatttattttattcaagctgttatcattattagttacatattgtaaagccactccagaaatgttgttttcctccacaaataattctaaataactacttgattgtaaattcatattggaccatgttaaaaatgactcaggataatgttgaagaaatgttgacactgtattttgatgggattaaatatggtacttgtcttctttttggtggttttctttataggactaaaaagctatacatttcattttgctttggatgagtgtttgtcttccttactgttaattgcctgtaagagtatgcttttcataggaaacaatattcacccaagatgggtagagttcaaaataatcatacatacttagtttgcttccacaaagtttgagcttcgagtccctcctaggaacctacatagcaattacaataatttctggtcccatatattatagagctaggtgagtagtctagttttcaaaatataggaaacaaaatttcttttataatgaaaattggattagaaaggaaagatgacaaggtatccttttgtagcaatttttcaaaatgacccaaggcagactagtgattttctatgtctctttattaatggtatagcaacacttacagatccactattccttttttgttttttgttatattttgtcgactctttgggtcttcattatattggagaagtttggtacccaagatgggtagctcaaacagttaggtatgcggtttgacttcgctcccacaaaatctgaggttcgagtccctcttaggtacatgcttagcatttgccatagttttctggtccctatacttagcatttgcgatagttttctggtccccaaatattgtagggttcattggggagcttagttttgaaataatgaattgaagatataagttgtaaattaaatttgttgcaagttgcaagtaatattaaagagttgttgcaagttgtaagttgcaagattatgtagtgctttagctagaaggaatgattggattatgattgcaagttttatctaaacaactgcttgttttttcatgcattatttggcagattcaactttacagaagggacccgctaaattgtgggacttcataaagagagcatgcattaagttgatgaaggttttaattaaaattcaagaaactcatcctttttcattcagcgataaaagtgtccttccacttgtcatggttttctgtttaaataagataacagatcctgaaccagatgcattatcatttgaacaatttttgatacaatgtatggtaatggtaaaaagtgtgttggaatgtaaagaatataagcgaagtcttattggtcgagtagtcgaagaaaatggagtaacactagagcagatgaagaaaaacatatccaatgctgttaatggtgtcctaacttccctcatgccaagtgatcgcatactacttttatgtaacgtgctaataagaaggtaatggtattctgacctttgctataacctgatccagtttatcttttaacatgcatgtgtactcttttaatgttatgcttaactatgttaaattataggatttttagataaatgcccctgagtttttctctgtttgtcaatttagttcttgagaatttgttttgtggtgattaagttcttgagttttataataacagtagtaattgagtccttttagttaattttgtcacaatttttttagtttttgaatgatttttttagaactatttggaggtgtataatatttacgaaattttaaaattatctataaaaaatagaattttgttaaaatttatttaaaataacgacttaattgttactatttttcaattcaagggcttgattgtcaaaagcaatttctaaggcactaaattctcaaacaacaaaaaactcagtgggtatttatgttaaaagccctaatatatcagtttgattacttggaggcatggtccaaatgtgatatttcttgtaatcttttgggaaattttatgtgtaacaagtcacttggtgctttgtcatcatccacatttatttgagaatcttctgggcacttctgaggcagaaccttttatccaggcttaaaaaaagtttataattttttttctcttttatatgcatcatctagtttttcacttttgagggaaacctttctccttgtcatgaaaagttaaataaataatcatttattgagtgacaaactactcaactgtctagtcctccctgacatatgaaacacaaaataaaattacaaaagatcgtgccaatctctattaagatcagagaaaggcacattttttaaactcgctaacactacacagccaaatagccacccagtttgattcaatcccaaagctgttcttcgttgccttattctctttttcctttctaaccaaattgctcaccaagtagccatcacccctggtctccatagcagcttcttagttttaataatgttgatttctacaattctttggtatgcacctcagaatttttaatttcttcagaagtatgaaccataacggaaaataataaaaacaatgcagaaatacctgcttcttttttttctttttttttttggctcgaaacacaccagcttgagtaaagcacgcattagggtcatttttttttgaagagaggcatgaacatttaatttccttgacacaacaggcaactaaacaccttcacttaggaggcgtagggctagatctttaccgtagggaagtctctgtaatatgcatctccaccttcactaaagagtcagaattaggctatagtacatggttgtctacaatgatattattaaggttactagtaacagttaatgtgctgtaaaatcatttttcagattttgttcttactttttgattaacttaagcatctgttaagtaagtacagtggttgtgattattgcagacagttagtttggacatttcatttgaactgtcaccttatatttctacaggtactttgttttaactcctcatgatctggaggagttgtacaacaaccctgaatcatttcatcatgagcaggatatgattcagtggacggagaaattgaggccttgtgctgaggctttgtacattgttttgtttcataaccatagtgaggttggtggtttttttttattgttaatgtaataacccaaaatgttttctgctaaatagattacttaaattttcttttgtcttgagtaaataattatctactttttttttttatttatatttctactttgtagcttttaggtcctcttgtggtttcaatccttcaagaagcaatgaatggttgcccaacatcagttactgaaatcactccggggctgcttcttaaagatgctgcttatgctgctgctgcatatgtttattatgagctttcaaattacatgacctttaaagattggtccgtcaattatttacttagctatctattttgtaactaacttgttctctttctaaattagaattgaataattgctgcatttaaattttgtgttaattttccatgaggggtaggttgagtagttaggagatttgctttcagagatctgtagtttgattcttctatgtagcaatatgtgagttttctgcactcccaattctatgcattcttttattatagaatctgtgtggtaagcgattagaaaagtttgtacagagagttcctttaatgaatctcagtatatttcttggtttcttttcaaggataaaagtagtagatacagtttgtactctcttgttgaaggattgtaatattttgctctcaacatgttaaaagtgcctgaatgcccccaactgatagcgttaattgttttgatgaagaataatggctaggatatgtgttcacacttttagtggctaggttcaaagcaataattatgattttattgtagaattggtctgtctggtcggttgtctgtttaagttagcttatagtttgactctaatatcttcttgggtttttgttatatttgcatgatttcatctttctaatgtgtaaattttcaggtttaatggtgcattatcacttgatctctcaaatgatcatccaaatatgcgtatcatccatcggaaagttgcaattgtattgggacaatgggtttctgaggtgataattctatttgatttccctattataaaaatattttgggctcgaaggagcagtacactcacataaaagtttctcctggattttaagtggtggcaagtgcaaaaaatttgttaattgcagtgttttcttgtttcatgctgtaattgcataaccactgacatttaagaaatttaacagtgtttctggtcagtgaacctaaattaggagaagtcaaaaaatatatttttgtataattgttttaccataccctattagaagaagctgcagaatatttttatatatatatatatataaatatttatatattagtggaatttctttcttttactctagagagaaaggtgcatgttaagatgaattttctacctcttgtggttttgtacttgtaggcatttttcccattgtattatatgcggtacctttgatataaaattagtctttaatataattggttcttttgtttgtgttatggcagattaaagatgatactaaaagaccagtatactatgctctgatcaaattgctacaagacaaagacctatctgttagagtatggtgcatagggcattattctcaaacatgctattttttattttttccaaaattgtattacctacctagttcaatggctaagcttgtgctttattggcagttggcagcctgtaggtcgttgtgtctgcatattgaggatgctaactttttagaaggagcattcatagatcttcttcctgtgtgttgggattcatgtttcaagttggtcgaggaagtccaagaatttgattcaaaggtatatttttatagctgctgtggctctgcagtgatactattatatttttgttgaatactggatcttcctgccaaaaccctccaaggtttgggatatagatttggattatgcaaaagcaagatatctgcaatttgcaaagaggagatcgatctcacgatatctatttttgtttcattatttacaggtacaagttttgaatttgatctccattctgacaggtcaagtcaaggaaattattccatttgcaaacaaattggtgctatttttccaaaaggtacttaattaaactttcccagcagtcctacttttctaactgctgattgtgtatattttttttttttgaataaactgctgattgtgtattattttgttttatgccatttgataaggaaactgaatatttactaaacctacaagttataatttagacgtgctatttgtttttaggaaatattgtggagagtaaaaattgcagatctcacttttcttttcccttccacacccttttctctcaccaccaaacgtcccgttttactcttatcttgctttacccttgctttcctctttacaaatcatgttggataaaaaacttctcatatactagtacatgtatatatatattttagcaaattacatatgctgtgtaaaatccttggccatctactttctatttttaatgagcaacttgctacagttttatttactgtgatgtttttattgttattattattttgcaaagagagaaaggtcatatgtctaagcctgaactcctcaggaaaatgtggtaacaggacaaatgcacatacattagaaagcttaacattatacataaaattacataagcctaaagctctcaatacatcaaataaacacaaatagcaatttatctagtaagtgtttatacttggctaagagcatttcaatgctaattataattaatgcattgttaaaataaagcacatttctaaaagtagctacacatgctaaatttgacacagaatttaccatgatgcaaatttgaatcaaataatgaactttatataattttctgccgttataattattatttttagtatctaattcattatttgcattaaatgtaagtgtaattttgttttcattacatctatgtgcaagcacaattgtgaaagttgtgcctaatatattagtaattaactttttttgtgctaaagttagcactatataatgggagatgtgctaaagttgtgctaaagttgtgctaaagttagcacttctggaccctaattgggactaagggttaactgttccttatttatatgcaacttgagcttttattttctcattgataactaacaagttttttctattaaaaggaaaatgtgccacttgaggctaactctagttgtaagtgagtgcgtgtgtgtggcaagaggttcaaatttctgtaaatgtctcttataaatcttgatttaaagtagtgtcaggcttgatattgtaaatccaactggctgcttgagagcatccgagtttaactttggtgactttttctagtatgttccttataagttcatttcattgttagagcctattgcatcagaacattttgttctgcaaatatttctctgtggagttagatgttgaggactgtagataatctttttaggacggacgtgaggttcaaaacaccttgcagttgataatataaattaaggataatagtggttaaataataaggatcttattctgcattggtcaacactcgaatatttgtttaatctcttattgcttggtttcctgagtttttccataatgggattcatagttgatcttgcgttgataccacagttgggctatttgtgcatggtttttaagttacaggattttatggtcgatgttttattcattcttttcaaattgttccttgacagggcatgctaagcttctcttacttttctgattatttattttattttttttaagttttgggaggaatcttctggtgagagccttctgcagattcaacttctagttgctctcaagaactttgttgttgctctaggctatcagtccccttgttgttacaatatgctactgcccattctgcagaaggggattgatataaataacccggatgagcttaatcttctagaggacagcatgcaggtcagctaccatttaactttatccttccatggtcttctattatccttttattctactgtaccaatatatagttagcttatttgtgcagttatgggaagccacactttgttatgctccttcaatggtgcctcaactattagcatgcttcccctgcctagttgacatcattgaaagaagttttgaccacttgcaggtacgatatgaatttgtctttcttatgattatatctgaatgtatggtatcacctattttagaaccatgacaccatgtagtcagaacaattgtttattttataagaaaccaaatttcttatgagatcctggatattgttaacgtataggtaatacagggaatgtaggtattcaaactcagtagcacatacacttaaaaacaaacaataagaaaacatagagaagttaaagtatattattgaacgaaaagacagacaatactttgggtagttgagtgaccaaaactcccaagagagatccctctcattcttcctacttcttatatctaccactttattcaactcatccattatccctttgacgatggtccatatacccctctactttgcatcatcctttgtgaaatacactacactcaagcgaagtacttcttagtctcctttgtcagtacccatcttagtatacaatacaatctcttctcaagtgcactaacaagctcatcagaaaaccaaattctactcccttcaacacaacacgacacgatagtaatatcaatgtcatgatccatcatctccgcatctttatttgcattcaagctagcatgattccattgtataaattacatttaccaagtgaagtaacctaaccttatccacacccgtttttctatctcattttgtatctttctttactaagcccccgaaattttgaagctttgttgtctgttgtccatttagcttaacctcacatggatgccccaagagattcaccacaaactcggtagcgtagcccaagtcttaaaactccataatagagtctattaataacaaatgccaaagtgtacattggttgggatttagcaaaaaaccataaaccaaaccaaatcatatccaagacttgtgactttatggtggataagcttaaaaaccactaaatccaaggaataatagaatgaattggaagtacacttgagaagagatttgtattgtaggccaagaaggggcttgtatcatcactaagtaagtcttgaatatcacccaactatattggtcatcatttctttgggaatagccactggcaagaggcatcttaaatacaagtgccgaagcaatattaagttgagatattgtagaccgaactttagtgcaaatttgatatcgtgccaatagttatggaatcttctcgaatttccatggatgatgctagtgttataggtgggaggattgctatggttatcttcgaggtacaatgaactcctcaagagcacttggcaaggcaaatccttcaactacaacaactcttgcctatcatttttcgttgtctcgtcccccaaaatatccttcaaagatcagaccaagtaatcgatacctttctattcacatctttccatttctctagtcccatgattccctcttcctctgttaaaaatccaaccatgtaatcgtatcatcttcctttgtttgacaatcaatcttaggaatgggccttttgcctctttccatcacattgttttccaattcagcaatgattgtcgccattggaatctcgattgccatcgtgactcactaagtgatgagtgcacccaaacccaactagcccatcattttcttccatcatgggtggtgcatggaagaagaataacaaacccctaggtcatctaaagcacactcaagtatcaagaggtgagaaaacaaagaaatcaagatgtatatcagtttaatatttgatatgtggcccacttgatattaaattgtttttaagggggaaagcccactccaatagctccttgccgaggctttcaagcgttgcctatgtcttgcactattacatggacctggtgtgccacccaccttggaaaaagaattattaaatggaaagacagacaacactgctgaattcatcacacttacatgatccctttcattcttcctattctcctatatctactactctattctagctcacctgttacctcaattataattgtctacctacccctctattacataaactatcaatattcgtgttctattattttttaggaaaatttttgcttagtatgtttaaatgtaaaacatggtgttctaatataccacccaattagaaatagtatatgtatacttttaatatcgttttctcttaaaaataccccttatattttaataaaacttctctctctaactcttcggcgttgaaccccaacccagaactcctgtcgtcgaacacagaccctgaaccccagtcgcaagcccctgccatcgtcttctcacggcctctcgtgttttgcttttttttttcttttagttttccaaatttttgcgatatttagcgatggatttgcaaagatagaccaaatttgaggttagggatgaaatttaacgatgattagcgatatttggcgatattttgcgtagttaacgatgtatttgtgatatgagactaaaaaatgcacaacacatcgctaatcatagtggaaacttgagtgtgattttgcgacatttagcgatgttgtgaattagagacatttagcgatgttttgcgatatagcgacatttagcgatgtttcgcgacatcgtcaaaaaaaaaaaacgagtgggttgagagctccaacgatgggtagggatttcaggggttttggggtggtggagctcatgaattttggggatttaggtggagacaacaagacttagttgatgtgagagagttagagagagacttttttgcaatgtaaggatatttttgagaagaaaagatatttaaaaatataagtatcttattttgagttgggtggtatattaaaagattatgctttacatttaagcatgctaaaccaaattttccttctctaatgacctaaaaatgaggataaggaattctcaagagaaggattcaaactagcaggaaaaaaacaactaaccactgctaaacaaagttttttttttcagccaagagttaaaaaagttgaaaacccttaaattcttttgcctttgatgcccaaagagaagctagaaactaaatcttttcccacaaaaatgctgctgctaacactattctaatgcataatcttttcaccatgcttctcatgtgctgaacattcgcttttagctgctactactttaaaccatggtagctttcctgagtatacctgtaattaatgtaagcactcagtacgtaactttcaatcttgtaattgtagaaaatgctgacgtttctatagagttctttgtgcatttatcaagatttttgaaattctcaatggaactctgggttggccgagttggtaatgatgccattggcaatgctcagtcagcacactattctggattcttttgtctcaacatctacagtagtgctcatggtctatatggggggaatgtttatgaagctatggattatttggattctctctaattcttcgtcttagatataattctattttccccagggttctacttctataatcagtgtcttcatgctgtctaaatgcaacattcctgttcagcaaagattctttaatttctgaaacacccaaaatctaaaagaaataacaagaatatttgtaactagtaaacacagaagctcttgaagttgaagtgattatgtgttacgcccttgatagtagtctcaatataggattttggaggctgagttgtcaagttcttagtgactgggatgattgttacttagattgctattggttggctagttaaagagtacttgttagcctagcctacaaattcttagatggagtcttaggagaggatcatatactttgtgtgaattgtttagagtaagatattactcagggagtttaccaagttccgtgaataaattgggattttgtatctgttcttgctcttatcaacaaacttgctttcgtgaataactagctttgtttagaataatttaccaagttttgtgaataacttgattgtatattttatatccctcatcattggttactgtttctgcttgtgtgtgtttgttctacataacgttgaccacaacttgtttccaggttagcgtcaatataattgaggattacatcattctcggtggaatggaatttctaagtatgcatgctgccagtattgccaaacttcttgatttggttgttggaaatgtcaatgacaaaggattgctttcaatccttccagtcattgacactctcatacaggtaatttttttcagaatatcaagggaaatggatagtataaaataggggtgtaacaccctgattttccgaaatgttacacaatagttcgtataaaataatttaggataaagacataaaaaacttttttattgaaaaacaactaagcatgagatctcattattttaaaaacaaaatattaatttattcataatctttcaaatataaagctttacaaaactattcgaatcataattttaaatgaaataattaaaaccaaaacaccgtaacgattccctaacaatccatgccttgagctcgcatctcactgtttggtttttcttttacttgcacacagagtacccgtgagttaatacccagtaagaagagctatgtaggacataactcccctaactagataacataatcattaatggaatactatgagggaaatttgaatttatatgcatacatttggtgtatattaaatttttgaacacaagcttactaaaattaaaaaaattggcatactttatattcatacttattatacccttctctcttttcttctatagtgatggtggtctgatgttggcccgatgctacccatttttttatgtttttgtacataaaaatggtagcatcaggtgaccatcgaccactatcggaccaccatcggaccatatctacatttatagatgttaagctccattcgttaagctcgtcaggaaggcatcgggccaccatcggatcaccatcgaaccccatcggaccatatcatcgggctaccatcggaccttcgtcttcaacctttactcattttaagaacaggatggcatcggaccgaccaacaggcttgacaaaaaaaccatttttttgccgaaaattcggatctggccattgttgatcctaaatctaacttctactcacagataataaacattaatcgtacaatttattcctttgacaatattgccgatggtgaagtcgtggttgatggagaagtcgttgggtccgcggtggtcattgggtccgtgggtccttgggtctgtgatcatggtggttgtggagagaagggaccaaggttgtaggtggtgggttgtgggttgattgtgtgctcctctgtgtgcgtgagagagggagaggtagagagagattgggttttaggaaaaaatgacatattctaccaatattaaatagtttaggtttagaaaaaatttggtccaataaatgcataattagtcaaatttccttaccataataacaatatcttaatatcaaattaatacatactatgctcacatacatatatcaacatatcacattgcacattattcctacgtatgatataatatcatatcacaatataaacttaatgcatgctatacacacattacatagtatcttatcatatattgtcctaacatataataatttgctcccactcatgttaatcagacatgaagtataacctgccttgtcttgtgctgttctcacacttggcatccaactaggcaatcctttatcacaagttgtactaacccatgataagataacctataagtaaacccatacaagcagctggaagtatattttgcaagtgctatgctcacacaagcaacaaaaaatcttatcctacaagtgctattctcacacaagcagtcaaaaaatcttattactattacattctaataatactaacataaacaacaatctataatacaaaatcttataagcacataaacaacaaaccacattaaagtcgtatgtttcaacatacaacctgtgcacaaatgtccacttttttttttttttttttatctcaattgctaagtatatcctttttctctccctcgaatctcttgtagagtttctttgttgagaacaggatcctagacactcaataacacaataacacttaaaacatattcaagcataataataatcaccaatattattatagcatattatattataaattaacacattaataataacaatatttactaatatgaaataaaatgacacaattatttaatatacttaggcattatgcacatgtcaataaaataaataaataaaagtaattttattgtcacttaatctcatactccactaaactcataaatatccaaaatgactaattatcctcaatggcaaatagaaaaactaaagttcaagaaaattacaaaattactcttaaaaaatggatattacaagtgggatgccttgagatgacttcgtttcttctcgttgttttttgttataagtttttttattaataaaacaagaaaagagaatttcagtaaaagaattctcatttagatgcatttagatgctacatagttggtcgccatctttcagagattatgattgtaataggagcatctcatcgtcgtaaatgtatttaaagaaagaactttattctaaaaataactttattttaaatcaaaataagtagaaaagaattttgatttttaaattttgagaggagaaaaaaggaatctctggagattggtggctttttctatatttatatattttgatcatcccttgtcattgttcccccttcgtatatgtatttgaaacaaatatcatatatacagtactatataaaaaatattatttggtgacaagactcagttaaagtatttgcaacaatttactttatgtaattcggttaactctgttacttatgttgctatgtgcagtgcttcccaatggaagttcctcccttgatcagcagcactttgcaagtaagttttttcttgtctattgtactactatttttgaaaagagaaagaggtcgcttgtcttagaccgacctcccccgttatagtatattgtctatcgtactactagttttaagtattttttaatatgtttcactttttaaggtcttctatcaatatggacttttttatgtttctagaaattaatcgtcatatgtctgagtggaggagatgaatatgatccatccaagacagccgttaaagcatcttctgctgccatcttggcaagaatattggttacaaataccaattatctaggtcagttgactgcagaaccatcactttccttgcttcttcacaattcaggtgtctcaaccgaagaaaatgttctttttggcctggttgacatatggcttgataaggttagcaacacgttcttctttatattgatgctgattgtgagtgttgttggaatttctttacttttttttttctttcagaaactaattgcctaaatttagctgtaaagatggttattaatttgggagttgaacttacttttgttatttagagatgctcttgttcaattgaagagcaaaattaacgtaatctttgtgtagatttggtctctttaggtgccttcattggtgttatgaagattgcattttatttatggactcactgctctagtttctttttcttcatcacacaaatttttgtttggttcataggtcgataatgtatctgccattcagcgtaagacatatggcctagccctgtcaacatttctgaaacttggattgcctaaaattttagaaaaacttgatctaatcttgaggtatgagtttgacagtaaaagcttgttcatgtaagttataaatctgttctgtaatgatgcttatgtgtgtgtattatgtgtagtgtgtgtacaagtgtaatcctgggttgcaatgaagatacgactgaagaggaatccaggttattactacatttactactacctttggcatgtatgcgtttgaattgtttgtaaagttattgaagttcttctttttcattcagtaacagtggtgataatatgggctccagcaggcctcatggtgaaggcaccattccaaataaggagttccggagaagacaggtagtttacctggcaatgctatttttttttattggaaaatctgtttctggtgaatataatttaataaacttgtcgtaccgtgtttcagataaaaaattcagatcctatttatcagttgtcgcttgaggcgtcggtgagagagaatcttcaaacctgtgcagcccaatatggagaatctttcaattcagccattagtagcatgcaccctgcggcacttgcacaattaaagcaggcattgaagatgccatagctgggtgatgagtgtcttcttattcttttttggtcacagattcaggcacccttctatatgctctccactgctccaaaagttgggagatatagggtgagttttcattcttgtcagaactaagttcaatttagaaatatatggtaagagcagggcagttaaaattattctatgaagtgctctcttcttaatatggtagcattaaatgcgtgatattcttctatttcccaggcacatttgaagtttgaggctttctggatgggtggttttttttttccctacattctttttttcttttccatgtaattgctctggttggattttgcttctagtttatatatcttgaatctcatttgtatatgaacaagaaactctgtaaataggttgtcaatctttttgtcgttgtatacaaggtgagatgtgcacagagggttgcggcatagagttcaactggaaacaaattatactaaaatctttacaggaatgagaattggaatggctagtgatgtggttcactgattctcgagttgagttttaatttcacgtgaagccatgcggcatggctctagttttgtgttcattttcacttgtcccgtttgtttaaatagctactgagatttgggcttcttaaatttttcaaggtgaaaaaattaacttaagattcatgtttcgtaattgaagtcgtcttcttttatgttttcttttctttaacttcacccagaagtgaacatgcttttagccttttgaagttttactatctcaaatcttaaatgttagtggccatgcagtcagtgagtgaacacatgtatatttgcctagaaacctgtaggtcgggtaatgttatgggccaatcactatcatgtctcactttcttcaaggcaaaaattggtcctgcattcccttggagataccaaaagaggtgtcggatatcttcccactacttccaaggactgagtttttttacacgaaattgttatgagcctaagaggcaaacatatctggacacgaaaaaatagagcttgtacataacaagacactgctgtaaattggcatataggcttaagcacacaccgacatgatgtgtttgaacacacaacacataagcatgaatcaactagtctgaaaatacaacacgttaaaaagctgtaaaactatgaaacttcatattaatttaggtttataattgtgagttaaaatttgattatttattggtaaataataattaaaatttctttctatgattgtgtattgaatagttgtataaaaattattgaaaccatttaaaaaaaacacaaatttaatgtttagctattaaatgtaaaaattatgttgaaaagtggagcacttaaatttttgggagcacttcctagttggtatcacaattgtactttcaaatttcaatgaccatggcgctggcgctaggaatagctcataaggagggagtaccgcaaagaactagttgtcgtgacaattgaggatcaacgaggctactgttagacatgacacactttgatttagagaccattattagacattttaaggtgctctatattatactaattttggccttacaattagttaacgattttttatataacttataaaattaaaatgtgtgagatctgatattagaatgtgccaataatgatttgtcacttcttatggtacttataccttaaggtgcctcttaaaatttctcttaaattgagagtataatttcttgatgcattgaaggcgatcgagaggtattatgttgtcccttgcaactttgtgaaccaactcaccgatatgatagagtgatactttaacttgtatagtgagtttgaaacttagagacaatctcatgtggaagtagaagccatgtttcctttgcagtttgcactaataggggaggtattatgttgtccctttcaacttattgacttcttagtttggataagatagtgatctgacagtctaaaattacttcaaatacttttatttattctctttttaattttttaatttattttattatactttgaattcttaacttaattctttcattttttctattttaatattcttagagattattaattaatttatttattttattttattaaaagattattaattttgtcaaaaaatagagatcattaattaattaaaaattaaaaaaattatataactatgataattaatgatttacttaattaattaatttataatagaatgattcagatacatatagaagagactacttatcgaatattatttgatttattttttgtacaaagtaaactcaatggaaatgatattaataataactacaagtgagatacaaatcatctttaaatgtaattataattacaagtgagaacggtaacgacaattattttgactatatgtttctttatgcaccttttttttatataagaaattgtgtgaaattagagttctccgtataattttttttttttttttaataaatatatattttaaaattatgtcaaatagttttaaaatttgacatcaaattttaaaattatttaatatgattttattgtttaattaatatttatatataacgtaatatttttataaattattacatgcgaagtgcaataaattatttaccacaatataaaataaataaaaaatttatttttaagcaagtaatttatttataattttattataagtgcaagatattattattattattattattattttaaggacaatagcaaagttttaaatgttatgacaaaactgtttacattttctgtatctattcatattaggaattgtcttcaagtttgttatattaaaaaaaaattgtcaaaaattaaactcagggtcctatttttaccatttggaaaatacaggtctattttgtcatttaacaaaacacaaggtccaatcggtaacttttacaaaacacagagtctaaaataatatttaccttataaatatattttttgttggaaaggaatacacttttaaattggcatttttttccgtaatgtttatattttctttggaataaattaatcaagaaaaatatttaataataattaattaaaataatattctgcaatttaatcaagatatctcccctgttagaaatatgactaagattaaaattataaaaatgagccaacaattgaccacctgattcattgatcgtttgacaaaaaataaaaaataagagaaagaaagaaataacaccatttgaaaaagatttttaagaacatctatattcagtttcttctaccgatcagaagacacaacattagaaattattgtagtaggtttattcaactccttaacttgagcactcaactattgtgcaaggtacataattgcaccattaacaaccccttcagccgcaaataacttattattccaaaccactaagagcgacttgatgacaaaccatcaaagaacaaagaggacaaacaaacaaagaaacaaaataaaacaaaacaaaacaaaacaaaacaaaaaatactcaaaaccatgtcatagagacaaaactaatatataggtaattttaggttaacatcacctaatccaactcatactaggagacaatagtatcaaaacctaatcgcagtaatgtcaaaacctagctgcagtattaaaaacctaatcatagtagcaaaacccaatcacagtagtaaaacctaatcgttaaatctgcactggtttcaccgacctcccgtcataacaccatggagggttggacatccgatccaatctattattttttttcctatccaattagtaagtagatttagaaaatcatcatccaatccaatctaattaaacctcaaaatctagtccaatccaattagtaattagattgatttggtttttaattagatatccaactacatacctaatttttaatactaattttaaaacatgaagaaaaaaacgtaaaaattatatatattacccttcatttaagtttaatactccataaagatattatccatacaggtttaatgcaacagaaagtttaaaataactaaaataagaatattttcaagtaataaaatagaacgaaaaaatacaaaaataaatagacaaaacaactaagtattaaaaattcaataaaatataaaaaaattagattggatcggtttttaattgaattttgacattggcatccaataaccgatccaatccaattagaatctaaatttttaacatccaattcaatctaattgtaattgaatatccaactttttgtagttgaattagattagatcagtttggttcaattgaatttaattggatcttgtccaccccatggaccaaaacccaaactgactccttgctcgatttgtaagcaagtccatccttagaccatcacgccacactaacaatcctacctagatcccaattggacgaacctcccaatttcactggacgaagcccaaaatccaaaaaaaaattaccaacaacatagaataagccatggagaaaaggaataggggacaacatacaatgcatagagatggagcccatcatgctacgtctgttgcactaatcacatgtcccgtccaagccacgccagagtattaaaacaacctttgacagctaaaaatttaaaaacgagaaacctaacatacgatagaaaacattttcaatatgttaaaacacaaatatttttttttttggaatgttaaattgacactatagctaataataaatgtatatatttttggaaaattctacactgcacacccttaaaatggatatattgatgtacccctatctgttttagcatccgaaataattt

SEQ ID NO: 14018 - DNA, 6266 bp, Cannabis sativa
  modified_base (3231)..(3242): a, c, t, g, unknown or other
  modified_base (3743)..(3744): a, c, t, g, unknown or other
  modified_base (3960)..(3964): a, c, t, g, unknown or other
ttaagtacacgaaaatggactaacaccacactcccttcaaaaaaatatatttttttaatacccacagtgaagaacgaaatgtatgtaaagtagaacggaaaaacttacttttgcaacccagcgtcgacacccacgactgtaacaacccaaataatagcagaagacgaataatgtacatcacagtgaagaacgaagtatgaaaagtgaagaaaatgtataatatgggttttacctaaagttgaaacgtaaatggaaaatgaaaacgaaaatagaaaatgaagaagagtgttttgccctagcagagacgaaaatggaaaattgaaggagaaaataaaaaatgaaaaacaaaaagaaagtgaagaaggaaatggaagagtggaggacgacggttgatgtgattgatggatgattagttttaacttttccaaatttaataaatttaaaatttaaaaatttaactggttgtcatttttgtaactctaaatacccctagattaaccccaacccttagatcaaattaactaccctatcctacggttgccgtacatcacagattacaatccgtaaaagtaaagtacaataatgagacaaacaaaatcgggtccctatatatatagtacatgtaacatgtactcataatatatatatactacatcagtgtagaaagttaaatggcggttttcaaacatataattcaaataggaatctaagtctgaattataaatatcttatatactatcttaaattttaattgaccaatttaatttgaaatggtatctaatgaaagataagttattattccccaaattttagaataaataattgaaatatctgccagataatctcctattttttttttattttttttaaataacaataaagatttcaagacaaaaaattagtcagaaaaagtgataaaattctaaagtcatacaaaatggcacaaaattccgaatgaactcatcaaaatcaatcttgaaatattaaagaggttattcatctcacaaaatttcaaaggggtcattaacctcataaaaatctcaaaatggtaatattacctcaaatttcaaatgtgcactaaaattcaatttcaaggccataaaaaatggcattctaaaaagaggttattcacctcataattatcaaaacacctcattggaactacgtttgacttgattcctataaaaagtaacgtaggtaacttagttgttaagactaagtacagtcgttgataccgcaaaatagtataaaatacaaatctcaaaattccataaaagatcatctacttaggaatttttctaaatttttaaaatagtaaaggatttctgaaagtggttatctgccggaatccttatacccaaaattcgaactgtattcttgaactacaagtggtttgatccttcacaaagaaggtatgtaggcagctcggttaattaaattgacttagttcagctacaattccaaatttatcccaaatttccttaaatcattttaaatcctctaatattatcgtaattggaatgaaatggtgttttctttaaataaaagaatcgtaattaagagattattcttataatcttggatgagtcaaacttaaattaataaattcttatactataactttagtataggtgaaattatattttgcaatttatttttaatattctaaatgtgaaatttttacttaacagagattcatctgcatcaactttaaatttgtagtgacttttaccgcaatcattcctatatattattgtaacttcggcaacttctcatgtaagttttcctgttcttttatctcaataattgtaatcaaaacattcgaattattataatatacgacgcagtgatctcaacgtcaggataagtgattgactaaagttgtattgcactttggaatttattgtctttatacaaaagaaaaagccaatgggtctcacctagccaaagtgtgctcctactttaaacttcgtattgtagcccaaagtgtgtttttattttattttattctttcaaagtgaaactgattggtgaatagtttttctcacgagatttactcgggatattttaatgattttatttttccaaatataaaaaataaatttttttatgaaaaatgttaatgatgtctaatatttaacactaattcatggtaaatctcatattgtcattgtttttatactattatagtataatattattggtggtaataactgaaagtatcacaatatccataataattgtagagaattaatattatcgatttgcaaattaaaattaatataattgtcgagaattatactatcgaaatatctaattaactaattaaataatcatttcatacttggattatatttaggctttattgggagttgatattgatattgtcattacgtattttcatgttctgcactgactctacatatatatatatataaatttcctaattaaattttattttcttgatacacatgcgtaacacgttgatgcctcaagcaagccttcacattacattaatatacaggtagtgctaactttattgaaatatgcctgcttttacgatcgtcctgaatttgtgtttgttcattaaaaaaaataatgtaattgtgtttgttacaataagaagcgttaatgtgtatacgtaatgtatgtatatttatatattatataatatagatatatttacgttttaatgggtttgctttttgtgctagtgtcggtgactcggtggactcatatgaaaagaaaagtaatctgcaatatcgctcatccattattatttccaacatgttatgttttactttttaattaaaaagttcgaacatgtttattcaggactgactctgactcatgcatgagaaacaaattatggtaggtagaagctttatatgtttcagtgtaatgggtgttaatacttttttaattaattttttgtttttaaaattaaaaaaatgaaaatattttttaaaaacactttctatagatctgttttcacttttaaaatttttaattagaaatcaaaattttaaaaagaaaataatcactttcaatatttttttaaatagtttatttttttttaatcaatattttagactcttactaaacccggacccaaatcacctccccacgaccctggcactaaactcggtttctgacccgaaccaggatctagacccgacttaaataaaataaaaaaataaaaataaaaataaattttacagaacacacttnnnnnnnnnnnntttaaaattgaaaaacaaaaatttatagaaggcatttttatttttcaaaaataaaatttttaaaaataaaaattttactttcattttgtgattaaaaaattaaaacacaaaaatgttatcaaacggcaccttaattttttgatttttttttggctattattccttaaatatacttttgtttataaatttgagtcgtcagttaaattttacagataaatgtcaattggatttttactgtgtacaccaatacattcgtgacatattttcattagattggaagttttagcgtcatgaatatacttgtgttcacagtggcaatttcggtttggcatttaacattagaatttaattagaatctcaaatttacaaacattaattagtatacttaagggggtagtaccataaaaaaaaataagagattaaggtactgtttggtacacttttttaatcaatttttttttttataattgaaaaagtgaaaatatttttcaaaaatatgtnntataaaactgtttttacttttcatttttttaagaataaaaattttaaaaacaaaaaaaaagtcactttcaatatattttaaaacaatattttttcttaatcaatatttttgacttcgactagacccaaacccaaacccttccacagccttagcgctgaacccgacctctgacccaaacccaaattcgaccccgaacctagacccgacttaaataannnnnaaaaataaaaataaaaatagattttacagaatacacttttattttctcttcttaaaattgaaaaaaaaaaaattactttcattttgtgattaacaaatttaaaaacaaccaaacgacacctaagtgtataaaaattgaatcataagggtttcgctgtcaattacctttttttattatttttttttttcattttgaactggagcatgttttataccttggaattaatattacataaaaaactattaatgggatattgtcaccaatactgaactatacatttaataacacttaaccgaataaactaattttttgggggtaaaactctccaaaccgcacatctgttttggtatccacaattctattaggtattgttgttaaattgcaacgtactattaacgtgtattgggccaccgcctcaccttgactcactgttgactcgaaaatttgaacagagattttcaaaccatacccgctcactaaattggcaaaaataaaatatttgtaagtatagatagagagacacaacaatttataatagtttactccctgtattgcgtcagtaataaagctacgtctacttcgagtttttattctcacgagatagaattatagaaaaatggctaagtgtttaagttctaatttctagagagggaaactagagagagatgctccgaccttatggctacttttcttaatatgaaaaatgagctagatgagctctccttttataaatgaaggaggtccttgaaaataggaataaaataatccaaaaatatgaagaaaaaaaataaaaattggctacttttgatcatagatgatgatataacggtaaaaattaacttctgagattgatcgtcaatttttggagcctgggtcgcgacgacgggactcactcctagtaagttgtggcttattttcataactccattggggatgaaatttggagtcgataactttaaaattacaattgaagtgtgagacatgacttgatacagcattaaattagctttgaaacacaagttcaatcgcgtaaatcatatcaatattgagtgagttattggccattttactgaagggtgttctaggcccagtacttaggttaacatccagcgcctaggttgatgtatgacgttaacttggacgctgggtgagtgggaacacatcccgagaatatattttttaatgcctaagtgatattttgacatcatttagtccacttcaatgttctagcaaagttggtcaccagttctcgaagatattgatgttctgtagaaatgagagactcaaaactatccattttcaagtagtttaccatgttggaaatgagaaattcaaatttttaaatttgacttttctaacattgtaacgccctgagcctaaggaacgccacgtgtgtgctgttacaaacttatttcttactaagtttagaaaagtatggtttaattaagactcttttttttttttaaaacaaagttgaaataaaactttcatactaaatgcaccataatacggggattccttgtttataaatttcttttacaattggttacaaatcactgttacaaaaataaagttatatttcaaaacatagaaaagaagtcgatcctgcttcccggaagccaagacactacgactgatatgtacatcgctggaagacctctgactcatggccgaacacagcttctaagtttcttacatgcatcacgaagcacccgtgagtcacaatgacttagcaagaaaagggctactagataaaatcatagaatgtgctagcaaatttcattacaatataatatacgtaccaagggtcatacacattcaaggtacataaataacttaacgtctatgcgagtgcacttattacataatcaagaatatttatagctattcataatcaacaatctcagtgtttcacacaacaccctaaacaaacaacattataaatacccacctttagtgcttcataaagtactctaattcacacattaccataaccaaataatctcagtgcttcttaaagcactctaaccttacatatctatgaacacgtatacttaccctccgtgagtctctgagattctgcaagaaaagtgactaacttcataagcagtataaggtttgtctagtcactataacaaaacgaatttgattacaacctatcacataatacatgcttagtcaatttcttaacattgcaatcacacaatcctggtactttaaaaagtacccttaccactcgctaactacaagctatgtatgtcactattgttgcccgatacagtaaacgataagtaagaaacct

SEQ ID NO: 14019 - DNA, 5232 bp, Cannabis sativa
atgaaaaaaaaaaaaaattaaatgccgaaacaagtagaggtgcatccgtatgcattgtaaaatcaccctaaattatatttttaggataatttaaaacaattataatgtaactaaaccaacaaattaattaaaaaaaaaaagcaaagtataattagacgaaaatatttataacaatttgtataatttcggaaaaattaagaaagcaaaactgtacagaaaccgggtcaaaaatctaatttattctaaaaaaaattgtttgatttaacaaatgagagaacagttgttccaagtgcacagttgctttcagtatgagactcgtatttgagagaccaattcaggtgtaaaagaatacaattctcttttctatatctgacacaccaccacaccactcttcttcttcctcttctttttcttctggataagttttctcattcccacgtcaacgccacaatagaagcgtttacttttatgtttttaatatttttatctttaaacaacaaatttaatatcttaattatttatttttagtgctaaacagaaccaattttgattgttaatttgttgcactcatcatccaccaccaccactttcttatatctttaataattcatatataaatactacccaacaatacatcttagtctatattttttgtctttgtgtttggtcgtcccccaaaaaccaaaacttttttctcttagaaaattctctgtttttctcaaacacggcattcccacggtttttgtctttacccagaaaatagaaaagaaaaagaatcaaactttgtggtaataaaatcatttatacaagacgaggaaagaaatcagaaacacccagttgataaaaagatgttggagatttgccggcggccattggagaggtgttttggagttggaaatggtggtgatgagcttctatggcatatgggactcaagccttacgcttcaggggactattcaatagctgtggtacaggctaattcgtctcttgaagatcaaggacaggtgttcacttctccttccgccacgtatgttggtatctacgatggccatggcggtcccgaagcttctcgattcatcaccaaccatctcttcccttaccttcaaagtcagttctattcactcttccacttgactcttattttttttttcttaaagtctattaacaactaaagaaatttatatgtatatttggtttaaaatgattcccagaattctcgagcgaacaaggtggattatctgtagatgtgataaagaaagcttttgatgcaaccgaagaggaattcttacacttggtgagacaatcttggccagctcggcctcagattgcttcggttgggtcgtgttgcttagttggggccatatccgacgacgttttgtacgtggctaatcttggggactcaagagcggttcttgggcggagagggtttgatgggcagtcaagcaacggtactgtcgtcgcagagagactctcaactgatcataacgtggcagttgaagaggttaggagagaagttaaggaccttcatcctgatgattctcacattgttgtctacactcgtggtgtttggcgaattaagggtattattcaggtaaatatattaatttaattggtaattggtatacatttttttgctctcttcttataagcgaatttgggttgaatttcatttgtattgatttttaggtgtctagatcaataggagatgtttacttgaaaaaaccagagtttaacagagacttgttccaacaatgtggtatacctattccattaaaaagggctgtaatgacagcagaaccctcaatcattgttagaaagttgaagccacaagacatgtttttgatctttgcatcagatggtctgtgggaacatttaagtgataaagcagcagttgaaattgtgcacaaaaatccaagaattgtaagcttcttctcttctcaccctaacacgttgcaatttttaataataaggtatagtcttttaattttactttttacatttcttttttcagggaatagcaaaaagattagttagagcggccattaatgaggctgcaaagaaaagggaaatgagatatgaagacataaagaaaattgagaaaggggtaagacgccattttcatgatgacattactgtggttgtgatatatcttgatcgttctgaagctactttaaatggtagtagactcaaagatccttttgactgtacaactgttcctatggacatattctctcttaatgctgatgaggaagactcttcacttcatcatccaaataactgagaattgtctctcttttaaccaaaaccaatacattgttgtttatcttgtgaatataataaggatatatataatatatatatatacacattagaagttcatagagagagttattgatctggctgggaacagaacagagttttcatagcttttattacaaggaaagtttgtgtgtaattatgtaaatggaggggttacaagattgagctactgttaagtgttaacatcccagctttgggtttttgctcgtctacattagatgattatcttctttgttcttttatctttgtttaattatggtatatatttttctgctccaacgtttgttgcccttttcagtactcatcaatctaatataatacaatcaacaaagtggttgaattttgttcacacacaaacaaaatatctctaaaaggaaatctttgtatggaaattgaagaggtcctaacttaatgttttagtttctaggttgtgtaaacgtgtgttgtaatttatccattcatttcaacttttttttttctttttacttgaatatttgagttaggtaggcatcgtaggtttgaaaagttgaatcagtctataattattagaaaaaattcttcattcaacaagtgtcatcgtctttccattttcgtgtttgttaaagtttttgacttgattattatgtcattggaattggatagtaaacaatgaaaatgtatgtaattaaccaaaccaaagaacacggtagttataggccatcagccgccaaccattactttatatcaacaaaaattatgttattgatattaaaacaaaaagtaatgagtagtaatgtataattaagtcaaaattatggaatttgtcacaccaaaatctctctgggcaccgtcctttattttatttttttcccataagtagcgtacagaggtttaaaaatttataaagaaaaaaaaggcagcaatacaatgctataatcaatcttaaattgcagttatgtgatgttttattattattaggttttggataaaatatgttgatatgaaaacttggctgatgaatagagaaaccccagatttgagaagattattattcataataaataaataaaaattaaattgattatcaaacaaaggtgacaaactgacacatacaccaccacatacctatctctacattaattttttatttactctatctaccttatagtcaaaagtggttggttaatcacaatccacgaatctaaaaggcaaacctctaatattaaaaatctgagaaaataataataacattattattaattaatattataaaatcagaagcaatatttctttactggatgagataatctgacactgcatgtatttattctatggaatggatatgataatattaagttctatactttttttttgttgttgataatattaagttttatacttgctagttgctatagatacatatcatcagtcataaatttcaaaattactatcaaaagaagaaaagaaaactaaacgtaagaaataattaatgcacataagaatattgacaaaataaccaagaaaatgaatttgaaaagggttctgtatcaaactatgaataatattggatgcttgtacaatacgggcgtagatgcatctctatctgaattttttttcaattttgtttataattgtatatatatatatatatgttataattattaataatttataatataaaatataatattcaaacaatttatttttacaaaagtcatgtgtacaatacaacgtatataactataaaaaaattcgactaattttttttttcaaatgcctaaacatataaatagaaatgtatcgatacattcttttaaattttccaacatatctataaaaatagaagaattgatgttcacaccaaaataaatataaataataacttgttattatcaatcttcatttgttttttatctttttttattttttttatgtatattttatttataagttttgttttacctttgtgatatttttttatctttttattttttatttatttgttattttttttttatttattaatttttatagagaattagggatcacgtagtgcagatcccttcctacactttcgattatttttgacaatcttagagatcacgtgtcaactataagggtcttatacctcaacttttcttatttttttttatgaatgattttctttttttaattattatttttttaaatcattttttgtactgtttttcttattggtaaattaatatttttttatcaatgagttttattttttttatttttaagaatgattttttttcaagatgatgaaaaatgtatatattagtatgtacatatctttattccctctaattagaattttaactttttgtttaataatacataactttgtaagtttttttagtttttttagtttttgtcttatttatgctgtctatatagttaattgttaggggaattatcctactatttttttaaaaaaaaaaatttaattttcggtttggatttctaaagtactttctccggtggtttttatgtgggttgctatacgatttttggttgcaatttaggttgctatgtaggaatctatgtagaattccgtaaaaatacaataaaaaaaatctgtttagaagtgtaaaaataaaaaaactcctaattgttttctttctctctctttttatctagaactttttttttcttaaaaaatctctcatttttctttactccatttgctttttctaaaatattattttttttagttttttgtatattttttaccattcttttctctggtatttttttaataaattttaattgcttattttcttttaagttttttttttcttatttatttagcagtaaatatataatagtgtaaaaaattatatgaacatatatatatatgatattaaacttttttttgtttttattttttttataaatttttattaatta

SEQ ID NO: 14020 - DNA, 10740 bp, Cannabis sativa
atataaatatgtactattctatgaaatatacacacaattcgaatcactattttctacattactttcaaaatatttgcattgcaaacaagtaaaagacttcatgtataactgttaacaaatatttattaataccatcgcaaatatcctctatgtatatttgtgttaatgtacagcaagtgaaacataaaaataaggaaaagaaagaagtttatattatattacagaatgagacaattaccatttcaaacataagactacattcaagaaagctcacctcaaggtgctgtacatcttttcatatataccaaatccaacatagaaccaagatcctccacgttgatggacagaggacaaaatttatttgaccatgttcaacttgctaaaaccaattgtaatccatccatctcaatcaattcaatgcctgaaaaattcaagattttccattcagcaacatcagcagatgccaggacagagaataattacaataaaaagaagataacaatgaattttaagagaaccttacaccaagtcaaactaaaccgtgaagaaagaaccaatagtggtttggccaagaaccctggaacttcgatcaaggccatgagaagccacctaccaaacaaagttgccatataaccaggagtaacagggcagtaaaacataataaaatttaatagaaatgtttctgttaagaaatttccatttttaaacagactgtatcatcttcccagtcacatcaatgactgtcatgtgtttatcaattaagtcactactacatatgtacatgattctttcattaccatatacgttaaagcagcatagcgttcttcgttaaggtacaaaggctttcctctactcatctccatgtcctgcaaatgaaaaaataaactgagactcaaaatgtacagcggtggccagggataaagcgaaaaaacaacaattcacaaaatatatacacttctataaacttatatataaaacatatacctcttcaccaaaggcatccaaatataatgatggccagggagcctggcgagcagacctctgaaggagtattgttgttctctattataaattaataaaattagccaggcttagaactatgatcaaatataataaaatatcaaggattcaacagaagggttccttatttgaaagcataccttaatcaagagaaatattccagtaccagcaccgcagcccatagcatgagtttgacatccactttcccttaccacaccaacaacaacatgtcaacttgtgatacaaggataaaaatattgtccatgagaagtacgcaaatttttattgttaatatttctgagagaaaaaagagaagagaacaaaagaatagatagaaaagaaacctgcaacaggacttccaattgggagagcataatctaccacaaaacaggcacaatgcaggatcctcaagaacagaattgcaggcaggacaaggctgttttatgcacctgataaaacacgttatgcgtatgaggattaaattgcaatataatttctagcaaacaaaatgtgaaagaatacatagaaataacctctgcagtagatcatggtatactcgtggcaaatgcatcaactgaaacggtactgcagggttgcaatgcatgtttttctgaaatctactgagtttaaactccatgtgaaaatgttggaaccatttcaaagaaagggagcgtagcagttcatccttaagaatcaaatccaattgggggatcttaaacatattttccagcctttcaatttcattaaactccatgtggccaccgacagtgttttccatcaagtcattgataaattgtgatctatccagagtgttatccctatcgtagaatggtgctcggaacgaggaggttagtagtttccaaagcaatgcacacctccgcaaatatgggaaactcaagctcctaattacattccttatattatcagatttaccaatatagtttgaaacaaaataatcctgcacacattcagattctcccaagagtttcaatatgtctgtaatcaagcaatcatcaacacctaattcacttgcgttggattgatgtttcccacagtacgtaattatagcctgaaatcaacacataacatcagaggatactcactagacatatcatcatcatcatcaaattaaaaataagctagcaataagagtgtatacctgaactacagtgactgcatagaagacatgtatgagatgtaaaagggagtcctcacatgctaggaaagggcgtggaagacaaaaaagtacccacatcaatgatgaaaagggatcccgggcaacaataggatcagaagctcgactccaaaattgaatatcagaaacagatacacccgtatcaatattattgaagatatgtagcatacagcctgcaaagaacagcgttgagagctcagctaggacgtgtgacactaatatgcaatagtgtgtctgtgtctatatatatataaataaatgagaggaagaaagaaagagagcaccacaagaggaaacagggagagagaaaaaacactggggaagcaaaggtgacaagaaaaacttgaagaaaacaaaaagcaagaccatctatcaaaggtacctggttcatttgcattattatgatccaaggaaactgcagagcaaatagaatctgcaaagcttcgaatcccccgatatctctgaagtacatgaagagaattcttactctgcgtgctttgaacaacttttagcaataaggataatataaatccactggaagactcaagttctttatacaggacattgaggtcatatgttggagttgtatatgtccttccacatcgggcagcaatttccattgattgaagggagtacttaagaatgtcccacataagcattgagtggtttatcctagaggatccaacaagcttatcctgtctatttgataaaaacattttagagaggacacgagtcacaggttcaagatttgggcttgttctctcattcttatccaaggggacacctttgagggtttcaagcccaaaggctacatttgctgcagagtgtaaaagagccaagccttgctgaaggtgaagcgaacacatatcttcacatgtttttcttgaagagcaactagcgtcgggtgaaccagcaattggattatggggctgcttcaaaaccttctggcactcgccaggcaattcaggtaaaatggaatttgcaagcctacgacatactgggcagagaaactccccctaatgaaaacaaataaagagaacaaacatagtcacagccatctctgttcataagaagaagaagaagaagaagaagaaaagagaaatacctgatctgggtctacaatatgccctccttcaaagacaattcttcggagatatctgcatgaatatatatgtagaaaagaaaatactcaaatcatttgaagagacgtttaatgattgtaggccagtaaaaactgacatcattctaatttttatgatggaaagagcattatacatttagaagaaaaaaagacaagtagcatccgtcaagttcccttccaacccgccgccccccccaaaaaaaaaaataccacttcgcagagcattagcttcaagaaatcattttaggaagaaaattactccaaaaacaatcttcatgagtacttaataaatgataacgccatcattttatgacaaaaagtaaaattcaaaaactcggtataggttctcttttcaaaaagtaaatccaggctttctttgtattttgtgattgctctaccagagtcatagtagccagagggtggacccagaccatttaaaagtaaatctatgtaggttgtgaaaatcccaaccctcataatgtgctagcagtaataacaacaaaataatgatctgtcaggttccatcagaagttacctttcttttaatgaatgtaaataccgatcaaggcacccttgatgcacagcatgcccacatgaggaaagaactattccatcacaatctgtcgggccaaatccatcgcacgctgggagatgcataaactcttttggcaacttgtcagtacgtgcattgtcagaagctgaaggattttctgccatctcgctcgaaacagctgctacatattttccaagaaacatagtttcaaccaatttccttctctcagaacttgaactacctacagcagtggaaagtttcatgtcttccacaaaacgtgatgaggacatgttctcttgcatttctctttgaatcaataggtacatatcttcttctgatatctctaagaaataaaagtccctctcctttccatcatttgattcacatggtacttgagttaatgcaggtaattggcccttgaaaaattcaagaaaagcatcaacttccctaggttggccatgatatgcaaattcggtgactgcattctcaaccaactgtgccaactcagaagatgaaaataatccagaaccagctgaaaaacttcccgtttcaggttgaacagccttccaatctgtggtcatagtcacgtgctccttgtctcggtgaggacgctcccaagatgggggacctctatcaacgaaactcataagctttgatttctggagaagaatcaagtacgatacaggacttttggaatttggatcatgacaaagtgagcatacaacttgtgcagattcttctgattcatcttcaacatccatgttactacattcttgttcagatttagaatcatcatctgcagcggtatcaatattagccataaacttagcttgatcagctctcattttcgccaatattgcagcctgtcgctctcgagcttttgccttgcgcttttctccatcagaacctgaccttgaggcatttgtatcatcagtgggaaaggtttgtggaagataaccgaccacttcaggtgtaagttgttgcagtttggtcatgcatccagaatcaatttcggcaaacttcttcaacaaattttcaattaaagaggaaagattgcaactgcctgaatccaatgaattttctgaattttccttcttatgcattctcatcaataagacaagaagtgacagcaaactttgttcaccagcaccatattttaatccctggccaatttcttcaccagcaaaagctagcatgggaattgattctccatcataacaggtcaaatctccggagtccctgtgttgaaagcatgtgtctaaccctaatgagagcaagtgcaatgaagttataagaacatcatcaggagcacgtgattcaattgatttgtcggtgaaaactgcatagaatagaacagaacgaacaatttgaaggactgctttacaagtaaccactctagctactcccttcagaggaggatatatcttggtccaccttggcagctgattagtcaaagctgacacaccacgaaagcgcaaatatctttcttctgctacttgtaaatctctagagttccaacgaggatgatacaaatccagctcactccaaaatgaccagtgtaatgaataggtgccctgattgaagccagatggattagaatacacggcaatggcatccaatatttcctgaagctgctcaaacttagagagatcacgaggaagagatttcactaattgactatgagtcgaatcaccaatggctaacttgtaaaccaactctcgttttaagctgtcagctttggttaagccacaaaatcgccttcctttgacaatttgtatgataaaagtaagcatttcttgaactaagtttggttcatactcacgtgaacgctcaacattcagagaaaggtagttagatagtccaaagcgttctaaaattctaaatatatatggatcagctggagccatagcagcagcacactgtaacagaaaaagatcaagctccaaaccttgttcagacctgcatagcaccatcagataatgtgacatttctaatatttatttaagagtgctttaagggtgtgtgtttcatcacaagtattccataaaaatctacttaccaacgtacagaacggtaccactcacaagataacatggccgcatccccattcttccgccacattccagcatgtacctcggcacagaataccctaatcctcaaaggatgctccatagcgaaggcagaaaatccatatggatggcagccactaagaatgtgtccaaagaagtcagtgtagattggcaatgaaagcacagaagcagtagaaatattggactctgcagattcaccaaaacatccactcaatgctttctgtagaagcaaggaaagaaatcgatgtaaaggaatgtgaactgatacatcttgtgaactaacatcatacactatgtcaggccaatccgacaagcttaaaacacgtagagcatccaggtccattgcaccatcaccttcaactatagtatcatcaaagcttggacgggtgcatgaattagctgagccactttccccagtaattgttaacctactctccatccctgtactttttccattttgcacaatacgggaaccactttgtgcatgtggagaaaattgtccaccatgatcttcgattgaactagaaagtctaccaaatatatatctgccttttctaatcttggataatgttctcttcaatgctgaaaaattgctgcttgtgatattacttgaactaggagaccatacaccaagagccgatgtattatcaactgccaaccaattatcaattgctctcaagcactcatgtgttaaccatgtcacagaagggggaactaagagacttgaagctgaatctaatttattctcaacaagcatgggggatgacatggatgaagtacacctaccacttgcactacatgcggaactttcctgggacatacgccctactttagaatgtcttaggctatctccatcatcagtatctagcttgtttgtttcagaaataatctcatcatctgtctctgtactactagaaattgaaaatgctccatccaccagaaggcagtgaatgttggcaatagaatgacccaagacaaatggcaaatgcatatgctcattttcttcttctatatgaacacctgtttctctcttttgagggttcatcccttgcacataattcaagagtctcatccatgtacttgtaatatctggttgatctctggttacataactaggaactccagaatgactcataacaaatcgaatgtcttcaaccacacgaagggtgatctcatgcaaattcccccacttgttaatctgcaagaacaaattataaatctttgtagttgatcttttttaacaaaaattacagaaaggttggaggagtataactgggctataaaaatcagcttcagggtaataaaccttaatttgatcaactaaagtgacaaataaagttaatgctaggtttgatatatacttatacacacataccaactatggttttcaaatcttctcataaagaggtgatatacgatgacggttataaagtctttcagcttatatgcaaacaaatatttatcataattagttaattacattattcttctaaaagaacatattcttgaaaaagccaacctctataagattatgttccagatagaaactgactgtttaaaaaaaaaaaagaaaaaaatgacggaaatcaaagctaaatagcagtaattatgcatggatatgaatttcctgatgcagcactacatatcttataagaatattggacaagagagattaaagcatagcagtattctaattaatataaacaatattttttaaagtaatttcagatggttctggcactggcaggataacataaagctcaaacagccaatgcagttagttactaaaagatataatagatatagaacaaaaaatttgaaatttgaaagaagcatgcttgcgaaaatacaacaaacaaatatattagaaattggacaactcatgcactccatgtagctatcgaaagaatgcatctgaaaaggaacatcataaatcaagcaagtaatgaatcacctgtaaccggccatcgtcaccggcacaagaatggaagatatctcccaaacaatccaataaaattgttaaaaggttcatttctttcacaagccgaggagttaaagttggaacagtgaatatttgcacggagaatgtaggaagcagtggaaactttttcaaaacagcatcgctggactcttttatgacagcacttacaacagtagggtaatatccgagaaatactttagcaaattcgtatttgaaataaggttctcccagcaatttcaggagcaactcatgtaggtctttcacaacaacctcgcttacaaacctttctgctctcactagaatctccaacaagccagctgatgagaaaaccttctttgaaataaaactaagcaaactctcactctgcttacagaactctaacagcatctcaactataacaaacgtcagctcggttgcaaccttcttacgctctgtgacacgttcattcaatcttgggttttccttacaagtagtctcagcattcaatagccttttttcccagcaaaaaagaagagcatcaagtacaggaccaacagagttcgcatactcctcaggaagaggttgtatctgttctgcacctttatgctttgagcaaaacccttctctcttccacgccgtcacatccccacagtcacagcaacctccgcccgtatagataactgagtaatcatggtcctcgtggttcccattctgaaaacagggaacacagattgcacatgttgggtcatgctcacaagttttacacctataagctatatcattatgaccccatatagagccacacacaccacgctggccgacactcaattgggcaagcttccttaaggcactagccggttcaccctcaaacatcaaccattgcaaccaccccaagctctctctgaagacacttttcattgttggccctgccaattgttttctaaacccaggcttagattcacgaataaattccgccacctcctcatccgttggtaagatagctgaaaccaactccggtatccgagatttatcatcttttacaaaagcaactaaccctcgttggtactgatcaagtaactccacagggactccaagtggtataagtctctggtaaattgtaaaagcaaacgccatcaagatatgacccgacattttgttgccattaatcaaagaagctcaaactgacacatacgattataatacacagtacacacacacacatctaaccgtaattacaattcaattacccgatttcacactcaaattaagtcaaaattacacaataaatcagaaaatgaagaagcgcagtcatacccgaacgattcgatcacggggcctgttattgtgggaaggaagagaaggaggagatgcatcgatgtccatactatctgaatcagcagtgcagcagaagcgcacaagccaatcgacgcagcagaaacagcgactcaagcgagatgcttcttcgccttcagtccccagttttggtctaagaggcaaacaccaccgtcttgcttcatacaaattcagagaaaccctaacctgtttgtttctctaacctctaatatctctctttctttctctctctctctctctcacaaatcgcgagaccaattcaagcttccattacattcgtttatctttctcatacacagtaatatatatatataaatatttattattaacaaattattccatgacggttcaccaagctatggaataatctcacaagtaaggaagaaatagataaaaattattaggaaagaaaacctgaagaattattttcttattaattattataattataatttttacttttattagactgtgaggaagaaaaagaaaagggtttcgattaactgaattatttcctgctgccaaattaaattatttagcacttgtcatgtttcaaaggtacgtgcctattttttgctttatctattgtacgtgcctattcccacgtaggtaacaaaattactaatgtttttcatttcatttttttttctttctgaaggaaaaaaaattactaatgtttctcatttacacttcattactatgataaaataagggacatttgtatttttatgcttaaaagggaaataattttttctaaaccgcccaacccaaataatttgtccaaaccaaagtgaaaaaccccgacgaaaaatgtaaagtaaaaaatctgacaaaaatataactcaattaatccatctaataaatctaaactaatatgaccaactcgattgattttaactttgaatttaaactatatttgtctcattgtcccaattgattaaaatataaaattgaatttgaaaaaatacacacacattggtgggttaacccgaccaactcattgcacgagttatactttttttctttatttgagtgggttgcatttaggttttgtaactcactatttttacattagattgaataatatgtagtgtaaaccgattaaaccaaccaacatacactcctaataaaaaataatccctcatgtttaccacatattaaaattatcctaattgttgtttgattttgaattatactcctctcattttattttccactcttactctctacttatctttctcacgacctaacttcaatccgatggacccaaatcgtagcccctatatgtttccactaccaagatggagattcacaacgaagacatgacagtgtttgtgtaattcttgttctataacatcttcaattgtcttttggcaagtcttttgatggtttgtaggcattttcttgggttttgagcttggaaacctt

SEQ ID NO: 14021 - DNA, 10772 bp, Cannabis sativa
attcaatccaaagaacactctgttttacaatgtaataattaatttttcatttaatttgaaagaaaagagaaacattattcgggcattgcgtgagtttctgtgagtttgatgaatggactcccagactgtatgctgtattgtgccatcttcctattttattatgggctatataagatttttgccatcggaactaatgacccctctcaatttttcagctcattaaaaatgatccccaaattatagtgttttaaagtggttttctgtcaggttttgttactggtgacgtggcagtttagactactgccatatcagtgccatatgtgtaattaatttgagaaaaattatttgaacttttttaatttagttttacttaatttttttaattgattttttgcttgatcctaaattatttaatctgactctaactgaaatttttggtgtgcaggtcagtcatcgaagttcgggatgggttgacgtttcttgatttgattgttatccaaattgaggtttctttctttctctgcacacacagcacgagcatacatacacacgaacgtgttaagcaggtcttggcctaactctgttgtcattttgcagaatctcaattctaagtatggatgcaatgttccactgcttttaatgaattcattcaacactcatgatgatacattgaaggtacttacatttaatattcctacgcagttgtaatctcatgtcaaatggatatagcgagtttatcacttattatttaaaaattttatgtaaataaacctagttgtttgcagtggtgaggagaagcagagtttttaaatttgcatacagctaaaaagctgaattttcagcataaaacaaacctgatattgtattaagaacttgtaggctttagaggagataattacattacagttttggtgcatgccaaaatttacaacgtggtgacttaaatttattccatgtgtttaggcacactaaaccgaggcattgttttacttgaaaatgtggtttatgtaggggtggttgtatatatgtattatattatatttataatttgtaagaatgaggctgatttactgacttccagctactatatatgtattatattatataatataataatttgtatgtattatgttatattatattctgtttttactgacttccggctactatgtttgatttagattgtagagaagtactctaactcaagcgtggaaattcatacatttaatcaggtttgctagtgttaattattttattagctccttcttcgtcaacttctgttggtacttcaaagaaatgaacttatatactcttatcttctatgcattcattcagagccagtatcctcgtttagttgtcgatgatttttccccacttccgtctaaaggacagacgggaaaggatggatggtatgatttactttttatgttggataatttaaattgtgaaattatgctgtactgtatctgcacataatttcttggttatgatcaattaatatgatcataaagcacttcagcatcaacaatattgttggtgtctgacttttaattatgatttatttatatttttaggttaaaatgttaaagcttgtcttgtgctctatgggagtcttgcttgcttgttttgacaaacaatttcttttttaaactgaatttgtttctagtccttgtgagatcttgaaaggtgcatttaatttgatgatatttatgtgaataactattttgaaatgtattctgcattacatcaagtcattccgtttctttcaacttagccactcgttcatgggtaaaaatgactacatgtttcaatctattgcatgataatagtgaaatgaattactggcaatctctttttgttctttttttgttgtttattttattttatttgaaatgtaatatcagtcttgctagtttttaaattttagaaagaactattgtttaagttgaacatttatattttgtaaacttacaatgagcgacaagttacaactcactataacatgctaaaaaaatagtaaatatgcttacagatatatttgtgatgtgattgtgtgtactgtgtttcatagtgctgagcagtttgtttacatgccttgcctaaaaagggtactcagatttactattaaatgtcagtcatgatatatagtttctatgaggtctttgctaatgttggacatcaggttgaaactaatgacaaaaaaaaactgaaagttacaatttatgttttgaattatataactatccttcatcctagattcataatgtagagtaagagttgaaaagttctcttgtattatttaaccagaaacattgaccttaatgacttaagtggatgaacattagagaaaccaaattcttatgtaatgtagaattccatttcaaactcacacgatagttgtgctgatatgaatcttcatggaccatggtgtgagagtttcagttaatacgggtaacctgaaaaacctccaacctagatgcctaaaatgaggatagagctccccacttctagattcaaatatgctccacaatctttaattcttggaaagagaggttgattcccttgatgcctaatgtaaggatagtgctccccacttctagaggtgagaaatcctccacgatctttatttctttaatagggagatagattccccaacagattcgctgagtcttagtagcttcactcatatcaagtgctcgaccatatggttcaatagtagaaatcggtaactcaagagctccccatttctagactcaaatatcctccacaatctttaattcttggatagagaggttgattccctagatgcctaaagtaaggatagtgctccccactcttagaggtgaaaatcctccacaacctttaattcttttatagagatatattccccaacagatttgccgagtcttagtagcttcactcatatcaagtgctcgaccatatggttcaatagtagaaatcggtaactcaagagacatgttttggagataaatttgtgggtcacttcactatcaattaattagcgaggtaagcccaaacaacaagaccactagctcatagagaccttcttgagtttggaaagtttgttttgaaataactttgagtcaaacatgtatgtgatggtatcatgatttgaattcaagttttgatatattgttcgtccaagtaattcacccaacaatttcttatttatgggtgtaacatcaactaccatctttcttttaattaacaataccaaactagtaaaaggcatattggttaattttggtagcaagcatttcttgtactagaggttctacctcatccttttgatcgcgagggtatctataaggttagacactaataggagaggttccatccttcatcactatcacgtgctccttcctctaaatggaggtattaaacacttcttcacattcctccaaaacaacttttatctttgtaggtaccatatgtttcttctccaacgatgcttggtcagcctcaattcaaccagaaatgttgatcttcatgacttaagtgcccgaacattagagaaacaaatgtcttatttaatgtagactccccttgcaaactcactatatttgtgttgatattaaacttcatggtgtgagttttccaattaatatggataaccccaaaagactccaatgattagatgcctaacataaattattgctccccacgtctagaggcaaaaagcctatgtaatttccaattcttggataaagactagattccctgacaaatgtgtcgagtccttgtagctttagttgtaaagtacaagtccattatctccctgtggttcaatagtagaaactagtaactcaagagccatgatcaaagctttggataagttgtgggttcaggataacttgcttcaatgtggtcacaaatcctattgagaatgctaggttgtactattgttggagaatatgactgcagtaccaatgacctattttgaagctttcctcgaataaaaggatcttaacatgctttgagtctttctctggcacatctttatcttagtgcgaattaattggtataacttactagtttggctgtattgtgctccaaactcggtattcttttgcagctcttgtttcattaagctcaactcacctagcattgtagacccttaagttgattcaaccgttgcctccattctcgttgccatatgtctgtataatcgcccctcctgaattttatttctagcttcccctgctcctatgattttgttttggtttccctaaattggaaacttcctaactaggaatttccttttccacacatgatgtaggtatactgaatgagcagttgactttgttacttattgctcggtttgacataatatttatttcttggcttttgttaataagttttttgtcccacgaaggtaccctcctggccatggtgatgtattcccatccttgaaaaacagtggtaaacttgatgcattattgtcacaggtaagtactatattaggcatttatgattctcattatgtcagcttttccccacatttttatcggcccctgtgcttacctattttttaatatttctttcttacagggtaaggagtatgtattcattgcaaactcagataatttgggtgctgttgttgacatgagtatccttgttttctaaattccttcattttgccacctccaatgcttgctttcacttatttactgcttcttgtaatctctttaatacattatcaaatattgcatgtcatgcaattctgttatacagttattttccatgactagacgaaatagaaatcttaagccatttgatcaagaacaagaatgagtattgtatggaggtacaagagatacttcttgtgcttgggatttgatacatttatttgttcctacaattttttccccttgtttcgacaggtgacgccaaaaactttggctgatgtgaagggtggcacccttatctcatatgaaggcagggttcaggtataacatacttttgtgtaacgtcttgcaaattttatttatttatttgtatttttgtatttttaatattctcttgcttacttagtatgttatccattagtggatgcatgtatagattcaattttggcgctttttgaaatttatgttctcagggtgaattttctcattcaattgcatagatgtcattgagactcaaatgtagtatttagtgttcctatataaaataaataatacatgtttcttttttgctaactaaataatacatgtttatgtgggaatgctgttgaaaatgctgtatgtaaaatatattctcatttttcattggccgtgtcaaattgtgtgtttgtttgagatttattgtaatatgccctgcaaaattataagggcctgcttctactcctttggctgaaatagtgaaatattgttgcaaaaaatatgtgtgcataaattactaatataaactccatcagctactcctaaatgatggaaaatcatgagattgaaaagtgacaggtgcatcggttaaaccaaatgacatcacaaggaactcatagtgtccgtcgtgagttctaaaagatatttttggtataagggttgccccccttgccatcttgtgggtaagggaagccgacaggtcccttttactttcctagaattgatctctcttgtaggcttacggttagcttccactttataacctaatcgacagctaaggattcctgtggaagccttacctaatccaattgctagggagcatttctgagcatttttgtttgtagggagacattttaactcgagtacaatccttgtaattgctcttgtttgtttggcccagaaaccatagacaaattattatcttgcgggtgtgtctatatttagcgttatatttatgtgaatactagttttccataatatatatttttgacttcatttttctatgtcggatgttgtgtttattccaacttaacatttgttcctttttctgtaagcaacacttaccaagacaatgataatgaaacactttgctgctttttatgtaatattttgcagctcctggaaatagctcaagttccggatgaacatgtaagccataattctaacaaactcttttgttctcataattcagtttatctctagtcactttaccaactttgcctaaaccttaatgtagatggtccaataatgtcagttttaatcactggaatttctactcattaccgtcttatgtttttactagtaaaaccatagaaattgttcagttatagatttcatatcatttctgccaccttttgtgctaaggcactctgtttgatattgttatcgtgatccttcaaaactttgctccttcatataagtgaggggagttgcagtactagtgcctagctttgctcaaaataaatggagctaaattgtcattataaattcctagacatgctttgtgcaagcttgtcatctaatacacaatgttctctttacaacaggttgatgaatttaagtctatcgagaagttcaaaatttttaacacaaataatttgtaagtcagattgttctctctcatttttattgttgattggtactttcgtttttcatttcggaaacaactccggttgccttaggttgtggctaaacatttagttgttgaagttctaatacattcattctcaggtgggtgaacttgaaggcaattaaaaggctggttgaagctgatggactcaaaatggaaattattcctaatccaaaggtacagatatttcattacagcaagtgatatatccttgacaaatttctgactttctattcttcattttgtttataggaagttgatggatttaaagttcttcagctagaaactgctgctggtgcagcaattaaggtcttcaaagcataaattctttgagacattttcataagtaaaatataatatatgtatgtatatatatttaagtttttaattgtaatgctctttgccccctaaaccagttctttgacaatgctattggtgtcaatgtgcctcgatcgcgatttcttcctgtaaaggccacttcagatttgcttcttgtgcaggtggttgcttttcttttcttttcttcttaattttatactgatcagtgttagtagttccaaatattttgctaatttattattatttttttcagtctgatctttacactctagacaatggttttgtaattcgaaatgtagacagaactaacccggctaatccctcaattgaattgggccctgaattcaagaaggtaaggatatcttttgattaagttctttatatcattctaaatctattatagtttcttgattacgatggtcacttttgtttttctatgtatcatacaggttggcagtttcttgagtcggttcaagtcaatccctagcattgtggaactagatagccttaaggtttctggcgatgtatggtttggctctggtatcattctaaaggtacagataaagtcctccattggttttggtctttcataatttcttgcactaacatcctttaatcagatagtaaatagagtcttgttcaagagaaatgatatcatattatagccatactattttgttaataacaattcttgtgacttttctacgtgtttctgatatctaatcttttcatgctgagtgcaaccgcatgtatcttactaatgttttaaacctattgtattttgtagtttgttagaaatttttgggaagtgtaaccttacaatgatatgttcatatatgtgattaaatataggctttcctcgaaagttaccctgacataattatcctgttgtttgataagtagagatccttagacaccattttcttggatttttcttcttgttattgccaagtaattttgtacccgttacacttttaatttataaaaggggcatgtaagcatcactgcaaaacctggggtgaagttggaaattcctgacggagctttgcttcaagacaaggtagttttctttctttcaaaagaattatttattattctaaatgttttgctggtgtgagtccctgtaatatgcatggcaaattattcatgatggcctccaattttctctttcatgtccagaatatcattggtcctgaggatatttgagttctttactgaaaacatgcttggcgagcgttgacgtgggaggcgccgtcctttttgattgtgttatactgtgtatttttttttttctaaaagaataatagtggatgtttcctcgactgagacactatggacccttgaagttgggtgactatttatgttcattttttttctttttcctggttatctatctaaaaggattttgttgagaaagtatcacatcagcttgatttaccaaatggaggtgaagttttagatagttgcatcatgatgtgtagattttctgaaaaccctttaccatactcaagtttcgtatgctttctatgaaaatgagatgttattatccatctataaaatcatagtttttctttaggttttgttattagtattttgttttattaaacatctagtggttgattttggttttgatatgattccaataagattcgtgtaattaatttcaaccataaaattatgatatggtacctatttaaaaatatttatgttttagattattgtatgtaattcgagtacgagtctatcattcttctaactacattggatgaccggtgaactttgttcaacaagttcataaagaagtagagatataacttttaccttggttgccttttgaccagtatcttcgattagggtgaatgtcttaataattttctttgcggtgtgagctgagggttttttttccctaccggtaggtagtatgctactgttcagcattatgaattcagtagttacaatatatccacttcacgatatatatatttatgtatttaattacttgtactttacacatataaaactaatcaaaatttacatattttgcttcaaacataataactatactaactgtttctttgtattaattttttttaattaaatttatctttattaaaataaaactaataactcaaaagagttgtagaaagtttagaaggaacaccccttctctgaacatattactaagcataatatcaaaattatcttgcaagaaaatacgcaactcaattagcaggttaataaaatataaagcaacatcacttaatgtttgcaataaacttttataatctttaaccactaaattaaaactagaacattataaaaaattatgaataacttgaatagcaacaaggctatttgattcaaccctattttggggtaactttggttattcaaccaattaagagcctcctaaattcccattgctttggctgaaggagacatcaccccttgcgaacatgaagcagcagctatgaacaactcccacctcgagtccctaaccacaaaagaatcaaattgtctatcttcctcaaaagtagctaacatctatattaatcttaattgtattcattacaggtttagtctaacgctcctccccaacacaagctattaatgggttaaaggaaggtatattccctacaccttgagtaccaatccattgatcaagatttagtgaagaaaacaacaccacatcctccactctctgtcatttttgcttccacactatttctattacaccaaattttcgttaaaaaaataaaatggctactcttgcacaaggactcacaagccaagagtaccttgaagatactcaagtcaaccctgtgactttcaccaaagcttacaaaggccaaataagtgaaacatcctatttgagggccccatgacactattggaaactaatgagaacactaaccaaccatttagttccgggacacacacccatgtgctcacctaggttttatgggcccggacaagggttttcatcctagagaactttatctgacatggaaacaaccaggaacttgccttatttaggtataaaaggcttaaacttgaacataaaatataaattgcacaaggaggccactaataaatgtatggtcgagcactaccacaagaggatggcagtgctctctcttttttggagagcattgccacaagagaatgataatgctctctacttcaaacctaccaaagggagcttgtccaaatgtggtcccccaacaccaaggagtatagtataattgaaggaaaccattttccacgcaccattatacatggacgacccactgtcatcattgtgcataacaaagttgcacaagtttgccacaccaaatgtagaagggattctttggctgaagtatattttccaacatcatggtataaaaaaaaaagtgagaaaagtcaccaaaaggtgtagaagagccctggttgaccactaccgccattgcctctctttggccctaaagaggccaaaaaggtggaagaggtctctcccaccaattggccaataactaaagttgccaaattatttttatagcatccatatgactaaaataagcaagaaacatcatcaaatgcttcccaatacttctggcctagcactgccatcttttggcactgactgatggtaatggtctccagttagggtttcgaacagatgagattttaggaccctcgaacgtacaaaatatgattctcatcaaaaaacaagtcaaaacacgcccaaaagggtccgagaacatgcatggccgagaacttccactatgatgtggcaatggtaagatttttgactaaaaagtacttactacccttcagtaaaacgggaacaaatttctcaatttttatccaaatgacttggatcaactttcattagaaatatcttctcaagatggatc

SEQ ID NO: 14022 - DNA, 10942 bp, Cannabis sativa
gtagaggatctccccctcctccagtattagccattttcttcttccccaaagtatccttctcgttcatgttctcaatattggcctccatatcagtttcctctaaaatctgatatgcattatccgttacagttgttgcaggttgtcgaacctcctttggtttccagcctttttgaactggctgaaagccatcagagtctgctgcctgcatcttgtctgtccctgttaactcctcaggcctcttcttcatcacccattcttgtgtgcctgctgtctttttcctagattcacttgttttatgccccattcccttacagtgctcacaaaacactggtttccactcatacttgactccaacccaagtgttgaagctgtgttcatcttcaaactcaatcagattaggtaaatcctaatgtatcgagacttcaataagaattcttggatacattagtttacctctctctttggtaattgagtctaccattattggctttcccaattgccctataattttgaataatgacctcttacccagtacttcaactccaagttttccaactgcacccagactggaatcacactgagattctcttttttaaagtttccatctgagttccacggcttcatgactacagggcgattattgaaaaatatataccctccgtttaatacattgtacctgtcttcaatggtgtgaaaacaaatcaaaaacactccatatgaaatcattcctaccttatcaatcctatctttccacacccttcttgcaaatccatcgataacatacagatgagggttagctccaagaacatagcaaactactgctgagttctagaaattaacctcctcttctatatcctcataagttatcttcaccttctctttctccaagttcttaaaagaattatccaaatttctttgaatattaccatatcgcagaattggaggaatagaggatttaccttgtgagatgttactgttacattgagcatttgcctccatgaaagtggcgaagtcagatctgatttcttcttgccttcggatcgagcaaagtgaggatttgggagataaaggtgcttgaaacagatcagcatcgaccatccccttcatcaacactctcctcatccgtgaaatgaatcggttcgatgccaataacctcatccattgatttggtttttttgacatcagcagtagatacaaggcccctctttcaaactttccacgtctttatagatgttggttgcctcccttgaaccttcgatctcatttttgccatggcgccaactgaggtagttgcaagaagccacgaactaggagctagagagaaaacctttcgattgccacaactatttcgtatgaaaatattgttaatttattctttttactttttatccttccaataagacaatattatttcacttgaattatttaattcatcactaattagttttaaaataaaattggataattcttattacaaacatacaatgttggataagagcttttttctcttttaccaaaaagaaaaaaaatctttgttaatcaccaaacaatttacaaccaccacaataagcacctcttttgcattgcagtgtagtgtaaaagctaataagctaatattaaagttaaaagtctaatgctaacttgcagttcccaatttcgtttagttatcattatcaaaattttacatcccctaaaagtattaattaaaaaaaaaatagtactccatctaattaaagaactattattattatttttttttatttttttttttgcggtttggagaaaatatgaaaatgtaaaataatataggacatttcgtgacttttttaattaaaaaagtaagaatatattaaaaatatattttataaaactgttttcactttttaattttaaaaataaaaattgaattttgaaatgtttagaaacaaaaaataatagtcactttaacaaaatttataatattttttcttaattatagttatttgtttttttttatcaatattttgagcctgaccctagacccgaccctccactcaatcctagaccctgacctcagccttggactcaaccctaaatctcacctcataccccaaattttggacccaggcctagactttaatcccgacccgggacctagacccaaatctcgacactagatttggacccgacctcagacctataccatgaacaagcccaaaacccagctgtagacccagatcgcagctcgggacttgaacctggacctagacctcagacccgaatccggacctagacccaaattcataccccgacccagacttagaccttaatctcaaacccaatctcataccctagacccaaaccctagctcgattcctgaatcctaaaccacaaacctagtgttggccccagccgaacctgacccagaccttgattcccgacccactttctctctcctcaatttttcattccttaaataaaaacaacaaaataaaaaaataaaagttagaggatatatttttgtttttacaattaaaaaataaataagttactgaacacttttttattttttgaaagtaaaaatttacttctatttttgtaattaaaaaaataaaaaaattattgaacgccacttatcttattagaatctaatttcagttaattattattattttatttaaggtagttaattattatttaaatcaagtaaaaggaacaagtatttctgaccgtgtatcgtgatgttccttttgattaatatatattatttaaattaagtaaaaggaacaaatattttggaggatataatttgagtaatatttgagttgttttagaagatacgacgctattaaatatcttgtagtactactaaatactaatggagagaatcttagtggaaaagagttatatatgtattactatatataagtgtgtatctcactttctgcctaaagttgctttgtttacttaatttgttatacactttctctttagcctctacttcacttggacaatagtacagcttttctcctaatattacctacttcccttcttcttttagacccgaccaaacaacatacatttctgccaaatgtttcttttctaagtcctttttttggagatcacattcttaaatatcccaaaaattaaatcacttctttattcattattacttattagaagccactaaaataaaactaaaagaaatacatagtttgtcctaaaataaaaacgatggtatcattacatcacttattacgtgaaaaatataagagtttttataaaaatactagattttgggtaaaaatttacaattttactctcacacggaattttttataaaaatattatttttttctttttatataaaataacagtaaaagaataaaacagaataattaaaataaagtagaacaattaaataacaaccgtggaacaaccgtgaaaacttaacacaatacatagtataaaatttacacagtatttttgaaaaaaaaaaaccttcctacagtaaaaaagtaaaaaattaaaaatttcattatataatgtaaaaatcccaaaatatacaataaataatgttaaaagcttgttttatcatttagcttaaacaatcataggcatcacattagtttaagatattttatggtcatccaacatcacatgctatattattaacattgcatcttaaataatataggataacgcttaagtagagtcacaaaaaatgtctgtacatacaaatatttttttttcattatgtgtcaaactattaatatttcatactaataattaattaattctttttatattatttttatttctttttttgaataatttagtgacccctaataaagaaagttgctaatatttatcaaaagtcatactaatatagtcatacgaaatgtggtaaaaaaaattagtattatttgattaattaattgtacaatcaaatatatttaaaaccttatttttatatgtccattgtgttcataatattgaatttctaagtttttatcaaaacaaaaatattgtagaagtgttttaataaaaaaaaaattgcatgtaagacactttatttgaagattttttagtaaatgaggcttagggatccacaacaatgttgaatattagctaacttttcttattaggggtcactaaattattaaaaaaaataaaaataatttaaaagaaattaatgaattattagtattaaataatagagtgaaatataataacaaaaaatatatttatgtaaagatatttttcatgattttacctaaacattttccaataatgtaatagtaagatgtattttaagcaacattaattacttttatttttataatgctattttaattattttaagtacatgtattaaatgtaaaatgaaaaaacaaaaccatcacttttttatatatatgttgacatgatcactttaattgatcataaaaaagaaagcgcaaacaaaaggagaagtctcaaaaattattatttatccttagaacatgcttaacaaatctatgagtcacaatataaaattataattaatataagagagagagatgccgtaggaaagctaaataataatagtttaatgtctcaaaataagacaccttgtgcccatcttagtcctaccaataaagcaagagcttctgcaaaaccaacaaagatagaaaaaattagtaattttttttaaaagatattaaattaagtaatttagaatttatatcatgtataagtttaagagatcataaattttaaaaatgaatcgtaattattatttttgtttccgtatggggatacgtggaattccaacaacgaatacaatttagttattccaatcccactagcatgcccaaataagatattaaatctggtccagaagcaaagttagtccttccaaatgatgagtagaagattcatctaggcgagatatccatccagtatggtatgcgtccaaagacattagaaagagcgttcgtaagaagtaatcagcgagcatctgaatatctggtaccgtttcccatttgataattaccaaatcccacaatatcagtaattaactcctgatgatctcgtctgaagatcatatcttcctagatatgcaaagatagtaattagcaatcaagtatttaatgtgtctttattctccatgaggataggacataattttttacaaccgccaacgtgatgtggcatccacatcaacatacatcgtgcgccccatgagtcgggcttcaccaaataagcccatgtaaatattttacttggaatcatcagtgggcaaaggctaataagcaggtaccctaaacactataaatatacgaagaacccttcatgcaaagagttataaattcattcctcaactgctcaaaaaaggtttagaattcagacattcttgtaaaccttagggcttttctagctttaaagtaataatattgacttgtggactgagactcattaatgccctaaccacataaaaatcatcgttgttattttctttgtctttgataaattttcttatctttcacatttaataaattgatttctgaaaatctcggtaaatattttggtacttttattgtgagcaaaagaaagttgtgataccatcaaaggttgtatactgcaactatggtactcacccaaaataaaattggtggtcgcgatggagatactcctattgatgatgttaatcttgtcgctcaggctacaacaagagtcaacagagatccaactgaagcagctattcatcctgccaaaaagactcaacgtaatgaaaattatgttgatgaaaagcccatcaatgagggtcgagaggaatgttccgaagacaaagaccctgaagatggtgggaaagaaaaagataaagatgactattattgcaagcaaaatcctacagttgttgatatgaccaaagaactcgccaaaatcaagctaaaattggcagtacaagaagaatttgcaggatgcaagcttagccaaactggaggctagacttctgctagagaatatggctcaagatgaagaaattcgtgataaatctattccttaggataataatagcaatagggacaaatgaaaaggtttcataggagatactccaagaaagaccactccaactactacacgtaagaacacaaacactgccaacaaacctctgagaaaaatgaaggtagctaatgctctaagttaaggatgtctaacagatccgagaggcagagctgtgcagaatgataggcttaatgcttaggtacaacgtcctaccattggaaaaaaataaggattaccccagtaattccattaaccggtgtgatgatgatgtagaagaaattcaccagctttctgacaaaagtctttcaacaaatgaccttcaggcgtgtgaatgcaaagaaggaaaaaaccaagggcgagaaggcaaggccacgtggaaacgatctcacgaatcacatctatgattatgttcgcatacgtgaatctcaaggtaccaaaactaagggcctggaagatcaaattgctgagttaactaagttcacagaacgactcatttcgaaacaaaatggtgttgtatatgattcagaagaagaaattttttaaccatgtgtgagaagaataatagagacacccttgcatgaacactgtagaatgcctcaaatggtgtttgatgaaggttggtccctagggcccacctatcgaaatacatccaactaatagaagtggaaaaggtaattagcaatgcaaaatgtcattatttttccttaactctgacaaaatctacaaaagattggtggaaaagactaattcctagatctgttcgtaactggaaggatctgcaagtgattataaagaagtaattcatagccgcaaaggattatgatatggaagtcagctcactgacgaacaacaaataacaagaagtacatttagagaatgatgggtgcagctgccaaaaatgatgatatgaaactagtgaacttaacctcagggatatctactggatccatttttataggaagagttgtaaagaaagaggtccaacactttatcaaatttcttggtcagggcccaaagtttgataaacctagaagaagcgtatgtccatgcttatggagtacttttgacaccatccaccaatgttagttgtacaactcagactccccaactatctactctaactattgtcctttcaagaagtacgctcacaactccaacagtggatggacctggtgtcttcaaaacaatagttgtgcatacaagtttctccgactttggagtggcatagccgctctcgaacaaacaagtcaacaaacaaaagttctagaattgaacacaagtcattaccaaaacaaacgaagttctaaggctccaagtcaaaatgaagctccaaaaaaggggtaaaatcatgaatcaaggtactttgagtatactagcctagttgatactcgagaaaatatttacaaagccacttgcaacatggtccactacaaaaatcctccgccaatgttcaaaggtagaagaaataagagggatcaaaataaaagatgtgaacatcatggcgatgtagggcatacgacgaatgaatgcgagtacttgaaagatgaaatcgaggaattggttagaaagggtcatcaatccgattgggctcgaatacctgtcatatatctcagacaaggatgagcacacatacaactttttattcttggacaacaagggcctataaattctcttaagggagtaggctatcctaaagctccaagaatataagctccgggtgtataggctcctcagggggtacctaatcccaagttccaaaacctattgttgctccctgactaggaaatccgcatccacctaggatttctatgcctatagtagatggccacgtgacaaccatattcggatacccacacatcgttggaagtaccagaaatgctcaaaagagatatcttaatcagcttgattaaaaggaaatgtacaatcttgtgcaaacacttactcaacgtccacaaatgatgaattttccaatcactttcacagaaaaagatgctaaacacgtgcactttccccataatgatccattagtgaatgaagcccaaattgcaaataaaagggtgtctagaactctggtggataagggaagttttgttaacattctttttaaaattgccttctatgcaatcgggcttgtggaaaccattctagtgccctgtccaattaaactccaaggatttaatggagattctttgctggcaatgggaaaaattcagcttccagtcacactgaaaggaggagtagctagaagcaatacaccatctgccttaaaatattgcacatttgttgtagtagattagcccactgcctacagtgtcatactaggatggccaatcttagtcaattttagagttataactttcatctgccacttgtgtatgaagtttccaagtgataatggaagcattggaataatgaagggtgatcagagaagtacaaaaaaatgctataatgtctcagccaaaatagtattcatgatctgagaaggaaatcaaaaagatcccaaaacagtatgcctccagccaacactaggcataatccaggaagaaaatgaattggaccctagagtgggggtagaaagaataactgagcccttagagaaggtagaagaagttttcatcaatgaagaagatccttcaaaagttattaaactaggaagaaatctacctcagaccatcaaagaaaaaattgtgtccacgatgaaaaacaattgtgatgtacttgttggttttatggtactaaattaagtacgcatcaggaaaatatttttgattatcatcgtaccatatcctaagatcaccatatgtatatatatgaaatttaaaagtaaaaacatgaaaagattatttaactcttgaagcctatcagggtatcctcgagtcatttcgtatgttgtatccttggaacggtgatgccaaaactcacacattgatcttccaaatattctattacacacaagaactagtgtgggctagtaggataaaagtgtacataaagtactgttattttgtcaagctaacacctaaccacatgaaaacttagttgggctttatgagtgtaacccattagtttagattccatgacttaacttagtaatgccatcctagggttggtatcgcactaaaatacatcacttcctcctatctcagtcaagagatcaaccttgaacaatattatagaaaaataccttccttagggggacagaaataaagtcgtctagaggccagtctatactccttcggtgttgacaaataatggagaccataggtacattgacatgtactccttctcccactcattattttaggtttatgtttttgttttattaattcccaaaattaatacagattaaccgctttaataattatggttaatttacttataataaaagccttatattataaataaatttctcgtcacaattattaaatcaaaattaaaactcttttaagttttataatttaaaactattttaaattaattaggttaattttaaattacaaagtttaattttaaattaatcttagacagtctctcttctctttctttttacaggcttcacttaaggttaggtttagatgagataggctcggaataaagacttgggctgaatcttactcttagggccgagtatacatatgggctttagagttagatttttgccactctatttcaactaatgaaataaaagtgtcttttctaattttagcacttttctcatctaattatataaatactaaatttattttaataattataaataattatcaaataaaatacaatttaagtatgtttattaatcaaatccacaaagtgtcttaattaataaataaactcatatttatcttttcttctcaattatgcccttccttagtaaaattcataaataagacgtagtcattatttagaatcctaattgattacataaatcagttaattgagattaaaaaaaatattattctagttattgcatggaccatgagcctatgtaatcatgctcccaataagtagatctgaaatttaccaagtaaataacttaacttattaattcctcctgactccagtatagactcagaattgcactcctgactacatagaatgctctatataccaaatatagatatgttatgaattatccattgttacaatctaaatagtaagtgatcctctatagatagtttaaattgagtagggactaatttaccattttacctttcaatgtattttatccttaaaatacttaactacttgtaaaatgatattttaataaactaatataattactgaaatgagtgctctgtcatttattgcattaagccaaactctaaggaaactatcgtttcacttttaatagaagctataaatttcatatttatgattaacgctcccactcaattgcactactaatttccaagatgtaagtatgagctagtcctacgagtaagctggtaacgaacaagtcaaagaatccgtatagtacaattaagctagaatttaacaatctcaggattgagatcaattgacctaagatcaactaagtaacattgacttagaaaagatataacggtaagtgtatgacatcttttccactgccaatatcggtccagttcaatatatagtggatacacccgatacttgtttactttgctaatgacctggaaaggatattccacttataaaaatgtaagaaaaccatatcgctgattatcatgtcaatataaatctagtgcactgataaatcgtggaactaagtagattgaagcatataattatgattactttccactgtgtagacaacactataatcataaataactatatgttcaggtttaataaaatttatatattaaatatataatcttgaaagtaatcatgtgaaccatgcaacataaaataatttttgatcttttattaa

SEQ ID NO: 14023 - DNA, 4713 bp, Cannabis sativa
cctaacagtgatctacatttttgcattgagttgtcttggtttggttgatgtcagcatattttggctgtacaggatgggattgaatgtagtgttggtcttcctttgttctcttttacttaactgctgttcccaatattgtgagaaagagagatttgctcaggttgatttgaatttagtggtagaggtgctcaaagtatggaacttgtgcagattcttcatgtctataaagtttttgagagttttttcttagttgaatccaaaatagtaaccagtagctattatattcctactgttcatgcttatggtttagccatttaattgtcaaccttaccttagcaattaaaacttatacaacagtagaaagttgtataaggcctttaacaccttttaggaacttatcaatctaccattaaaaatatgtttatgttgaatggatgtgcattgattatatataaatatatttgatttgttgagattagtttggtttctcatttattgaagaagccacgtctcttacacatgagttgtgagacttaaggaatatgctattcaagatttgttgtaagaaagagtaagcttcaattatgtggtgaattaaatatgtattatcttgggaggtttagaaagaacaattcccttgagacgattttggtgttgcctttgttaaactataagagctaatgttgaaaagaaaccagtatatgaaattgtatataatctctataaatatgagtgggaaaaaagtagtaaatatttagaaagaatttaacatgtcaattttgtcattagtgtagttttattgatcaaaatttaatctccaaatgaattgaagagaaatgatttaaaccaaattaaacattcatttaatgaatgtgttacagttttatcacttcacatgccatatttatgttatgggcacttactaaaaattgaatctttactctctcatctcaaattgagctggtaaaaaaggcattttttatttttagagaaatgtaagaagaagaagaagaagaagtcacttaaaaaggaaaaaagagggtattatctcatcacatcatatgtgagattgtgattagcttattatactattctagtattgtctctttgaagagagagagagagagagagagagagagagagagcccatttcagtttcagttggaatctaaagtgagtgaaggcaacactctaaccccccaaaagccaaagccaaaggcaaaggccacaactcaatcaacactaataacttcttcttccctctctttaaagcaatcaacaacaactaatcctctctcaaactcaaactgaaactcatccttgtttttctgcaaaaatgagtatcaaagtgttcatgttatctctagttgcaacctccattatcttctctcttctctatattcccactactttaacaatacccatcaccactttcaggcctaatcttattttgaatcactatgcgaataatacgaccaccccatatccagtgacctttgcctacttgatctctgccaccaaaggagatttgggcagactcaagcgattgttgcacgctctttaccatccgggcaactgttatttgattcatatggactatggagctccaaggagcgagcacagagatttggctgagttcataagggaacaccctgttttcagccaaatgggtaatgtttggattgttaaaaaatcaaacttggtgacttacagaggacccactatgctttccaccacgcttcatgcaatgtcagtccttttgagggtttctaagtgggattggttcatcaatctcagtgcttctgattaccctttggtctctcaagatggtatggtgagtgctgggtgccttttttgtgttcgatcatttgtccaattcaaaaacaaagtcttcatctttctttactttactgtcttttctttcaatccaactaataagggaaatgtggttggtttttggtatttggtttcagatctgattcatgcgttttctgagttgcccagtaaagatctcaacttcatacagcactccagcagattgggttggaaactgtaagcctttttcctgtcttagttttgatttttgtatgtatgttaattatgttgtaatttgattactgaactttgttttggttggtaggaacaagagaggtaaaccaattgtaattgatccggggctttacagccttaataaatcagagatctggtgggctatcaaacagagagctctcccaactgcatttaagctatacacaggtcagtctttttttattctcttcacttattcaaaatttagtctttttgtgtgtgtatgtatattagtgtttttgtctttttgtttaccattaaaaatagataataattagtaattaaaaaagaggaagcagaagtagtaaactagaagacattgggtttggccggcttctactcttttatattttatatatatatatacacaatggatttgaaattgaactttgaaaatctttgagattagtggtgaggtgaacatgtgaatttcttctgtgcaaaaatgacacgtctaaaggttgctgtaagtacaaggtacaattgttagcttggtgatggtgatgacaacccaaaaaacaaataaaataaatctactgtacaaaaagtgaaatgtatgttgtggtttctgataagctttgaaatgaaattgtgaaaacgtgggaggacccacttgaaagttggaagtggtggggggtaataatttggttggtttgttttgcttaataaacaactccaattctcttaaaattttcagctacttgaagcttgtttcttgggcttcttcttctgtttcaatgttgtcttcttagctcattgtttcattgctaatggatatgaaaaggaatttaattgttatgaagaaagatttgaatttgctaatgaattttgtaaaccattaccacattgcaatattagaatgtctctttcaatttttcttttttcttgatatattaattaatggccatacgatggtaggtatgcaactaccagtggctgtagataatgccatatgtcacatggatcttgaaattccatacattaagtcattttcaatccacctaattaataacaatgtcagccaatccaataatacgccaccagtaccaccctacatttttctaaaatcaaacttaaaacttactagagtagaggggagtagagtgtaattttggacatccatgagagacatgtgcactgtgcacattgcatagcagagtctggaagatgcatgtgcctatcacatgaaatggtaatgggaatgcaacgtggcttcctgctccatttcaatttcattttctcgggaatgaaaaaggacttgtttgtctctgtctgcccataaaaagaatgaactacttaatttaccatttcttttttgttttcctgctattgctgtattataatattgggaataaattaaggagttgaaccttaggcttcagacaaaaagtgggctctgcttaagaccctgcaaccacaccaccagtaattactgcttttttaatgacataatataagtaataatccatcttaccttcttgacttttttgggaaatggcttacactacagatgttactgaattattttactaagtacatctagttgagttccattgaaaaatgagcaaaaggaagctgtgtttgaagttatagttaatgagatgagaatgcaatgcaggctcagcttggacaatcatatcaagatctttcgccgagtattgcataatggggtgggacaatcttccaaggactctcctcctatactacaccaacgtcgtgtcctcccccgagggctacttccagaccctcatatgcaacgaccgaaactacaagaacaccacagtcaatcacgatcttcactacattagttgggacacacctccaaagcaacatcccaggtccttgggactcagggattatagaaagatggttctcagtaaccgtccctttgctagaaaattcaagaagaacgatcaggttcttaacaagattgatcgcgagcttctgaagagacgccggggagagttcagttatggtggatggtgctcggggactaggagaatgcgcagctcgtgctccactttgcagagtgacaagcatggtgtgctgaagccaggaccgggttccagaaagttgagaactttgttatcgagattggtattgtcgaggagttttcaaaagcaacagtgcagatagattcttttgacccttacttgcttaaaaaactattgtattccacgtgatttgattcactcatagtaatgagaaataattaattctgtgccattgtttctcttgaaattacatggagagaaaaagaagttgtaagtttcggtatgaaagttatggccaattaatgcattttctcataatgaataattacataaaataataccaacacattacacatggttattattaatgtactcaatttgaaaatggagatcatcatcatcaaatctaccttttcctcaatacatgtacaaaatttctgtttttgaaacgaatctatcattgcaaaaaagataattaaattccttgacaaatacaataaagtaattagaaaacaaatggtaatctaatgatattttaatgaaaaagtagacttttcaaagttttgagctacttctcttcttatagtagcttattttttcttctatataaaaattaaattggcataacaaa

SEQ ID NO: 14024 - DNA, 5122 bp, Cannabis sativa
tgaaataatacctattatatatataaaaaatagataggagatagttttattttaaaaaaaataaaataagaaaggaagaaaagaagcggaggtccacgtaagcaatgagagagataattatttgtcaaatgaaatcaattagcaaacacgcgggtgctaaacgataatgttaattaataaatttttaatttttaattttaattaacaatttataccaagcggaggtcatatatatatgtaacataactagtttgctctcccttataaatgctactccttttcacattcctctttcctatcgtatacaactcccactctctctctctctcttccgccattaaagctctgttctcaaggttttccattgctacaacctcaacctattctttacagcttagtagaacaccctctcaaactatcggtatgcattcaactctgccttctctttctttttgacacgcacgctacgaacatggtcaaaacctttttttttaatattttatttatatatatgtatgacgaaacagtgttcttccatgaatttatcaatgaatttgaggaggcatatatgtttctatacgcacatatttatgaatgtgattggtatggtatggcgatggcttttgtttttgtttttgtgatgcttcgaactttaatttgttcattttggtgaccaaaatagttgataatttggtcgatcatttactcttttcgttgttttgctcttttttattctttcttgaatcctgaaaataaattgtctgggattctttaaactcttttcatttaaaattttgtttactagtgaacccaatggtaatcataataatttatttggaccatttttcgtgctttacggggaaccaatatttgagatccattttcttaagttcaagttttttttttttgctttttgttaattagcttgccttaatgtagatttatttttcatcttccaatcattaggatttggaaccttgttatcctaacatagaaaaacttgagccatatgacttctcttgtacaaaatttgtagtctttaacaactttaaagacccatcgtttggcccctttatgcttccttcagtgagttatgtgttttcctaaaacagtcctttttgtattttcttttcttttgtttcaattgattttgtttggaacagagatcctgttcgatggctcaagagcgatataaaaactgagtttcattgtattgtgtttggttggagcttgttattgagtataaccaatagactctctactagtataaaataaatatatttttatctatctttggctatgagttcgattcgttatagactatattaaatattttctaaggtttgttggtgtgttggtcaagaataattatcacgttggttctctcaacctgtggtggttgaacagaatttatgctttggctaatttctccaccagaaacctggttagacttttctaagatttaaattgttagatctgatctctagtgggtcctcagaaagattaaagaggatgtttatcttgatgactgttgctagggaattgcgtattttcagtttctttatgggatccacctaaaatttgaatgatacttatttttaaatatttgttatcttcttgcataatagagatttaaggcaaaaaatttgctttcacatcttaatcatggttttaagtggaatcaatgttatttattgaatcttggtggaaaagcgtctaggcgaccagtttcagatcagtaccactgtcctttaatatctggtgttgactaggttgcttatacagacgtggaaactttgattgttaaaccaagcatgatattaattttattcctcttttttcaacttctagaaagctcaattataatgaaatactcataataaatctcttgatcatcacaatcattaatttcttttcagttttccctctaggtacaacattttgcctcagttttcacaaaatatctgtaactaatcaagagttgttggagtttttaagcttggttaattatgcaaattgacctttggtagctgggtccaagtccaacaacacttttatgatatcatacattcattttgtatacaatatacatttattgtgcactgttaaatggttgaaagatctttgctgaaacttccctcacgtgtctctgatttgtctctactacatatctggtttttttaaaagaacacaagtaactaacatagttgtttgtttgtatgatcagatctcggaagcaacccaataagatggccttagaggagtatcttcaagatggcttgtctcagaacagctctgttgaagaaactaaatcatcatgccagaaatggaaatctttctcagatgatctagataacaacccatcagcgggtttcgactgcaatatctgcttagacacagttcatgatccagtggttactctttgtggccacctctattgctggccctgcatatacaaatggcttaatttcgagagtgtttcttctgagaaccaagaaccgcagcctcagcctcagccacagtgtcctgtttgcaaagccgaagtcagtcagagctctttagtccctctgtacggcagaggcaaaactactacaccctctaaaggaaaggctccaaatcttggtatagtaataccgagaaggcctcttggtcccttttgtggggttgattcaccaagaactactagtacaaacccatacatgagtaatccacaagtttatcaacgtgattatcctaatcaaaacagcgtttataggggtggctatacttcacctatgctaagccctggtagcacagttgctaacttgttggatcccaatgttgggatttttggcgaagtggtttactcaagggtgtttggaaactcgattacaaatttgtatacgtatcccaattcttatcatctagtgggaaatgctagcccaagaattagaaggcttgttatgcaagctgatagatcactcagcagaatcagttttttcttgttttgttgcgtagttttgtgcctccttttgttctgataacacatttgtttttatctccctcacacatagcactaatgtaatgtaaaatttaagagtaaagaatacggagtgaaataacagaaatacaatcatcatacattttctattagtttttgtttgtccaaaactcaattgatcaatctgcacaactttacagcgtgtatgtataattgtgcaaaactgtgcaatgcaaacatacacatctcacacgacatttgaactgacagaatatggaatggcttccacaaacaaatcatctaatcttaggtctgtttcaatgacgtacgttacaatcatatagaattatcgtttttggaatggaactgtggtcctttacacaaaggacaatagttctgttctgaagtatgggttaaagataagatttggttttgtgggcatccagaaaacgacaacatgtaagtagtgatcataattcagggttattatgatggtattagcaatggtccgaaggaggcggtccagcctttccaaaccaaaaaaggtaaatatgattaaatattaaaagaccacttcaggagtgggcggtagatgagttcataaatgtccccatcataataattttgtccaaaactaaaaccaaaaggtgattaaaaaaagaaaagaacgacacggaggtggatgcgatggtcttggcggcggcacggcccggaaggggttggtaaatggtaatgtggccatcgctgttgcttgttgacccttcaatttgctcattcctcacaaaaggagtcattggactagtggccacttatttttttctagatgatgctaccctaccccaccgtttattttgcctgcccatacgtttttagaaaaataataataataatataataaaagattagaacaagcaataaaatatagacctagtggccaataggtacttgtaaatgtattagggataatatattgaaattgtaaatgtatataaaactaataggattatcacttttatatactatactaactaatcacagttactcttcacacaaattgagttataatttctttcgaatgaaataaaaatgcccatattcgtactatttacatcatcttatgagtttaggtacaactacccgggtctttgcaagtccatcaacgcaaaaaactaaaaaagaaatacaagccaataattaagaatggaaccaaaaaaaaagagaaagtgtgtgttgataattttgcatgtttttctcatctttttattattatattattattattttattttaacactaaaattctaagagtaaactcaatagagaaaacctaattggcttgtaaaatactagtgatacaatcagaatgatcgtgccactaaatataataatcaattaaggtaagagctaattttgctaagtgtgccacactattagcaaacctaagacaatactgaaagaaatactattattttttttttaataaataatcttaactatacaatctaaataacaatctcattattaacttctctattttattcttcaaaaataaatcaccaaaccttattttctttattttatctcacatttttatattatattatacatcaatttctttatatttttatcgatattattaaaataatatatattgaatacactaataatgtgtaaattaataaaatattatattatacattatatataactaaaaatagtagtaataaagtattataaaactaataaaataaattttagctcactttctctccatacctacatgtggagatgagaatgcaaatgtattattagctaaattacaaagaacttgatggatgagttaatatgaacttttagcaaaaattttcaaccttttggctattataaagacactataacagtgttcagtgctctaagatagatcaatcttacatataatctaatgggacactaaattgatgtgacatatcaacttttttttgttgataagaaaaaaatttatatattgacctaaggtcaaccccaatgggtatgcaaaaactcaattacattgtgatattacaccaaaaccaaattcaaccgcacggcatttgtataattatttttgggtttatttatagtgtcccaccatattttggtggg

SEQ ID NO: 14025 - DNA, 7376 bp, Cannabis sativa
  modified_base (6423)..(6433): a, c, t, g, unknown or other
tctctctcacacacacacacacttgagaattgccaacgttggttctcacattgtaatcttaagagagccacttcaaatcccactactattgtgatctgagtggtattatctctcaccaaaatgggagtaggtcattacccgttaactaaggggaccgaaccactataaaatcttgtgtcttatgtaacacgtggcaaacatcaatattaaatacgatttcactgtcatttggctaaatatgaggtcaacatctttaatttaatgagacatactaaaagacataaagataggctcgctattatttcaggagaccaacctagagaatattctctgattggttgtggcaaatgggatagtttcacttcttagaattccttggatgattggcatctatgggttcagggatgaaggcatcttttaggcgtatcaattagtgagttccagggtatgtcacctaacggactctataggggtccaatgagttttccaatgaatcctcatccatattatcttttaagtctctgttatcttcttccacacaaatatatctctatgctcttcataaaagtcatcgagattgtttaactcttctttcatcatgtttccccatagttttccctcggagcatactttagtagttatgaccatcttgagttcatcctttaaatccaattctatcctaaaatttaatagaatccaatatatttgaaagaaaattatcttgaaaaaccttgagttttctaatctgaatcttcatcattcatcaatcaaaaatccaaaaaacccaaacagagcacaataaattaaattcatcaatgggaaatttacactcacatacattatattgaaaattattactaatttgttaggtatattttaatatacttacattctaatattaattaacataaataacaaacattcaacatttaattatcattctattatggctattattattttttttaatttaataatgtgtatataaatacaatttattaaattgactaaattaatatatttctttttaaatatttctcaacacaaaagcaaaaaacaatttttctatgctgattttcacatctgaatgggtatattgatagaaaaatataaaaaagtacacaatactaaatttgatactcgttagcatttttttaacaatttaaagtaacctagtgttattgtttatagtaagacttttataccatatgagatcctacataattaggttactaagtgatatttttttacaatgtgatactatgacattttataacaataagctactaacgtaaaatgcatcattattatataattcgatattaattggtatttaaaacaacatgccatggtatctaaaataacatgtcatagtatctaaaatatttttgattatagtatgttatataatactttatggtatcatacaaaattaggtactaattagtaaaatatatatcattataatttaatttgacaatatagctaagaaaatttgatgctattgtgtattagttcccattaaaaatttctttattcggtaatgatattttgcacttaattagtaaaattataaaaaagaaagttgtaattggttttcatatatataaaaaaatatgattgtaataagctatatataataataaataacataattagagtatattatttttttaccaataaaattgtcattatttgtctctataagtataattgtgtaaagtcactttatcaatacacatgttttaatcaaatttcaaatatgttccaaagaaaacaattttttttataaataacttgatatgcctgtacttactaaaactaataccagaagaactcagtagcaaaaacaaaaccaagaatttgatttaagaaagaaaaaaaaaacactaataattgtacatcttcagtatccaaattcattttttaattaattaaatttcttttaaaatattaaatagtaattatacttattcatcaataagaaacaagctaaggatttaaccgacaaaattagaacaaaattgcagttagtattttaaaacaaaaattacaataactgagaacttacaaccctcagaagttgaatgactattgaagggaacagcaccaagaacaaaccactgtattcaatctttgcaacatcgggcatgtgtgatcgtttcaactacacattccttcccacaacatgtattcacttcgctctttcagctgttattcttcaccttcctttctgcaccaccttgcgagctccagatgcttcacatgaagatgaaagatgaaccctcttcttgataatatgggtaccaacctggattcaaacaagactacagtaaagatgaattcaaaccgtataatgtcaacaatgacgatgttcgtatatgaattactatgcagtaaatagatttactaagatataacaatgcaagactaaactatagaattagatttgatagacattccattaaagaataaatgtaaatcagtatttagctagtaaattaaagcaagcaaatgttacatccatacaatttgcagcaagaaaaaaatagtgcatagaactaaaacatccaacaaaaagtgcacaaaccaggctggtatgcacaaacacaacagaacaacgttagagttgccaacaagtactacacaaaagcaatcctatcttcctatctccagtataaagcaattagagaataggacctcaatagaaaactgtttataaatatcatttgtgttataattaaacaaggtcaatgtagacatggtaagatggaagagcaccacccattgcattagtggaaaaggagtatcccacataaacagaaagttggaacttctgataacgaatgaaatagatgtacacaacaattcaattacaacagaacattaacaagccacaaaataacttgctagaaatccttcacgacactcaaatttagagattcttgattatacagggttcaatagttttcaaccaactgtggttaggtagctaattgcaaggtgaaccttccctcattcgtttagtaagtcaatggagagcccatcaggactacctttttccatactcaaaagcaggaatattgtgcaagaaaacgtgcaacagttcctccacatgagtccatgactacgcactttaaaagagttgcatctacaggattatctatattttctaatttattatgactgttgatcaactacttatcaaggggtcaacacgttttagaatctctctacttcttctttttaatgtttttcccaatatgatgtaacacacaaatatatcatcatttgctttgctttcttcgcaaattccccctccattcaatatatgagtatcccttatcttgccatccgagcccaaagtgacaaattgagtatgtagtttcacgttctttctcaaagcatacaaatccaaaaagtaaaactcaataaatataagagcacaacttgaaacaaaccttgtgtatatactcttgcagcaaaatagctgaatctcactaactaggagtatcgtttggcattgaccttcccctgctactagaaagatttgatctccctcttgaacttctaccatggttttcagtttttagcgaaatttgggacgaagatgaagatcttcctctagtcctgccagaatgtttttcagctgacctcctttctgaatttcggccccgccctttcttatctgaatatggtttcgttgatcttcttctattatttgcaattgcaacagcttcttctacaccttgcttactgtcatcatcatcctcttcaacatcagaggagtggtacaactccccttcattttcttcctcctctatacttccttcctcctctttacttccttcctcttctttgtccccttctttggtatcagaagtagtctgcttctgcttctgctttttagcactaccacttccaccaggcacacttatgggtttactatcttctttcaaagtgttcataagatgaatgtacttacttctcatgttcatcaatggatgattctcagttaacaaacctctcttataaccctcctttaaaaccacagtatgagtttcattcttacttgacatatagaatatacctggatgataaagaagtgccctcttaaaccttgatcttatacccaaatactctccaaagcacaacacattctccctctctgtcttcttcggagccaaaatatgcagaaactcgtgcaaaaccgcaactgcccacttatctgattcatcatccttaggaggaagatgagttgcattttcatagggagaaacataaggcaacttctgccaatcatcttcccacttcttcatgttcttatccatttcaaaacctctagataaatgcatagggaaggcaataggcatccctttacaataatcggacttgccattcatcaccttcttctccataactgaagtccccatttcactaatccagcaaacgagctccaaaaatggtccagatgagcgatctttggcaactccaattcgaaagtagtcagggaactcggggattaagctctgctgatagtcttcaggaagacccacatcccatttcaggcgctcgacgagggttaacggcagtttgttggttctacagagcatcaagagcttcaagagccgatcagcaacctgctgcttataactctcgctctgatacataaactgttcttcaacgtcgatgtcgaggacttcgggtgtgagccgtatatggggttggaatccagtgccgccggggaggaactcctggaaaatcgcggggtacttgcggacgaactcgatgggacgagtaggtatcttaagggagtcccttttttcggcgataatggagatagggagagagttggagggctctgatttgattaagttcttgagtttgatcatgggtatgagattcttctccctctcgacggcgtggtcgaggccgcggtctctaacccatctgatggctgtgccgtcgatgaaggtccggtagtgatggtgtgagtgggggcggggcttcggcagtgaaatgaagatgaaacggagaggagacattggctttggtacagagccgaagaacggactcaagagttttcggtcgtgcaagggtttgggttttagaagggttttgattttggaaatttacataaattatccttttcttaataaaaaattacatttaagtacaaatggtacccctaggggtccagttaagagtaagacatcatcttgtgactgtgtatcaccaatggtcatgataatggcatttgttggagtagacggaggatcatcatcatcatgttctcaattttctaggtacacatcatcgtcatgatcacaggagtggtgaacctcatcattaggcaattaattagtaatcttcttattgtggctgtggttatggtatccctccttcaacaatatcatcaagtgcccaaccgagccataaataactctttcatttttttttgattatccagaaacaatgcctcatattagtttggttgttcagtaaatttgtttgagatgatataatcatagattgttgcttctcaattctatccaacctctcctccaacgatctatagtcaggtgtattagctgcaggaactatattaaatggcttggctagatccaaatgcggtggtgggggaactatattcgccttactcacaacatcaacaatcgtctttgcttgtgtttcaaacatcaaaccttgtgtattatcgtcgtccacctggtcatcgatgtccatctcaaaacaaagagggactttaccctcattgatggaccagaaataatcctcttcagtaggtcgggagcaaaagcatttctttatgaccaactgcaaacaaaagaaggaaaaaagtctttaatgttgcaggaaaggttgccaatatgtggctaaatattacaaactaattcaatttttcatttaatgtagttactcatatatattgtaaaaaatattgaacatcgccaactatgttgctacactattgtgcgttttattcatacatgtgtgttgtcaacaatatcattaaatgttgtgacatgtcctacatcgtgtgcaactatattaaatgttgttcacggatgaaatgtgtcgcaaaaccatatttttatatgtcgcaaacatgttgttaaacccaaaaacagctaatggtacattgctagaactagaaaaaaaaattgcaacaaaaacaattagttgtttaaaaagcatttaacaacttacccttgtattaagcagtagtgcaatgtcactcgccttcacgtcttgtttttttttgccctcagagcttttccaatttatcatcatagggaatttagtcccggtgcacacaacatatctcgttcccactttctatatggcctcataggcccaatactgtatgaaaggtgtgtgacagtcagtagtcccatgatccgnnnnnnnnnnnaccgggtaagttgtgtaatcctacaccgcctggggaatgtcaagtatgatgattctgaaactgtataggtatgggactacacagttgaagatggcttaaatggattgattggtactacatatatcaataaggtgcatcttgttttttggtagcccatcacgaaagaactccatagttaaatgtgcttgacctgggataatttaaggatgggtgacctcttgggaagttttcccaaaaagtgtgcgagtgaggacaaagcacgctgaaaatacttgtgttggtctgtagggtcagtcatcatttcatgaagcagccagagtgacgtactcgtgtataagagtcatcattccgtgggtgtaaggatccaatggaggcttgaaacggggacgttacaatgtgcgtagccatgtacattatacttcgcctcctgagcaaccttcttgcctttcttcttctcaatgttctgcttataatgcatcatcatagaccacatcaacttatgaaaaacacactcgcctcatgtatatttgaagaagaacttgatgtcttcaacaaatttcagcatgtttggacaaacaatgatgttgccatattttgcaacaatacaccctcaataaaggcgcatagtccgagcttgtacacatcatctttatctttgcatctctccagttgtagcataagtgtattaacatgcacactactcttccctttgaaatacatcctcaaaaagtggtcactggacttggcttgtatctcttcgtctatagggaaagtacccatacttaggtcagttatcagaccgaacccaatctgtccaaatctcatatcagttttacccacatgaaaccatatctcatcttccttttctttattaactttcattttttgcaacagtagttggtgcaccaacgcaccagagaaagtaggggtgttcatccgatcc

SEQ ID NO: 14026 - DNA, 16679 bp, Cannabis sativa
  modified_base (262)..(262): a, c, t, g, unknown or other
  modified_base (11457)..(11466): a, c, t, g, unknown or other
attgacttagaaatatataacagtaagtttatgatatcttatccaatgtcaatataggtctagtctgatgtatactctatgcattcgatactagcatactttgtcaattctggaaaggatataacacttattcaaggtgtaagtaaactttatcgatgattatcatgccagggtaaattcagtgtactaacaaagcatgagacttaaactttgaaatatataatcatgattatattccattgtgtagacaacactataatcntgaataactatatgttctgaatttaatagaatttatacattaaacatataagcatgaaagaaatcatgtgaagtgtgaaccatgcaacatacaataatttttttatcttttattaattactaaatctgattatattgaaatagatttatttatgacataaaatctcaataagggctttctctactttgattacctcgacgttaaaatacttaaagtaatcttgtaaagtctcacttgtatcttgtttcatgtttgctaaagttgtatacgtcaatttatatgtcatggttgcttgaaaatgagtcaagaacaaatccatgaatgtctcccacgttgagatgactacttcaggcaattagctgaagcattcgtgcgcatgattctctaaagtcgcggtaaggatacgacacttagccaattgaggtacatgatcaaattccataatagtgttaaatttatcaagataatttataggattgacgatacctttatatttaagcgactcaaaaagtctgaaacctttggggagtctggcttgtcgcacttcttcggtgaagggtgatgttccatgcaacttatagatggcctttctctactgctcaatcatccttagcactcgcagaacaatctcttgatcaacccctcctggcagcaggggattattagcaggtgcaatttggtttcccggtggtggagcaaccagtgctatattcgcgggtactaccacatcgttgggcacaactggtgcaagtggtgggttaacgtccttttctgcattgtttgtatttgtaggggggataccttgattggccaaaaggggatcacaagtttcctcctctatattgtgattcctcgggatctgggaacatgcgcgaaacacttcgttgaaggcgatcttgcaggtcgcctctctgcacatggtaccttcctcctagccttgtgaacaccgttcctaacttggtgtaaacactgggggagcgactattagtcctcgaggaaaaggaatgagattcgacattgtttacctcaatttgtggttgtccatgactacgcaggttgcatcgttaggatctttctcttcctgaggtctttccacccttcgactaggctattggtttgtgttaggaacaacatgacctctaccgcgtacggggtcacaaataggttgattcaggtcgagtctagcgtggttattctcacttgaacgttccatgcaattacgagttgtgttagaaagtgttcattatgactcctactatcattagttacctgattatcaatgcaacatcggtttaggactcttaatggatgtcgatcttgcatttggtcttttcctgcgatctttgcttgtaatgctagcatctattcctatatagctgtgtactgcaaggtttttagttagatgattccttcagaggcgacgacgggcgtgattggtggaaactgtccatggtagctattggtgttgaggtttctccagcatgccctgagaacttaaaaaataggatgaggggaatcacaatggtacctcttactcctcctatgacgatatcaacgggggctgttccttcctccgaaaatgagaacattgagagtgccaacgttgaaagattcattgttgttgttcgtgtgcgtttgatctgtaaccatttttgattctcctccacaatcttagaaatataatgtttcccacaaacgacgctaaatgttgtcagagaaatttgaacaacaccaaatattgtcaatataaaaaaaaatagaatattcaatagcaattgtgctagtgctcccttagaatagcgagttcaaagtataagctactaaatagacaaaaaagaaaggaaatataaagagaaaacaagagaattatagtggttcagtcagagcttggtctgcttattctacttttggtaatgattttagcttagtttatttgttttggatcacccctttatatagaaagtaagtgccctttagaattacataactgatcggtttaaaattatttttttttacaacaaatgacattgttaaattaaaatcaaagtttaaagaataaatgaagaacaattccgtccgttcttgacttaattgcagcaacgtatgcgacttgaaaagtcgcatcttgtctattcatattccatacacatgagctcacgagctttatggtgttatgctcgcaagatgggcctttcggcctgatctgtttgaatgtttgcattcacttttaatcccataacagaacatcccatgcgtcgacaacttgcaacatgttagtccttgacgagtcatcgaacatattagtcatttagaccaaacttatgtaaagaaacgatctttactcgttgaatgagagatatacttgatcatcgcatataatcagtatacgcacgaccaatattaacttctcttgatcctatttattcttatactacgcaatgcattgtatgcaattagaccctgttcgcatattctcgcaagttctcatcaagcaaggtgagatgatcattctttaatcattttttcctacaaaaattggctccacatggcaactttttacaagactgagctcgtatttctaggtaaaaaattcagctataaccttaacattaaatggtttcctcgaaataactcggccaaccaatgattgttcaccaaattcgacaacattatcttcattcacctcccattcttcttctagttccacaatcaacttacttgccatattaactataacctcaacaacttcttgtatcagtgttcaccatcaatcctagcattagaagaacaccaattattgttgaaagagggtcaaatcgactaaacagaccaaacatgtgagttagaccataattaaataaaatatctaatataactataatacataaaaattgagattgacatgttgaacaaaaatacacataattaacaatataacaaactacaattagtggtaaaactttctcaaaccagaataacttattttctaactgaagatacatgttttgtcaaaccataaactgtaaaattcattttgcgaactgccatcgaaaacttaaataatattagaatttgggataatatgaatgaagttttatctcaaaaccaagtggctcttttgctctactttttgaattagtatttttggatctttggtggccattttcttttgacttactatctccgaatcacaagtgtctattttttggattagtttttttttttgaatttacggtggctcttttctttgttagaggttttttgttttgtttatttttgcaatgagatgaatttgaagataaaatgaatgagcttcgattttaaaattaattagcaataaaaaaaatagtctattcatcttatatattataattgatttccacacaagacttttatgtaatcttttaatgtaccaaaaatacaaaatagccatgataaaaaaagcaaaaatcctatctaagaattttgataaaaacatattttatttttaattgttgtacaataatacttgtcttaagaagtttggtgagtatttctttttcaccttaatttattattattttagtttagacagaaagaagtaggaaggtttagtgggaaaggtgtagccgaaaaattgaaaaaaatagaggggcattttgggaatatacaaaaaatagctcctttctctctctaaaacccttcatacttctacttcttctaacttactacatattattttctctctctttctctctcctcacctgaaaattttgataatttctccattttgtcttttttatttttatttatttatttttcttaaaattaataattaattatttttatatttatttttatttttctctctcatttcgtccatggatctgcttcgcttcaccgagatcttcacctgagattactcctgtactccgccatagccgaagtactaagcttttcttcttcttcttcttcttcttcttctctggtgagttgttcttcgattaggctttggaggaagaagaagaggaagaagagaataaatgaaagtgccgtgttgttccgtttgccaaacgcggtacaacgaagaagagagagttccacttcttcttcagtgtggccatggcttctgcaaggagtgtctctccaaaatgttctctgctagtcccgatacgacccttccttgtcccaggtgccgccatgtttcccttgtcggaaactccgtacaggctctgcgcaagaactacgctgttctcgccctaattcattccagctctaactctaactcagctccacctggtgctgccgctgctccgaatttcgattgcgatttcacagacgatgaggaagatgatgatgacgatgaaggaggaggagcgggaggggacaatgatgttgactccttcttgcgccgtcgatgtagtcgtgcttctgctgcatcgagctcgggacggtgtggaccagtaatcgaagttggtgcgcaccaagacttgagattggtgaagcggataggggaagggagacgggctggtgttgaaatgtgggctgcggttatgagtggtgttggggtagtgcgttgtcgccaccatgtggctgtgaagaaggtggtgatttcggaggagacgagtgtggattgggtgctgggtcagctcgaaagtttgcggcgtgcctcaatgtggtgtcggaatgtatgtacttttcacgggtttacgagaatggaaggctcgttttgtcttgttatggacaggtgttacgggtctgttcaatccgagatgcaacgcaatgagggcagactcactttggagcaaatcctaaggttttctagctttcttatctcttttcaccctcataatttacttgatgctatttcttttgggaaaaaaagttgtggaatccatgacttgtttctggtctatttagtgtttgttcatggtgaaaaactgcgtgttgtttaaaaaaggataactttgtggatgcattgacctcttgtgaaattgcacacagaggctttactaatgggggagaccaaaagcatggacctttaggatctgagaactagacttaacttttacaaagtggggtagattgtttcttgggtgaaacataaagcaggctgtgattggtagctaaagaaaagtattgcatgcaatgaaagtttatttcttttcattgttgaagttggttacatataatatgaatttaatctagaaaacaaaattcgtttatgcttcatgtatcaattttttctttcttcaataacctttgtgttataaatcctccatttcattctaatttttgccccttctgagtttacttggtatccccatgctccttctaacatttaggtgtttgcttggttgcaacagaagttccgatgttttgatttctctttcataagtatattttgaatagaagtggaatatcataaaacgattgcatttcactgttaggtggcttttgcatttagtttagactgctaaggaatagaagttcttgcttgtgtttctatttaatttatgcttatttaggaatttaggtgcgcaaagcatattgtggaaacatgtttctgaaagtgtggtgctagccattctttgggatctttagttagagaggaaccataggttgttgagggtgccaagacattgagaatgaagactttttcatggtttaaatttgagtatggatctccaatcataaagacttcaaagatggtccatctttaattgtcttagattcgataattggtttttttttttggtgttattggtttgttttgttgctgaacattaagaatatgttgtttgctaattcttgtgtgtgtatacatatgtattatctaagtgaatttagtagtaatacattttgagatataatagctatttatttatcatcacactcaagtttgaaaatgcaactgattaactttgcaataggtctagcaattgaaatttagtgtatcacactttgaaggtgtggtattaacattgcactataataagtactgcaaaataaggttaaggattttaaattaaagagcgttttgctgacacactaatgccaaatcgtgaacgatatttagaaaacccccaatgttgtaaatttttttactgctgtagcggtaatcaaagtatactttttttttattattttactataactcactaaaagtatgttcgaaagtagattaaatatttatgccacttgtatttttgataagccttttctattctatttaggggaaaaactttgataatatcaccaataagcttataacaatcttgatacattcaatacgttttcctctatcacatcattactataatatgatgaatgtcatgatggatttttcgtaatacactaaaaatccatattataacgcagaaagttagaagaatgaggtgatatgttcttctttaactggaagatccactatgaatgtttgtactatcatttttatgtaactggcaatgaaattcgccttgaatttttgtaactttgctgtttttttatcatcaacttataccacaaatttcaaaagtacaaccatacgattaattatttaattatccttttcaacattttcatattttatgaccaatgaccataaaatatgtaccagcaagtaaccatacgatttttatcctattggattttgatggcttttatcactgcataaagaatccaatttctaattgtatattatcatggcatgggtattttaatatgtaccagcaagtccagatttcaagtactagctggccaattctgaggcaaaaaaaaaaaaaactagctggccatgtattaattgggttgtttgtctattaaaggtgcacattatattatgtattgaatgttggtattttagtatgttagagtatgcacaaagcttaatccagggttgtagaaaaaaaaactattttgatggaaaaaaattcagtgcaccactacaatagatgactgaaaataaagtaacataattatgagttttttgttttgtaattctcacatatggagtattttgtaattgtagatatggagctgatatagcacgaggggtcgctgaacttcatgcggcaggtgttgtgtgtatgaatctgaaaccatcaaatcttctattggattcaaatgggcatgcagtggtttctgactatgggcttgctgcaattcttaagaagtctgactgtcggaaatctcgatcagagtgtgataccacaagggtccattcttgtatggattgtacaatgctaagtccgcactatgcagctccagaggcttgggagccagtaaaaaagtcgttaaatttgttttgggatgatgcaattggtatttctgtagagtcagatgcctggagttttggctgtactttggttgagatgtgcaccggttccatcccgtatgtctaacaacacatgtactagttaaaaattttaatctttttcatcacttatggtgacatttattttgtaggtgggcgggcttaagtgcagaagaaatttatcgagctgtcgtgaaggctcgaaagttacctccacaatatgcaagtgtagtaggtgtagggatacctagggaattgtggaaaatgattggtgagtgtctgcagtttaaggcagccagaagacctactttcagcgcaatgttagctactttccttcgtcatttgcaagagatacctcgtagccctccagcaagccctgataagtaagcttttaatgttttgttcatgtctttttccctaccatgtgtctgtacattgttagttcatcagacttattgattgttgattcttgtggatttttccaatgaatgttctctctgaagatttttatgggtgaacgatatgtcacttttaatgttttagacagttttaaattgtttctttttgtttgtatacagtgacttcgctaaatgctctggatcaaatgtgacagaaccgtctcctgtttctgatccagaagtattccaagataacaccaaccttttacatagacttgtgtctgaaggggatgtaaatggcgttaggtaaacccttgacttaagtctcttttttcattgtatccttaggggatatttttgtcatattttctttactcttttatcttactcagagatctgcttgcaaaggctgcatcgggaaatgatagtactgcaatatcttcacttttagaagctcaaaattcagatggccaaactgctctccacttggcttgtaggcgtggtagtgcagagcttgttgatgctatcttggaatacagagaagcaactgtggatgtgcttgataaagatggggatcctccgcttgtttttgcattagcagctggctccccagaatgcgtttgtgctcttgttagaagaggtgctaatgtgaaatctagcttaagggaagggtttggtccatctgttgctcatgtttgtgcttaccacggccaacctgattgcatgcgtgtaggtgttgaagctaattagataaatcaatgatttgcgtttgatgctctttcctgtctgacgagattctctctctaaattattcataacaggagttattaattgctggagctgatccaaatgctgtggatgatgaaggcgagaccgtgctgcatagggctattgccaagaaatatacagactgtgcccttgtcatattggaaaatggtggctgtatgtcaatggctttttcgaactcaaaaaatttaacgtaagtataaatttgaattcttcaactttggttggcataatttacacacattatgactcaaatggggaagaaaaagaaagtttttcatgaactgtgggaagtcaacttttgggctccagacatgaacatgtttgtaagtataagtactgagaaaagggatagatatgagatgtttggtatgggggtttgagttctttggaatggaaatgtaaaaccaaacttgtgtttggtataattttagttgagggcttatgattgagtgggtcccacttttaagtttattttttggggtaatctcaatctcgttaaatatttgagtttgagattcccttaatctcaacccctctcaactaaaatccacaaagtgaaacttttttttttttgagaaagagaaggccaccaagtgaaactcatacaccaaacatcccaattgttaatacacagtacatttaccatatgatgggagagggaaatatggaatgattgacaacaaagattggataaaagtttgtgatggaaagaaaggagtgtgttggtgcttgttctgcttctgtgtcgtgtataatattttgttggatattatttgggctaaattggaactggatgaagaaaaaaaaaagaacagatttgctgcttttaattgttcagtaagctcgtttttatttttctttaccagacttgtatttttaagcggccttaaaataactattcttgctccgtatgtggtttaattcatgagtcatgactcaccttttcatgggaaaatactgttattgtcccatgttttctcaataaaattcccattatcttataaacaaaaaatgtcaatattctcattgatgaatttgagtattcatattatttctgttctcgatttaacaataattagtgttgagaaagtttttcttttatttgtattggaaaagacaaatgcctaaatgtatgtttaaacagaaaaatagatgttcgttgtcaacaatgtaaattacaaatatcagcaacagaaaaaaaaaacagaatttctgatcaataattaatgaaattatagttgaaagaacatgatgaaggaattcaaagcttgctcttttttgtatatatatatttatataaaatgcttgaaatgttttccaaaaggtggctaacttaatgcttcacttctgggttgccatttacggaatccctttggatgagcagcctgtagtttttgttgacgtctatcttacatcatttttttctttcattttgatgtcattctaccctgacatttctgtggcctttgagaaaacagttcaatttgatatatgcagttcaaactacatgtttattttatcttacataagagaaaaaaaaagcactatttcacttctcttgttaagtgtatctgtaaacctgcagcttttactagttatgatcttctggtgcttgattggttgttttccagtgtttcaaatggagctgcaataatgtgcattacaattagattgaatcattggaactatgtgtactgttacttttgaatcatgaatgctaataaattcttgtggtgtcaccagaccattacacttatgcgtggcaacatggaatgtggctgttgtaagaaggtgggtggaagttgcaactccagaagaaattgctgatgcaattgatattttcagcccagtcggtactgctttgtgtatggcagctgcagtaaagaaagatcatgaaattggtaatgctagactttaaactagatttgtttgaagttacttgattattatttatgtgtttattttcttagaaagagcaagatttatcttaaaaagaagcatttgtatccaagtacagagtcaatttggttaagggtcaattgtcttctttatactttttctctacattattgcatttgctcccagtataataataatgattatttttatgattgttttagaggggagagaaatggtgcagatactgcttgctgctggggcagatccaactgctcaagatacccagcataggcgaactgcactgcatacagctgctatggctaatgatgttgacttggtaaaggtatgcaagattgcttttatagattattagaaagtcttaagcttttattgattctacagtaattattgtgtctgcttctttgctttctcggattttttctatagctttttagatttacattgttgtgaatttacaattattgtatagatcattcttgatgctggagttgatgtgaacatacggaacgatcataatacaattcctcttcatgtcgcgctggccagaggggcaaagtcatgtgttgggttactcctatcatctggagcaaattataatttgcaggtttttcttcatttttctagaatttatttttacattttacagtagtatactttaaagtttaaacttcttatttgttttgcttatacaatatcaatatgatatttttttttcctacgctagaaatgccctcattttcttcattctgaatcaatcatctattattgtatggttctctctctctctctctctnnnnnnnnnnctctctctctctctctctcgctgctttttgttttttttcttttcaaactagtgtttaaaattggttgtcttcaatcactttttttttttttttttgtaaatctcaattgttttctttaataaaagatatattaggtgatcctaatcctatatcatcttctatgtttgtacaagtttgaggttttgtttctataaataaaataaattatattgcattagcttcactatatgtcttcagataaattgtgcattgccatgtgacttgtctgctcacttcttgttctagtcttttctcatatatcttcacatttatttggaatttcagctgtctttttatttaatgtgattagtattattgctggctaacaatttctgtacacgttttcaaggatgatgaaggtgagaatgctttccacatagcagcagatgcagcgaaaatgatacgtgagaatctagaatggcttattattatgcttcggaatgcagatgctgctgtagaagtcagaaataacaggtaagtggcgattgttcatattgcttattgatttcgtttgattattttatatggatacattatcagtagaaagataattttttaacggacatttaggtcactcatggacatgtgacctttgtctcttttcaaaacaagaaacagaaagaaaaaagaaaactaaagataaaattggaaataaaaggaattatcatttttcaagtctatattatcttcttcctttttggggatgaatagtttgtactttgctgtagtttaatgggttttctacaagtagtttctgctctcctcaccccacccgacccacttcttcccctgtggtactttttgcttaaaaagaattcaagtattgtttgtgtatttagaaaaggtattacttccatgctaaaaatgcaacaatgtggcaaggcagtcatatttagtctttttttcagattttattagaggtctgagtatttggctgtaactgttgatgacagcttgtcatcttttgtattctctcttttcgtcaataatcattttgaattgaactgattacaatcattttgcatggtgacagtggcagcacattacgtgactttttggaggctcttcctcgggaatggatttctgaggatttgatggaggcacttgtaaacaggggagtccatctttcgccaacaatgtgagtagaaaagtaaagggtttttttgtcattgtgttgatgttgaatttttacacggcttttggatttttaatcagtactgtgtgcactctggtgatttagatttgaagtgggagattgggttaaatttaaaagaagcatcaccgctccaacatatggttggcaagatgctgaacataaaagtgttggctttgtccaatttgtcccagacaaggacaatctcattgtgtcattttgctctggagaggctcgtgttttagcaaaggaagttgtaaaagtcattccactggacaggggacaacatgtgcaacttaaaccagaagtagaggagcctaggtttgttccaactgtgtgattttgtaaaaatagaagtagttctgtggttacctttggttggttggctatttctgattccagtcccttttttttcgtgtgctacaaattgttgcagatcccagtattcttttttgtattatccctaatgttttcttcgattccccttgtttccaataaaattatttatttttattaaaaaggagttgaatgcttgtttgtatggagtagtgaattatctatctccatcattaactctgatgtgttaaataaatggaactatggctaatttttgttgtgaagcagttttgattatgcagtttgaatgactttagaagtagaatatacagtgaatgatttcaaacattgtggatcttctctctgcttctttgctacccacgttacttgtgtattctaattagattgtgacttcgtcgttcatttgttaggtttggttggcgtggtcagtcacgagacagcattggaactgttctatgcgtggatgatgatggtatcttacgagttgggtttcctggggcatccagaggatggaaagctgatcctgcagaaatggaaagagttgaagaattcacagttggcgactgggttcgcattcggcctactctaacaacagcaaagcatggactaggatctgtaacacctgggagtattggtattgtctactgtatcagaccagatagcagtctgttgctggagttgagctaccttccaagtccatggcactgtgaaccagaggaagttgagcttgtaactcctttcagggtattgttacatttattgtccttatttttgtatatttagcgttctgtaagattagttgtgtatttcttgctctgacacattgtgtttagattggggatcgtgtatgtgtgaagcgatctgttgcagaacccaggtatgcttggggtggtgagactcatcatagtgtcggaagaataagtgaaatagagagtgatggtcttctaatcattgaaataccaaatcgaccaataccatggcaagctgatccctcagacatggaaaaggtggaagactttaaggtgatttatttcacttgttattcttacaatgtagattaattaattaagaataatttttttaataacataattttaatatacaactgttctatcaattatgagtaggttggtgattgggtccgagtgaaagcttcagtaccctccccaaaatatggatgggatgacataacaaggagcagtattggaataattcacagcttagaggaggatgctgacatgggtgttgccttctgcttcaggaacaagccctttcgttgttctgttacagatgtagagaaggtgtctgcatttgaagtgggccaagaaattcacattatgtcttctgtaactcagccacgacttggatggtcaaacgaatctccagccactgttggaaaaattgttaggattgatatggatggaacattgaatgtaagtattattgtctactattattataaatgatatcatgcatgagtagtagagagtagtttctctatgtttttccgtcttataatattttagaaaaatcaattatgttgttggataggttaaaccaaaataagtaaaaagaaatggtaagaatatgtgaaaaatatattgcatcttgaggggctgtttggttgtggccaatgttgctttcaaataagaaagtttcaaagatttgtgtttttattctcaggaaagcgatttccttagtgatcattttattttccataaggctaaacattagtgttaaataaataggtggattatataaaaatatttataaataattaaatgaaaattgtctgtaatttttggtctttggcattgaatgttatgactaattgtcgtagataaaaacaatgagagtttgtaagtaacagaagagagtttgaggtagttttgcaacaaatgtcaaatggagggaggatacaagatagagagtttaagtttccttcggaacatcaactatgtctcagtctcattttgtgtgtttaattatgtcggtcttagtccattgtcggtgttaaaagctaaaatcaaaggactagacagaaactactttaacttctcactaaatggccattgcagcatcggcgtattaatgctttcaatcacgtgtttatttatctatttatttttattgttgataagcattttgtacttcatataggtgaaagttgctggtcggcaaagcttgtggaaagtttcaccaggagatgcggaaaggctttcaggttttgaagtgggagattgggtccgttcaaaaccaagccttgggaccagaccaagttatgactggaatagcatcggaaaagaaagttatgctgttgtacatagcatacaagacacgggttatctggagttagcctgctgttttcgtaaaggtaggtcaattactcattacactgatgttgaaaaggttatgtgctttaaagtcgggcagcatgttaggtttcggactggaattgctgagcctagatggggctggagaggggctcagcctgattctagaggcatcataaccagtgttcatgctgatggggaattaagggttgcttttttcggtttgcctgggttatggagaggtgatcctgcagacctcgagcttgagcagatgtttgaagttggagagtgggttcgattaagacatgatgcaaataactggaagtccattggacctggaagtgttggtgtggttcaaggactagggtatgaaggggatgtatgggatggaaccacttttgttgggttttgtggagagcaagaaaaatggatagggccaacttctcatcttgaaagagtggagaggctatcagttggtaagaaggttaaagttaaagtgtctgtaaagcacccgagatttggctggtccggctacagccactcaagtattggaactatatctggaatcgatgctgatggaaagctgagaatatatactcctgcaggctcaaaatcttggatgctagatccttctgaagttgaagtagaggaggaacaagagcttcaaattggagattgggttagggtcaaaccgtctgtgtcaaccccaacgcatcaatggggagaggtaaatcattcaagcatcggagtcgttcaccgcatggaagatggggacctatggttggcattttgcttcacggaaaggctgtggctttgcaaggcatgggaagtggaatggattagaccattcaaagttggggacaaagtaaagattagagacgggctggcgacccctcgttggggttggggaatggagacacatgcaagcaagggagaggtggttggagtggatgcgaacgggaagttaaggataagattccgatggagagaaggccgaccgtggattggagatccagctgacatcgctattgatgaaaactatgggaaaatgggttcttcatgagtgaggggtatggtatccccattacttttctgcaacttatgttgctttcatttaagggtgtttagcgatggagttctaccctctcgaggttgcgagggagagaaagggtagctcttgctactgctgctgctcgataaacggatatggcaaagagctctacactacaaaatttatttattgttaataaaacagagaagagagtacaaccaatggatagatagagaaagaggaagaagatggtttgttgtcctactgttatttatagttg

SEQ ID NO: 14027 - DNA, 6701 bp, Cannabis sativa
  modified_base (6498)..(6498): a, c, t, g, unknown or other
  modified_base (6666)..(6668): a, c, t, g, unknown or other
gaggtaaaaataatagactttaaataagaaggtaaaaataaaagagtacaatataaaaaggatatagagtgtaatttcctctataattattcctatatattatgtaatgtagatgtggtgaaagtattagaagatggagatcttgaaacacttgggctattggattatgacaagagactcacacattcattcacagctcatccaaagattgatccatttacaggtgatcaaaaacatttatatatatagtgaatttttacatcattatatattttatgaattttatagaatgtgtgcaaattattatatggcttattttcaaaaatgttattttatgagaaaaaattaaaaataataaaatataggagaactaatttaaactattttcctatattttttaactttaaactattttgatctttttaaaacctacaatgactacaataaacactatcatgaagaaaacaaaatataagatagagcacaaaaaatgtaaattaccattgtagatgtgtgtaggctcgactttatggataagcgggttaggtctgtgcttagagttcacctaatctacgagttcaaatgtcatattttttttttactgattttaaaaaatatcacattttattctaaataaatgctcaaaaatatttctttcctatggcctaataatgtgtgttagcctatatataatgaattatcttattcccttaatttggttattacaaagttactaatattaatgataatattgtaggagaaatgtttagttttgggtatgcacatactcctccatacattacttatagagttatttcaaaagatggtttcatgcatgagccagtgcctataacagtaccaaacccaatcatgatgcatgattttgccattactcaaaattatgccattttcatggatcttcccatgattttcagaccaaaggtatgtactttgtatgtactaatgaagtaatgaaatgctcttatctactcgaatcgaatttgttttgagatgaaacctatgatcaatattcttacttaattatgtgatcttattaaaacaaatactttaaataagttgtataatattcttacatttatgagaacatatatagatggacattcaatagtactatgcattggtttgctacttctatatatgttttaatgagtacttcttaaatttttcaaccaatttatttttttatctatcaaaagaatctaataaggagaatttttatttttatggtttttttcataaaaaaaaatcataaaagaatttaaaaatatatggaaaatagtttatggtaactagaagagtaactagttgctttcttaggaaaaccaattacttctttagggtaattaattaccttatattatttttctcatattttttaatatttttcttttatttttgagtttttccttaatataacattttcttttaagaaaagttatatttttatacaaattgtataaaagtacataaaatttataattttcacttctaataatgcaacatcaaaataataaactaagggctaagacagagcagatatgcatttagggcacactcaacttataacgctattaaatattttatgagtttgtgtgtgtttgaaatttttgaaggaaatggtgaaagaaaagaagatgatattctcattcgacactactaaaaaagcgagattcggtgttcttcctcggtatgcaaaggatgaacttctaatcaaatggtttgagcttccaaattgcttcattttccataatggtatagtgatcattatttctcccttatattatcttaatttttctacatcttgttgtgttatgtatatgaccaattaatattaattcatacaaaaatatagcaaatgcttgggaggaagaagatgatgaagttgttatgatcacttgtcgtgttgagaatcctgatttggacatgtatagtggggaagtcaaagaaaagtttagtgtaaacacttctttgtaagagtttttcttttatttatatataaattcacttatttattcatattaatatatacatagtgaaaaataacttttttgaagccttaggtaaaataattttttttttttggcctttattataagaatagatagtatttaattttttaaaaataaataaatataattttttaaaaaatatttttttatttgagtctttaaattgggtgcgcactaggcgcgagcgtagctcggtttagcctaaggtcggacatggccttgatagtaatatatcatttttgtttaatccccatttaggtatgagatgagatttaacatgaaaactggtgtagcttcacaaagacaactttcagcatcagcggtagattttcctaaggtgaatgagagctatattggcaggtataaatatatatttatacgtatatatgtatatttgtatttaatatatttatattttattaggaaagttattggacctaacttcagaaaaaaaaaaaatctcgggataagttgaaaaatatctctttttgtatccatcaataaaaaataccctcatatatattttattaaaatatacccattttttagagtgaattacacaatataccatcactctatacttaagtccagcatataatttacattaacttaagggatctaatggggacattatctataatagtaggtatatcttaaagaatatgaaaataaaggtaaaaattaaaacaaataaaataaagtgggtatacaatgtattttcttcaaaaaactcatcctttaaaagaaatttttgcataatagacaaaaaattcaaaaaaaaatcaaaaatacattagtgtggagaaaatttttatttttacagtttgaacttttttatttacaaaagtacggattttagtaaattgttgtcatgagattgattttctcgttgtttttagttattttatagtttatttatatatgttgtgaggttgatttcttgttattttttagttattttcttactttttgccaagataatcatatttttataattttaaaatttgaaattagtatttttgtaaataaaaaatttaagtcactaaattgaaaataaaacatagaaaaaatatattcaaaaactcatcctaataaaacagcttgttagtggaggattgtcctcaaagtagatcgagtatatatcactttgttacaacaaaaatttagtagtaattttattatttagacaattaattaagactaactattatctctctttaaatgagtttttttcacagaaaacaacgatatgtgtatggaacaagactgaataatcttgcaaaaatcaccggaattgttaagttcgatctgaattgtgaaccagaaaatagtaaaacatgtcttgaagttggtggaaatattcaaggcatctatgatcttggaccaaatagatttggttctgaggctgtatacgtacccaaagttaaaggactcgattctgatgaagaagaagatgatggctacttaatattttttgttcatgatgagaattgcgagtaaaatattaattcatcttttttgtataaaagggcattccgaattatgtgacactacatatgagtagtcagaggcttgcaaaaggctactgtaaagacttctgactactcctatgatgtcagattgatcggactgtcatttcgcatttttgtttttgtatagtaatttattacattatttatatataaccctaatagagttgatgatttcttttgtagaaaatcaatggtgcatgttattgatgcaaaaacaatgtcagcagatccaattggtgtaattgatttgccttgtagagttccatatggtttccatgccttgtttatatctgaggtcagtaattcttaactaatcttactatcattaattatgatcttttgttcttttcattaatttcaaagttaaactaatcttaaaattaatatattgtgttcttttgatcaggaacaactacaagaacaagcagagttctaagttctgaagttgtctttaaagtggggcgaatcgagttgtatactcttagaggtctcccaacatctttttcttttacaaatttttaattaacatttgttcatatggcttttgaaaaaaatatatttaaaatcattttatttattaaataaaaggccacattttaaaaaatttgaccaagatcccataaaaactatgttctaataattaatgagctttcacactaatcttaattaagagaagataactatatctttgtaatggcaattatttcttgtgcttaatgttaattaacttgcaattagtcatggaaatattacttactagtaaaattactccattatgattcatcaatgttgtgtctcatttatttttcattagtaatgtaaaatcattccattatgactcaataatgtggggccgcaatatccaattttcacctcattaaaattaaaatgtgaatgaattaaattgactataaaatatagatggtgtaacaaaataaaaatactaaagtatatgagtggagtatcaaaatgtggatgatttaaatcgactctaaagtatggatggtgtaacaaaatagaaacgctaaagcataccaatagagtatcaaaatggatgatttaaatcgactttaaaatatgaatggtgtaacaaaatagaaatgctaaagcataccagtaaagtggtgcctagcattacttcgaaatatcatattattattagtgtagttaagtatttatagttgaaattgtctaagaacaaaagaaaaagaatcagcactacgtgatttttctttttttgaaaagggtgatctttacaaaaggagaaaacaaattacataggaataagcttatctaagaggatttcttcgctattattactagtactaactcagtaatcaagagtgttcttcgctaaacaatgagctacactattaacatgcctaaaagtgaatcaaaaattagcaaaactgtaagacgtgacaaactttttgatgtttaagatgaattccaaaaaattgcattagcacaatctgattcgatggagtagctatcaagtcatagcaagtgattggttttgagctctctttcacacactttcatcttgttcttttttttttttctttttttttttttgcttaacaaaaaaaaaaagagattacatggtgcaactatagagcccgtatacctcatcctcctttaattaggtcaatggtatgcacctcgagagttcccatcctattaagaatggcaccaccacagtaaactaaccatctaaaagctcatgcatactcccttttaataaggagttatgctgaaattcgaacccttgaccatagtaaagaaagaagccactaaaagcaacttgaccctgagattaggcgagtcgggctctctccaattctcaacctttactttttttcatttttttaaaaatatttaatgtgtagtttttaaaagctttatcatttcattaaaacactaaaactatcattttaataataaaactatatgtagaggttctaaaattttattttaccttaaaccccacataccttaagaccgaccctactaattaaagatatccctatcatcactgcaccacacaacatgccactttcatcttgttcttgatatacaataattcccaattattaagtgaggaacatgcccttacaaaaaataatgaggaacatgtgattccattttggttatgaaaaaaattccaaatatgattgagtacttcaacattatgtaggccaatagaaatagagactactagagactattattgtgttacataatatgtgatctatatagacatgtggaagaattgcaaccatccaaattaactatatcaaacacacatatctcatctcatttataaacatttcttcaataataattaagcaaaaaaaaatcatgggagtaagtgaggaggagattgagaagtataggaactactctaatgggaaaagagagaaagaaataagtgaagtgaatccaaaacccaacaatggattggcttctaagctcattgattggtttgaaaagcttgttgtgaagcttatgtactataacaactcttcttcttcttcttcttcagctcttcattttctctcaagcaatttcgccccgaatcgccatgaaacacctccaactaaggatctccatgtgcttggttaccttcctgttagtacctcttttactatatatattctttaatttgttcatgttcaaaaatgtacttaaatcaacttgtgtatttataaattataactatatataattaccaaggggaaaaaactatactagtatatgtatatgtttttttattagggattggaacttgaggaaggagttggaggttgattttattttgttgtttgaattttaaaaaaataattatttagttttaaatatttaagggtaaataccattttgaaccctgtattttacaaaagttattaattagaccctctgttttgttaaatganaaaatgaaccttatattttccaaaatagtaaatatagaaccctgagttcaattttcaacaactttattttttaatataaccaactttacaatttctaacacgaacagatacagaaagtgcaactaattttgtcataacatttctagattaaattattattaagttttnnnttgacaaaaaatcagttcatgatcttatttgta

SEQ ID NO: 14028 - DNA, 5332 bp, Cannabis sativa
gttttacattatattaaaatttattataataattaatataatattttattcaaatcttacttgttatttaatataaatctttaacatgaagtgaccttaggcttaggttgataggtcaaaagatagttcaacagctaataaaacagtggtcggggactgatgatgctgaccaaacacagagaacattcattgcaaatgaaaaaagtagttgaatttgtagtagtggtcacaatgcattactatatgtacggacactattgctttttgatgctttttgtgatatcaaaattcaacacgggaagtttgatatgtaagaaaaagaaaagaaaaaaaaccctttattttatttagtagaggaatatgtgtttgtgtgatccaaccattggttgagaacttttccatgaccaaaccttcccatgttaccttcccaaagaaaaactactttccatgaaccacatgtagacaccggtgcaacaagcattagaagttaaaagaaaaaaaaattacaaaataagttgtagtgttgttgtaacactttatatcagcactttttcacatgggaactgagtaatttacatgtatagattctttttaccctctctggattcaaattataagaagagccaaatttcaagtttgaaagttagataacttatataaaaaacaagcaccattttaatcaatttttagccttttattaagtatatatgaccttttattaagttgacaaattgggcacgcaataatgacatggcatcacaattcatcagtttggactattctatttaaattcacctaagaaagaaaatatagagagaatgataaataaagtggatttgatatatttgcctgttggtccactgaagcactacaaagattttgcgctgaagtgtaaagggtcggctaattttggccttattgacacgagtctagaaggaagtgaaggtagattatagtgacaattatttgggataaagagtagtaggaggatatgaacttaggccacaaaaaatatagactggcgtgcgtgtaagggttggccaaattgcttctttcaaatcatgttattattatcatatcatatatatacacatgcacagagattacatcaatatgagtcatgtatgacaaagatataaagtaaaaacaatatctcaccttgtattgatcagccagaactgaccgactgccgtgtaaattaatttaaaccagcaatgaaatctgtagtgatcaaaaaggaagtttcactgccctctttcctaaatgtggtcataatgaaaaaagaggaaatcttattcattgtcatgttaactatgcaatgtacattacaattgaagtataattaccaagtgataagaagagaaccccacacataatcttgacttgatagttacttaaggcgcttttataaataatcaacactttgactcttggtgagagattcagagaaataattaacgagttttaagcatctatagcatcaactggaagagaagttgctctatgaagaggctgtgaaaacatagatccactgtagaaactcttagccgtgaatatttggtccggactccatgaacccttcattgcctccatgctttgaacattttgattatccacattggaaaaatggtttacaaaggtggatgttttaaggggaggtcttctattatctttcttcagctggtgtgagactgaagacattgattctccattactgtctgccttttgttccaagttctcaggacttggagctaagcttgatggctttttcttggctcttaactgttggtgtttaagccctctcatttgcatttgatatttggctttgagccatctcagctcttgtctaatgtcattctcataatcatcaaaaacagaactagaatcatgatttgccggtggacttaactttgcagcgctagactcgctttgattgtccataactataatcttctcttctttctcatcagggttaggaaggatcaaagatttatctgcatcgtcgcagtagatgtcttttgacccctgtgagtgtaattctggcccatctctctgtgcccagatatcagcgaattggatgccttgagagtggcgagaatgttctgctgcgccctctgcaaggcattgttctgaagacccttcaacttggtatgtaatttcttcaaatcgaccatggatggctgcagagccatgtttggaacactcgaggacttgaaggttcttggcagctgaactatctgatgttacataatccattatggagccatttgtatcacagttgtgacataagcttgtagctgagcaatgcttattttcctctacggccaatccccttttccactctggtaccaaaatggcaatttcattatctatcatgtctgctattttgatcacatcttggtcagtgatatcaagctcgttaaccatttcagtagcaacgctcaacgcagtatcattctcaatatcaaatgggaaatatatgttccgaattcggcctgcataagcaaaagaaaaatgttacttaaaacattaatttttgatgataaattactttcatagttcccaaataataataataataaaaatgaacagaaacatagattatcatgactaaccctctttatctgcaatcctgagccttaaaaagattccatcctcgccatcttttctccttcctttgattgtgatgtcaaaatctcccacatgctcatcctcttgaccagagaagaggtcaatctcatttgcttcatactcaataacaggatgacaatccaagtcattttcaggttcatagacataaccattgttcaaatatctgttactgttactgtgatgaagtccatagtgaggttgcctaaagaaaggtcctacatcatcatagtcagtttcatactccaatgaactcatatcatatccataatcctccacttggagaaaagggtctttcagaagctctaaagcagtaaacctacaagacactgttgctaagcatttctcaacgaattgtctcacctcaggatttttcactttgtacaaagcttctggttttttaccctatatgaaagtaacgaaacaagaaaatcaattactggaaaccaaaatgatatagaaaagaaaagaaaaagtaagagttttagaggtcatacagagataactttcttgtaaatctgagcagggtgtgtacattcactgtatggatattcaaaggtaaccatttccaagatacacatcccaaaagcatatatgtctactaattcgttgtattcctcttcatacacttctggagccataaattctggtgttcctgggaacacacaaaaaagagaacaaacacaagtgaacaaagtcaatctcataatgctataaactctaagaactcaggaagaacaacatagtcaaacactgttatacacatgtatcactaagttcgaactcattgacacttacctacacaatgagcagcatgggattttctcagaatagcagcaaggccaaggtcaccaatcttaacttccccttggtttccattgatgaaaatattgtcacacttgagatctctgtgaatcacaggggggttacggctgtgaagatatagaagacctttcagaatctgtctacaccaatgcttaaccgctcttatgttaactctcctgtgttttagcctatacctatccaatacaagtgaaaattaaacaaaacaatacaaatggtaagtactttttacttgtttgaggtaataaggtttgagaaaattagcaaaagggactaaaattcttactgcctaagagtgccagaggtgaacatctcagtgacaaagttaatgtttctgttagcagtatcaacccaagaagtgtagaacttcattatatgtttgtgtttcaaggtcttaagaagatgaatttcagagtagagtctctcaagatcttcaggattttgcaaaaagtcatagagtttaacttggttccatgccacttcaatcccttcatactcatcaaaggctctatagctgtaacaacaacatataatacatccaaatgaataataaaattttcaaaaaaaaaaagaaaaactaaaaaattccaaccaaggaaataaatagaccagggtgcaaaaccaactattaaaagtcttactctttctaaattttaaaacagaatgcagagaaagagagctacttacactgtctttgatgcccctttaccaagaatctcattgtactgagaggaaaaagagaaaaaaaaaacagtaaatattgaatttttaaaactaagtatgatcaacatgtccaaaaaattgaagacaagaaaaaaaaagtatgaaaaagttgttacccttccatatcttccagtaggatcaacttcaacaatttctgagcaagcttgttctgaattcccatccattctcccttctatgcttaatcaattggtcaatccttttttttttttaattgtccaaaatccaaaaatgtttagagagagagaaagagatggaaagggagaggtatatatatggctttaataaatgaaatgaaaatatgtatgtaaaacaagaagggaagagtaaaaaagaagagttgattaagaagacaatttttttaataaatgacaagtagtgagagaataatagagagaaacagacaaggaggcaaaggttttcacaaggttggttttcacaaggttagggagtagtcttcctagtccccataccccacacatcctcatcctcacaaaaccacatttatggctaattaggaattttattcttaaattttgacatatactaaattgtgctctttgaatttttaaagtaagttcgagtggcagacttggtagatatcaaagtgtgaagaatatggtttagtacataaataatcactgaaatagtaaaattaaacaaaagactttaaatctaactatctcaataatttaagaaaaatttttaatagtgagaaaaattcaaaattataatttaaagtttagggataaaactttctctttcactctctctctcttctctctttccatctcatcacgagctgttaagccaaccacaactctctctctccctcttcctttgcaaagacttggaccaaccaaccacaaactctctctctctcatttcttttttaatgaataagcattaatttgaaaaaattaaagggattaatatcaatattatatgtggttaaggtgatgtaaaactattggctatcggcagatatctttcgttttgggaaagctctgcttttattcattttttttttcatcaacaatatcttattcttattatattgccatttagaaaaaataaaaacaatcttattataaacctt

SEQ ID NO: 14029 - DNA, 34066 bp, Cannabis sativa
aatggtggcccacgccgataaaaaaggagtactttaggtaaagcaattgtagctgctcctgcacccattaatttataaacgtccttacctacggaaaaatttcactggttgatatagagtaaaatttgttgaaattcttgactttggagacctaattcggtaagattccgtaaaatagcgagcagttcctccaaggctgtttttccctgatggaggtaagttgcaatgtctcgaatcctccgaccagggggaagaacaaaaggagcaggaaaatatagttggagcaaggtgttgattttttcggttatttggtccttaatcgtatcgatacataggtctccaagtctctctaccatattagcctcagttaaactccgaaggcgtcctgcccgaagattaatacgaccagtggaatatatgctacccctactatggtgaggatttcatgaatcatgtcacttaagaactccagaacggctggactcatttccgtgcggattggaaaagttttacttaaaatgaatgtcaatatcaatccgggcttggaccatgtctcccgaacaatctcagtacatatggcgcaagacgattccacatatcgaggtcggaatgggatcgggtgttttcacgtctcaccgtagtgcccggtttgtctttctttccgattgatgaacaagaaggaaaatggaactattggattttttgactcgcccccggctacgtgtcctttgcccgcccgccaccagtggaagctagccccctatgttgcccctttccccttttttatttgaaataaaaaggggaaagcattcaagcccagcaaagcaataaaaggccccaacctataggccttttatttttattatataattagttgacctttcgcgcagctcaagcttacttactaagcaaacgggctcgaaagcaacaaagcaacggattaagcaacttgcgcgaagcgttagcgcaggccgttttcttgcagggcgtttattaggctttactaataacatagatagaaagggcttttcccaaccgcttgtagacctattagtcaagctttgatttgacgccagctgaaaaacggatgcgcgctactagcgcgcttcgcttttgttgcggagctcgctgcttttcattttgttaggagtaggtgcttgcccttagttgggttgggggaagagggcatttccatcgcgaaggattcaatccagccacaggttcccctacggctaccttgttacgacttcaccccagtcgaagaccccaccgtggtatgcgccaataagaccaccaaaagcctttgtggcacgtgtggtacacagaagtcatgggtgatcattggtccgatgcttcgggcgaaacctattcccagggtgtgacgggcggtgtgtacagggcccgggtacatattcaccgcggcatgctgatccgcgattactagcgattccaacttcatgttcccgagttgcagagaacaatccgaactgaggcaatctttccggattcgctccgccttacagccttgcttcccattgtaattgccattgtagcacgtgtgtggcccagcccataagggccatgcggacttgacgtcatccccaccttcctccagtatatcaccggcagtccctcgtgagtgcggcacgcacctttttgtttgtttcggagccgttttggcggggcgtactaaacccactacgtaccacaccaccgggcggctcgcctgaatgccgagtctttctccgccgccaactcgacgtcgtcgtcacctgcaaaataaggccaaaaactggactttactaaacaagcgagaaaagccctttctatgttattagtaaagcgcgctagctgcaatcaaactaaagcgcacactcgaaagtgcttcgaaaggcgccggctcccttcttactgacagctacgtgctggcactcaattagtagcgctggcacgtcactcggctcctcggctcacttcggttgcaaagactttctccttaggcgcatgtctcagcaacacaaaacgagggtttcgctcgttataggacttgaccaaacatctcacgacacgagctgacgacagccatgcagcacctgtatgaaagtaagtaccatcccgttaaggacaggtttttttgttcatatgtcaagggctggtaaggttttgcgcgttgtatcgaattaaaccacatgctccaccgcttgtgcaggcccccgtcaattcctttgagtttcggtcttgcgaccgtactccccaggcggagtgtttcacgcgttagctgggcccctgatctgcgtagaccaagggcgaacactcatcgtttacggcatggactaccagggtatctaatcccgttcgctccccatgctttcgcactccagcgtcggtagggacccagagagctgccttcgcttttggcgttccttcgtagatctccggatttcacccctacacacgaaattccactctcctctgtctcactcaagtgaattggtttcgagagcattccaccagtttttggcgactttcactttcaacccgattcaccgcctacgtgccctttacgcccagtcattccgaagaacacttgccccccccgtcttaccgcggctgctggcacggagttagccggggcttcttcctcgagtcctgtcatgatcgcgcactcgacgaaagagctttacaagcggcattgcccttcttcactcacgcgatattgctggatcgggctttcgcccattgtccaagattccccactgctgccccccgtgggagtccgggccgtgtctcagtcccagtgtggctgatcatccgaaaagaccagctaagcatcattggcttggtcagcctttacctgaccaactacctaatactacgcaggctcatcaaacagcgctttttagctttcttcaggattttggcccgaactgttcggcagattcccacgcgttacgcacccgttcgccactttgttctcaactgttcccgcctcctgggcgagacaagctacctttagctaggagcctcttttccttctgcccagctccccgaaaacaacgttcgacttgcatgtgttaagcatatagctagcgttccttctgagccaggatcaaactcttcttttgagtatgattgggccctgcagtggtagaacctggtgaaccgggcgtactacttcccaaccttctgtgaaccttgcttctcttatgatttttgctactttctttagaaaagtgattaatatcaaagagagtctaagtctagtcactcaactaatccactcgtggagattgataccttctcgttatagagtgaccgtttacacaccttctcgggccagtgtagtggatctttcccattatgacagtgaaacgatcaaaagatgccgattagaaaggcaaggccgaagctttactaataagggctagccttgcttctccagctccaccagagcatttaaaaagagcgctcgggaataaagcctaatcaaagcgggcaaacagaaagatcgtgtaacttgacaggtgcagccacgactgttcctcaaccgcaacttgttcttcttccttctcagaggtcgattcagcagcttcagtgacctccatggttagtctttgtattgcaggttctaatcctgttccatagcgggagctgtggaagcagtggcgcctaaggtcttttcctacagagaaggcgactaactacctgcaaattctgacctggacccttctattgcaaacaccttgcaattagaagcttcttgatgtactttatcgtataaacgccaaccaaagtaggccgaaacggacaaattcattgtcagtgtttcggcgcttccaatgacacgacagggtactcaagcagatcagaaagcggggtattatagtctaaggcaacctcagcgtaccactgaacccacttgagccactgctgcatccaaccccggaacagcgtgtactcaaggaattcagcttcatcctcagatagtgttatgccatcagaggggttatccccgataggaggtaaccgtaactccttaggctgtacaacaactctgaggtactccgctattctccctttcaagtaggggttcaacggacctttaaagtccattaaccaccactcgaaagatagcggagtgaagaggctaggtttagaaagatataacaggagacgctgccagcgcttagagcgctggttagttgagcgagccaagaccctataaataacccgcacctccaagtcgcaacatcggatttagactaataacattatacgtgttacgaatggaggcgaggcctaaggttgttctgcactggagaagagccttcgctgatataggtgttatatcaacccggccttctctactctaatgcggaaccttttggcgaactcaaacgctccagagttagaacgatttcgaagttgaaatcttgacctctaacttagagagtctctcctggtactccttcgcgaccctactatccgcaatgacaacatcgtcaccaaggatagcataggccttaaacttcccgctgccgggataaacccgttctgctgccagccacaccaccatgtgatgcgacagggagaacaggggccaagaagcgtagtaacctaacggctgaccaacactaaatggtaaccggtggtacctcaacactaaaggaggaccagtcaatacatgactgagccccagtgacgagttaaccaccgatgaagcggtatacacatcaaacaatagagcgatcatctgatagatgagcacacgtggccatctatcagtggcggatttcatatcaaaactataaacattttgaaagccgaccaaccgctctaggggttttgtttgattgtaagtaccatcaccatctaagcgacgcaaaactgacatcgcccagtcgtgagttggcttcaacagcctctgcttcacatagttacctatgatgaacagtcgtagcttacccgccccggcaggtgtggcggcgactctgctacagaacacttcgccaaaccgagaagctgcatcatccataacgggatgcgcattctcgatgtaacgagagatgtcactgtttagcatactgggagattctctgtaaagagcaaagcgaaccctgctctcccagagaaatccagtaggaatgagccccatgctttctagctcaacacgtgtgtggcgagcgaaagcagctaactcatacttaagtgcagggaaactggaaactacacgtttctcctttcctctcctttcagtcgagcccttttagccctctcctagctgctagctggtagctcttctttcctagtagatcggttcttagttcctatcctattagctattagctcgtagctctcttcttgtaactaggtagctaggcagttagttgttcctatccgactagtaggaatgacaagaacaagaactactagctacccagctcttggcttggtaatgcactcgggcatagatccatttttgtactaatacaaatgcgcactatcaggagcatcttcctgcgagtctgcctagctattaggaagtagggtcctagaaacccggatatacccatcttagtaacgagggtaagtacctatgaaaagattcactcctcggggttctgtcttcttaagtagctttcctgtagggttggcctagggatccggtttttggatgggaataagcggcctaccttatagcttaaggggacaacaccaatacccactcgattggacaaaacaagacctgggttgacatccgcgaggcaattcaagtaaacaacagggttgaccactcggggatagacttggttcctcagtgactcagaaatgcaccccctcttagctccgcttggatgagctgacccttctcttacaatactgggatttccgcttttgctcttgcattccataatgggaagaacctcttcgtctattctcttcgggggatagcagcaacctgcaggttcgagagacctggggaagaggaagagaagcatgactctcttatacaataagtagggaacagagccctagggcggactgactcaaagaaagatcaggggaaagattgaatcttggcagagtgacccactttatacccatctgcctatacggggcaaagtcctcactttaggtttaggaagaaatcccgacttgggagctaagcttggatcagaggtgggcggacctttactcttactaaattctatttcatatttgtgcagccgctctaacttctattgagaggcccttcggggagagagccattattgggcatatagaaagacgtactcttctgtgccccgactacgtcctcttttttgtaccaaaaggccgacactaacagagcaggcctactagcaaatctaggacgggggctaggaaaggggaaagtacagaataagactaacagataggcacgcacaatagaaagaatagaaggaaaggggcctggtcgtttctatgtccccgcaggtaggcaatccagaggcaggagatcacccaatgactcactcaatctaaatggagtgaggcctagcgtcggagttgcgtaactatgatcaggtagaaagcctcagttagagtgaccgttccaccccttcgggtttacttgggttgagcagacgatcatgcggactatttttcgtcttaaagatcgtcagctcttgctctcttctctttggcagtcagatagcgggcaaggaaggaagagacagaatatgtttagagtgtagaaagagaatcttctcattcagaaaatgccctcttatgcgctatccgatcgcgaggaagtttcatactggcaatgatcctatcaattgactagttcagtttcgggacttctcctgaagaatgaccaatggaaccgaccgtatcaaagtagtgatctcttggcatagctgaaactcgatgtcagaaagcacgttcctcgcgtagaagcccgaactcttggacgaaggtcagattcagcgaacgggttagctttcccactctccttgctttctctcaaaaatttcatcctctgatgaaccaccgattgcttggttgagttctcccacatagcgtcaaggaatcgaagcaatcctgagatcgggcatagcgcaaagtcgacatcttcgtgattctaggtcagaaaatgcccctttagcccactctctttttacatagccaactagttggccctcgacgctgacccgatagaagtaaagccctttgtctcaaaaagaatggtatcgatcttcttctttcttagcattattgtaaaccatttgatcctagtcgtcttgcgtggaaggagccagatgacagagacttttcttttctcaccctcaatatattagattgcgtccgaccactcgatcgatgaagactcgaacctaaccaccccgcttttggagatgacggagactttactcgacgtcttgacccatccgtagtctgctaatctaatcccaacgtctttgatcctgacaagcttggataggactagatctctgtcttttgtttgttacacaacactgaatagttcctttgttcttctggctatggttctttctattcttatttcttccttttttatttatggtatggcctttttcaacctactcaacatattcatatctgaatacgagccttgttcaactgtgcccacggccccgtaagccctcgaggcaaggcgaaaaggaagagatgctctggctttctttggtcttgaactcgctccccgctcgagaatgaatgttggaaactcttcgatgacatcttcctttgagtgcacgattccttagctgtgcctgtttggtaccgagctctttgagggcttttctttatccgttcacgcggtagtgagtggagtcaggcacaaagcgatcctcagcagccgaaagaagccttgttaggtctcctgttgaagtggtgactcacttgcaacataagttttgcaaacctaggtggacgaaggcaaaaagaaaaagatagaatacgacggtttttcaggtgtataaagaatgacacgatcatctagccttggtcctctcatcatctgattcccgaaaggcagaactgaagaacgcactgtttggtctctcgagcctccccctcttctttctttagactatcgttttttgttttccggatgtggattgagcattttgttgagtatggtttttgcgcttgttaaccttcttctttttgaccggacaactggatgcgcgaatcttgctctaccacccctttctaacaaaagaaagaactctagtgaatggctaagaggaagtaccgatggtatttcagtttcgacatggccttgatcttctggtgaagtggcagtaatgtgagccttatttatccaattccttttccaaccaaggatactgagtctgaccgaggaaaaggacttctatcttggctgtctagctatgactaaaaaacctacttgtgacaactcgacactggaagctttgatgagactctttttgccagcacacgaccctaagctgtctttgcttatttccttgcttagctaccctcgaatggcttggtacgcgcttgccggcccctcacccctattaggttgcttggatgccgatcagtggcctatttaccgaatcatgattcttttgagtcctatttttgcaaacgaataagacggtgctgattccgatgtattcgatttctatgacatggagtctacccaaacattgttattatctatggccagtctttcagttatggcattcaaactaaccgatttcatcttgattgaaatcctggcgattataccaaaccgttcttccagcgaagtggtttaattagagccttcttcggcaccaagacccttttaggggcgaggcacaagaggatgtactgggccaaccatgacccttttcgagcagctctttcgccgcctaatctcctcattggccaatgtcgacgtcctgtaacgccgttgggtaagaatgctccctgtgtgagttcaatctataaagaaagggaggcgaacatctgctacaggctttcaatccaaatcagctacagctaaatgaaaccaaaagcaaagcttgaaagctcaattcctagctgctacagctaaataaatctaaggctactacctaccttagctgttctagtagctcctttgatttagcgtagggaaggtggaagctctataggacaatagctttgggctatttggaagctatgctatataggaagagatagcggcggctaagcctgatccggagacggcaccgagccccatccctggggacctgattgtacagaaaagtgtatccgttctccacccttattagcttagctgtcaagaaccccaataagaaaatgatttaattaataaataaaaaatattatgtatataagatacttgcccttccaacccggattatatagaagaatatatgccgatcctacccctttatccgccgatctttatttgatctctccgcttcgcccacccccatcaatgttgaattgatgaatcaatgaaaggccacccaacccacaggacttaccaaaactagatcttcagtcacctttttaatgcgcctcaatcgacctgttgatttcctagtctccccccatctttgtggtgatcggcttaatgacctctgcagaattaggaacgaatcctctaagtgatcttaccagagactgattgcactcctttctcggttcctgactcctctcttggttcttggtatagggatctgttgaatcgctctcacccgctctgggttagtcttgacaccccctttagctttagacacaatatgaccaagcaatttttgccttcctggggtaacagcaaaaattgccatattcccagcatctattagagacctgcggtgagcaacatggtcaaatctatgcttcgaaaagacagtagggtcatcaagatagatgagcctcttcttgtccttaattaacatccctgaaagcaaaatccatagccctctggttgcaccagcattgattagaccggcattcttggttcttcgcacctggagtggtgaaaattttatttgctttaccctctccccttgataatccgtctagcatggatggcatttctaagcctttaaccctttgtttgcagcattctatccatgtttggaacagggtagttatccttcaaagacgaaaaatgcgagttccagaagtaaacacaaagtcttatatctccattcttatttcccattggaaccgagttagcaaccccatctaggatatatcaaagacagaaatagattaccgcttttctatatctttattgatgattggcttcagcttaggattgactggcctttgcttttgcctaaaaggctcggcatcgggctttaaaggaatctgatgcttcataatctcatcattcttgtgagtttacaactcatcgtagtgccaagcaaaaaaatccttgtattcttggaagagttggatgaacttacctttctcctccagcgtccaagtactgccaagtataatgattattcgatttgggctccaaggttaatggttaaagtggttgcaagtccatctgcttgtcctgaatctgggttggtagtcaaaagtatgttccagagcattcaatccttaatgcttaattaagaaatgaattaagaggggtaggcaactagttttaagctggacttttcgccaccaatataactcctgcaacacttcttcttccgaatagtcagattcttggggatctatctgatgatttccaacccaggcttcaaaatggattgataaagcaaccttgtttgaataaatagaaagcaattgaaattcaaagcttttgagattgaaataaaatttgaaaatttcagaaagaaaccagccgcctgttctgccaggttcaatataaaattgatcccatggcgcttttctttccctattaagaaatttttttaaaccacttcctcggataagtgcggaccacgtaccagaaaagtaaaaaagttctaaagctggagctcgttatgaagtacctgacaatgaaaggcaattaaacattgataagggctacacttgaatacccctggttgatcctgttatagatcccatgccaatttaccagcaggtcggtacagaggcataggagaaagtctcaaaggcctcgcccgttcgaaacccagcatcagtttaccccaaggaagctgatcccattgtagttccacccgttgaagatgaaatcttagatcgagatccggatccacccgcagcataaagagcaaaggcggggccggctcaatgttgaattgagaaatccattcaagggtcggaacattctaatgccggaagaatagggaatacgggggatcgttaagatctggctcggatgcgtagctaagcatttggatctgctactcggattgcatgaaaaaaactggtggttcaatcggacgaaaagaagagctgtcgtagagtagtcttagtcctgtctaccttgagatagcccctatctataaacgggggaccccccgaaaggcgaataggaagcttcaagcgatctgggatcccaccgagatgaaggtgtagttttaactaggaatcccagggttgccgatcaggtgaagtagtagtttatgggcacaaaggattcactcgcgattataggcccgccaaagggaaagcgcacaggtattcaaaagagacaagacaaggtctttcattgtccgagcaatggctcaagcattcaatggttgattgttgctcatcgaaaaggggggacccattcaaagctcagtggtagcactcgacttcggtactaggcctgactagatgttcggaatctgatgaccagatgctcggaagtgaaagagggagcacagtacgcactgatgagcagcccgacttagacgactaatgccttctcccaacctcaaaaggtttttaggttgagcacaagaaaagaaaaagaagcaactccttgagcgctaggagagggaccgccagattgaggatgaggaggaggggagtatggaaaacgagataaaggtgtggtcattggaggaggaggaatacgaggcaatgaaatggtttttggttgtatagcataaaagtgacaaaatagctttctttttcgatagaaagccccaaaaatacatccatgttcgtctagtgaaaaagccagggtatgaaagagctacagcaaagacaagattgactcatattattccgttcttgctttcctattcaagatggctttacagcaggtgtgctgacttgacccgaggagatccgatagcttgtgcttccctgcttacttttgctattacctcaactgctttcgacctgctcacttagaatgaagataaataatgggcttaaaatcaactagagtaagtcgacaagcgagagaccccaagacagaattggtcttttcgactttcctgctcttgccttgttagcctggtaagacgaatctgtttacttcaaactagttctcttcccgaccatacgtcaaagtccggcaattgatctctgctgtacctggaatccatccgcgaaagggacgagacgtacgggaatgatctcttccttaaagattgggcttgcgaggtcctcgctatggcttttctttattccttttgtgccgtcatgacgactcgaaaagacaattcatgatggtttagcctgttctaccctctcccgttactgaaagttcatcttttgatttcaaccaccccggataagcctttcgtccggttttctccacgactcccgctccctttaatgcgattctattaatatataacgactgattccttctcagatccattcattccacctgagccttattggattggaattcttttgaatcagaaaagaagatgggatcatatttcattcaaccaaaaaacaaaactgctttgggcccatgagggtaataaaatcttaaaccgattgacaatcatcttggtgatgaccttataggtcacattacacaagctaatcggtatgaattgactaacgtcgggatgtttcctatcctggatagtttgcttaaccatgttgcacaaagaagggtctaagggccttgaagttctaatcaacctattcctaccgtgtctaaggtgtgacggatttcttccaatagtaggagggctcacagtaatcccgggtatacgggtatagcagttattggacttcaataggatagggcaaggaagtttgaaagctatagtgttccctaggcgatacgaggtaatagtttgcaggccaattcccttatatacagtgattcaataaaagcaagcacaagcctgtgagaaagctttttaaagtaggaatgattttaggcaagctaagtcctagggaaacccttttggagtgttttaagctcatctaatcctgttggagttcttctacctgggaaggctaacaataatagatggatattgatttccatgatattttatttatatggtggaatactagaatgaatatttttttgaggactcctaacaaaggctttctgtccccaggtctaactatctttctttctttggtaggtcaagggatagatctttttaagggcgtaatacgtctttcgatggtgatcccggaaagccagttagtttcctttcatgtggttacaggctagttagaaagaagcactattagtcaaataggcaaactttttaatttacccacgaatacttttcctatattctttcttctttcatgtcgagctttcgaaagccactggggagggagaatgaacgatcgactgctaaagatcttgaataatgcattgatagctttgcagaggagaaaaacattgattcttcccgccttgcatgctgaagtgaacaggggcggtaccaactacgactagaaagctgtcactcctgtcaatgaataccattcataggtgcccatattagtaagatagccgtaacgactttgttttactgctcgaggtggtgatagtgctcttcctatttgttttctcggctttcttcagccgaaccgaacgaagacagtttctctcccctctgtacctattgcactgatttcttctctttcactctctttcttcattcaggaaaggtgattaaatatactgtcgcgaagcaggctcgagagacctttggtcgagtttgctttacttcctgagccctcaccacttcctgcgacagctaacaaggtgcatttaggacaactcgttcatttagcactacttcattccgctcgggcatctctttggagagtcccttctttccaatcaataaatatagtgcgctattcatattatttctgcttgaccggtaccaagaactccattttcaatgaattctgggtctgggcgcttagcagcccggactttcccacttcaacactcgcaggaaagaaagaaaagacctgaatcctactgaagcagctaacagagactgagcagatattgacctatgagatttgtacacttcggcttggcaccttcctttggtttgtgctcgcacgagccatttctctgccaatcacgaattcgaatctttgcttacccgtgggccttccaggatcacttttggagctcgcaacgttgagtttttttttcccttactaatccatatgaagttaggcttacagacctcagtgggtataaggaatagaaaacccgaatggtttgggtttatcctatctataatatggctttgaacctgccttagagactatttttcattcaagaaagtaccgttttaatgatttacatcaattggagtggagttttgttcaattcttcaaataaaatacttcctgcctggctttctgtgctaatcagcattgctttcaagctttaggataaatttctaatggaacgagccttagttcggttctggtgctcaatctagttatagtacgggcagggcaggtaagggccaattaagaaatactttgtagggaaacccgagttcaactagagtagcgaacctggaaagcttagtagttagcctggaaagttggagtagaacgcaaacaggataagcgaataaagttatttttttcacgaattctaggcggttgtagagggcctttgaacgcaatgagaagatctagggtagaaagtagcaccccagtagctcaaagaaagtctcgtcccgacctggggttggcttgagaaggagagtctcgccggttgttaacaaagcggcatgcaaggaagcaaagatgaaccggcttggggggaataaataagatgaatgttcgggtgacaccaaactaccttctcttctaatcctgctacgaaatatcgattttcaggctaaattccaaggtaaggttttgagccaatcaagtaagcgctgtatccgtccctgctgtcgcaggtgatgaagtagtgggtgtaagaaagggttagttaatgaaatttccttcaaacctgtcagtgtgaaatcaagctcccggggataggaaaactagcaggaagagtattacgcttcaagagaagtggaactaaagcttcctccccctttcagaaagactgtcctatcaaccccccaaactaagacgcattcctgcctaccgaagctatttcaatcggtttcaaacctagccagaagtgatacggccatggatcctaaccctacatgcgtaagagggctcgccgttcgctggttcagagcccttattgggtccgggaaatagtgttagagcatcctccagtgactcaaagactaaaagcatttcctttggtattgactgatgatagggttaacgagagaattcctatttcttaccgctccgtgggaactctaatcattcaattctaaacccttttcttttttgtggattgaaattccacaacaaaagtctctttctcggcctagtttgtgggatttgtgaactctttctctttttttcttacctagctggtgtaattaaaaaacccctttgttcataggaattacagaaagcttttgaggattgttcctaggcctcttctttttgttttctcctaggtttccttatccctcctcgaatctctcaatcagaagctggagaggagagatggcatataagaagtggtactcactcgaatagagagagtgtaggctcactcacaggtcaggggcttgtacagcaaacagaggtatcaattcccacagagcaagtgggaaatcaaaaagaccagcgaactaaagactttccgtgagcataaaactcctgtatggtctttaccgcttgggaacctcaacctcgcctatcccctcgaagcagctctatggggtcgctggagttaaatcaagcttttgatcatattcagccttctacggctgatgaaagtactaacttcccttgagactgatattggtttatcagttcaattgtcatatattcttcccctgaattgaaaggattttcactcaattatcttcgtgctcgattccttgttggtgcttgattctcgaggctgggaagacagaagaagaggttttgccatcaattagctttctgaacttacagtacagggcggaaagtgagctttgataatcctaagtacttcttcgagtaagcttgtgatctatagacaggaaagaaggctagctctttactcctgagctaagatccacttcttgcttatgagtccgataagctgcctaaagtattctatattgaaagtcgtgagctgaaatagcccgattctctacttctggctgtagtcaattctgtgggcaagtcaagtatatatagtagttaccgttgcttgtctgctccttcgtataggttccgtgtaggcgcctttccatacgatcaattgaatattggaaaagactatggatattcactactattgatatctgaaactttagactctgcttactcatttgatttgatataagttcggaatccactgaggtagagccgggccgggggtatccatacaggtcgagtgggccttacggtttgcttgctctcagttgcctttaagctgctcataaatgagatatttgcattagatagctgttagtaggggcgcattggttagcccacgagagagaggctgtggggctgttttccttgggcattggaacaatcacaaatgcaggaaggaagagtgggtcagttcattgtccccccttcccgatcgtgctaactttggctctcacagtcgaaataatctccattaggaccaggccttgccttcttgcctccccccttgtacatcctattatttatctctctccataagacataaactgtggctgcaaacaccaattttactatgatgttgcccagagagtgtcctttacaggttctagcaattcacatgaccgtttcagacccttccttttattcaccatatatagtaactaagtatatatatacttagtaccagtctatctatggaccttagcagaagcgagataactgccattggctggcctgggaaagcatttttagcaatagagagaataggtcaaagcactgggttacaggaagtcgtactagagagattagattctaattataaccgccagggcactccactagatgaattacccaaagtcaagtacaggacaggaaactcatgactaaatagctgtttcaaaggattcaaaaaaggcaacttaaatgggcctgtcatcgagagcaaatggttccccgccaatcaatagttatccggccaccacgtaggcaccttctttaggccgtgggctttctgtctctttctcgccaactgcttaaacatactacgcaggttgaaccgcgtcaacttccaactcggtgggtcgagcctcacgtagagatcgccaagtgctctattccttatttatctgactcctaagccggccgtaatcattagattttcatcagcttcaattgagccggaaggaagaagttggagccaaggcgagcggagatctttctttaaattatagaatagtccaggtagggcttcatctctcaacaattacaagtgaaggagagaaacggtgtaaatacgagataactctagctgtaggagctgtccaacggttgagctgtcataggccgatgaaggataagagtgatcggtaagctgacccgtactcaagaaagactgatccgtaaagtcaagctctgttcccgattcaatccattccagaagcatcctccgaagagtattcccgcctttccgctttccaagcttcaggagaaagagagtagaacggggcaacagaatcgattgaatagctgaccaggttgctagctatcttattgatgaccaagtatgctcccccggaggaagattccgaattcgtggagaccctgagccaactacgaaacaactgaaagccggtctgattccggggattcaacaacttgcaagagaaaaagaagagcaggccgtcagaaatcgagagggacctcctaagcaaagctttacctaggaaactgaccgcggtgcaatgcgaggatttagcgtcagaggtgagagagaggattcacaattcagtaatatggatcttctagggaaagtctattgagtctcaaggcaaatcacataggtacagagcctaatcttttatagcattagagattgtattggtgcatcttaacttcaacagcttgcttcagggagggttataaaagtaagttataagggcaaacaccgatgagggcaaagagccacgataaaaccagctagtgatagggatctctatcctgttgagtgcgctcaagtgattaaagcaaaagtgtcctctattaggtgaggctgactcttgtaagtataagcccaatcaactggtcctcccatggccccaattgagtgtgtacgcgccttcaggctggcaagcccatgtttacagagtaggtttgtaaacaaggtttacaaacaactctccttctgttctgaaattacgctttaggactctgtagatatcaatctagcgatgacaccaggacatcaatagatggataaacacctggcgtcggggattattaacagggaatcgggatctcgttacgtgcaaaaccaatggcattcggggaagactcgctaccaagctgcataggatgggcaaggggtaggtctcacttaaggctcatatcgtattgtctcaaaagcctttatattatcaaattcatcagccaagcaagatattcgaattcaaaagccaagatatattaccactgaaaagtcgaataagtgttttaacccagggcctcgcgttgcggaaggaacgttctgttttgagttgaaggcaagagctctttcttcaataaaggtttggaaccctcgttttgccgtttccttcacggcacggccctgctcgccaggaggaatctttgattcatggccggagatcaaggcacagatcggcctttagagataggggcgagcagaaagcagcaccttgtataggttggggaaaagccccttgtatagggttcaaaaccagcgcaccagctgaaggaagggcttcatagctccaacctagttttggggcttgaatgcttaccttattattatgaaaaggggaaagattgaatcttgaaagacggagcccccggctagcaagatcgggaggtttagtgtcctcttaagaaggaatacccgggtcagcttcgatcacgaggagagaagagcggaccattgaaagtctcaattcctatccgcccaaggcgatttcaaatccaacgatttattgacctacgaatctgctattaggcaactcaacccttctccgcaaactctttcagttgttggatgcgcaaaacaagctattcccctttacgacgactcggtgacctttgacacgttagacctggttgcacgtaatctttactttcgcctttcactcgtgcagttggacttactagtgactttaaaccttgagaccgagccctgcctctcacctttcggttcattgcaaggaaagactaaaaaaaaggcagctttgggcggacacaagccctcgggacttgacacttggacaccgggaagcttgccccttgagactgggtccttcgtttgtaactgcccttttcctttccactttggaattcctcgttgctttcccctttgacctgtgccaaactcaacttttgctgttgccaggtggaatgattcattcaacctcggtatcggcaaccaagacgcccttctctgtcgaatgaatcttcaaacctatcacggtttcctgttgactttttctcaggtgacaggggctggagaacacttcacaaaatgcgcctgaccgcctaaccagttgaaccgttctcttatagaaagggtaaaccgcaatataaaaattccttttttacctatctttctccaaaaggatctcctggtcatatcgaacctgctatttcacccttgtcctgtccctgggggagaaggaccaacaaccaatgatcttgttcattcatatccacccgtccgctagcgactaaggtctctcgagcctcccctgcccatccatcactagctccatatagtccccatggaaccatccgatctagagcgagcctcaaacgagatctttcttcctttcatccactccttcaatccatgcattactccgctagccagctaagctaaagctagccttccacccgggcattcaaagcaatcttctaaaccgacttagcactctattttatctccccctctctctccagccggggaaggtcaactaatctcgatccaatgttctcctctcctagctccatttccggaaatgacgcggaagcatctgacctagccttcgagggcaagaaagcaaatgagctttcactttcagaagtagctatctcttcaacccggcaaactatgaatctttctttccatcgattggatccaatgcattgccatctccagacccagattcttccatttcccggcccggaacgggatacaaactcgccgaagcagtctatccttcgaaccgattcaagctcctttgcagatacggagccggaccgaagcaatgaagaaggtgaactcccaactaagcttgtcattccacacccgggtatcgaatccgaagaatgcagtaagctacctctcaccccctcactggatattgaagcttcaaggcatcgaccgcatcaactaatccatttccagtgcttggcgggcctctgctccaaggcaatctcttccatttccatcagctgggcatctcattgattcaccatccctcgaggggcaataaggagccgaaagcatgggtctagaacccccatccgattcagtggaagctagaaagagtggtttgcaaaagtatccgacatgtggtggtctcaagtagtttgtttgatcgcgctttggttatagtaaaccgccgcttgccccgctacttgaatgtcatcaaaaatcaaagcacattccctctgtctgttggttatgtacaggcaccctgctctgcctgccttatatcaacttcacacccaccctgtgtgatatgcagagttctcaatagtcaaagaagcgatcaggcttttcccatccgagaacctagataacttagtgctattgagaccatgattcctcaatggccctctaccgggaagtcaaaggaggatcatgtcgacttgctttttactgtgaaaatgaatcctaactaacgtttcactttaacaggcctaaaaagagagagatgcgagatgcgcttcagttgctgatgccctacgaccttaaaagcaatgtccactttcctgtgctaccgaacaatagtgtaaatagtcaatagctctttcagtcctgcagttttagcaggcagtagcctaataggcatatctcattcaacgccggcatacgaaaagcagagcaacttgactatgagcaagtccaactcacgagacacttcgtgccttccttcatctctctttcataagcagtagtccattcatatctcattcataggctgtaggcatacataggcttctgtatttgtgaaaactgttttcgtaggcggtaggcagtaggcagacgcttagctggcgataggaggcactggcttatggcggtacgaactactggcactgtcatctttctgcgctgatctgtctgctcatccggatcaattgccttccacttttccctctagagaatcgatacctggaagggtcccgtccctctctcttggccggcctattcttgtccagtaatccttcttctttcgttaagagttccgcgctttgggtggcatcgtatagtaaggtgagaacttcttcgaggccccggacagagaggctgtacgtatagagaaggaaagtctatttttcccagagtctagctaactctaacccaagatcaatcttgaagaggttcttcttattcagtagcagattcggatagtgatcagtacccctctcgttcttcccatagaaagtttcttttttctatgaaaggttgactgagctttaaaagaagaggctccttgagtcatgggactttaggcatctcttatttatatgaacattcccctccgaagctgagaagctgaagatggatatcggactctgggattagtgtagcggatagtctccttgttatcagatgacctaagtgacggcggaggactcgctagcaggatgcaaagatccgatccccactggaactcgacctatcccaatatccctcgctacacactctcacccagcttcatggtcacactgataactgttcactgtcttgctatctgaacttgaagattctgtttgtgttccgtgaactcaataaccacttatttgaaatgctatagcgggtgcgggaccaagacaaagaaagtgcttctatcgaggtcttgaagagccttgtgttgaagtaagtacaccggtaacgtatataagatcaatgggttctttcctcaactaagaagaaaattagtcagataagtgagactaatttcaagaagcgagacaggatcgtaggatagattcaggctatccgacatcgaatcatctagttgcttgttgttttctttttgaaatcgagattgggttggtgttcagtgtaccgtgggtacaagatcgaaaagagactgggacgatccaccatcgtttctggagggtaagaggcagtcctactcccatacaattacaaggctgggtgaccggtcttgggttgtgtggccccgcacaggtttcggcacccccgggggtgtgagtaggttcctatccctgtgcctctatggtacgttctcttcctgagaaagacctctctgccggcctgcaatgtgcctgcggacacttgcagctgtcaggtcttgaagagcctgaaatccccataaaaactaacataaaaatgaaattgaatgttgggtttttccagtctcttatgaaagaggtcaaaaatttgaaactttcgatctatttcttgcatcttaagaagagcttccgctttcttctttcttttcgctatttgctgttctattcttatttttcagtagtattttctcatttctttgatttgtggaatgcagagggccctactttcgggaacaaaatggttccatctgaaggatctcacggctcggagggggaatcctcaaaaaatcttcttttagatttgggaaactttttcatttaaaaaaggagagcatccccccacaagcagagcccatcacgcctcaatctttacttcaaattgagattaatcctaacgatacccaaaacgagttacgtgaaaaggcagcattcctactttcttcatattacgctgaagcaaagatatatcgagatcattatgtatgggtagacatcgcacaacacctagccttcgagagaaacggtaaaaataatgtcagccgcgaagatctcgttgggctcatcgaagcgctcaaagatccagcgaatgaagggggggaattatacctcaaaagtaagaaatttctgctccgctataataaacccttaaaaatagaataggaagagaagagaaggaacgagaaaaaccgaattcctctatttgatgtcgattcatccacacttccattccttgtagaggaaggctaactgcttgctggctgggagctgtatgagcggtaacgtccacgtacggctccgtgagaagggcggtggacataaatggccttgttgtacctcactctcgtcttcaatggggtctgctcttttttttttgggagagtatgccaatatgatcttaatgaggtgcggagctttgcatctgacattcgttgggcttccctcttcgggagcctgcgtcccggcgtttttgtgcaataaacccctccggccgaagactagtggtaggtggtcccgcgtagctttcggagaagggtagcctagtgtgtaagcacagcaatgaaccgcggcgaaccctcagacgacctatctaagattaggggggagatcctcagtagtggtgaccctttcactcttccacggactgatacatgtaccgaatgctcatacgggaaagttgactcctgggtctggaacctggggggttgctccgagacatcctttctttctcgtccactcaggggggtgcggacacacctgcgcggattacaggtgacggttacaagaatggcggggaagtgaacagtacccgacgacattcagggatggatgtagacccatcgggcaggggtaatcattccggtcctgggagaggttgcgaccattctcaagaaccaaaaagactgagctgagggaagccttatgagtcactgaaacgacggcaggagggcccttgatctatcaatagagggagcaaagggctggcttgctctcatctaagagaaaaggtagccctttgggaccctctttctcttagatgagagtattaagcttcaaaaacaagagtcacgctctttaaacgccctaagaaataggcttaagtcatcgattccaatcctcatctttttgcaaaaagccgctccgccgaatgaaagaaaaaacctaatagcatgaatatccttcgcccgttatctcctcatcttcctatttataagccacagctcacttcgacgtttccaatttcccatagaatctccggggctttcctagccactatagttttgtttttttatcttctttgtcttaaaatagggtggatttgcttcacctatgagaatttctaccaattcttcttttattcatcaaagctcatcccaatctccgtcgagattactgccttagccctgtcctatcatctgtatcatggggttcgtcatttattgacggatttttgggtccccccccccaaaagattgaaatgactgttcaaaatttcacctatacctttgagattaaaaaaaaatggattttcttatgaaatgtttattattattttattagcgttgatagctctcttctttaaagcttatgccgtagaagctgacatcaggctattggcgttttatctgcatcttcccgaccaagacccggaaggggttcgctttgtttgggatgaactcgcaaagactcgacccgaggacttccctcgtagagttgcgtcttttataagactcgagtttctcagttgaactaaaaaaaaaagagtttgagctcttttggcttacttttagccacgcggggcggctatccgcatgtgtcccaaagtgactgacgtccattttttgataatgggtatactcgagagaaaagtttggaattcgacctctccttatacgcgggtcatggactcctttttgtttaggaacccctttctacattcaattatttattgagcctggtgtggaatcaccatcattacacattcattgttggtctggctgctggtctagcgatccctcctagccgccgcctagagtgcagcctgcctgttgaagaccgtaacgtaagtaactcagtgctccatacgggggaaatgaaagcagaattcgttcggatcctcccacatgttcaatctttttttagcagtttccccagagatctttatcattaatgcaaccttcattttgctcattcatggagttgtatttagtacctctaagaaatatgattatccaccgttagtcagtaatgtgggttggcttggattacttagtgttgcgcgcctaggagggcagcgcgctttgggatgcggaggagctattatcgcccagctccctaaccaaatgcggcaccgggttcggaccgcagggaaccgtagcatgggggggacgtctaatccttttgccgccgcaaggctggctaatcgtacgcagcaggcttgaagacccctggttctggaaggcacatgagtccgaacgctatgttgaatgtgcgaccgacactacactacgtaggtacctgtgcaggtgaggcgtcggtcggtcctagaaacggcggcaggggcgcgaggagttaacgaccggacgtgctgcaacctagggatcaccaggcagctctttcgctctatagggatcgggggggcatagcacaattcttcttggaggagggttggtttgcccgggtgactgatcctgccataatgtactcctacctatagcaccggcaaccgaagtcgagcatatatacgacgatcttcatgcgtgaatagccgggaggaaagaaagggcggtagatgataatgaaaaagggcgccgcgtctggacgggcgggcggaatggatgcgcgaaaggtgccatggagtgaggaatatcccgagtctcatgtaagacaactaaatgcacctcgaggtgctgccgaggaactgggggaccttctcgagcacaggataggcaattgagctagcctattcgttatggggaatccatgctccgggccgaatagagcttccctccggcacctggctttctccggcgcatattagcttagctgcgcttaataggccggtttggcttcctctctggcggccactttccttaccttacccacgctacactcccactccaagctacgcctgctgagcaagaggcattgcgatttcctcttctgtggacgcaccggaatatgatccgggacgggaagagaaagacttttttctccggctctcgtaaagccaaagacgccccaagacaaggtacaactgttgggaaggggacatgatcaatagaacctggctggatccgggctgggatagtggcgcccattcctaaccagttccgaaaaggttcgctcatgctggagggagcatccccacttagtgatcggtccgctagttcacgcaaatccgaagaagttatcacggacgagccacatgcagggaaacttgcacgtgtggttctggccgggctttcctgaggtatctaataaccttgcttctgctcgccgctggcgcacctctcctaactattgcccatttattccggaataatctttttaggagggacaattttacatatttctgccaaatccttctattattaagtacggctggtaccatttcgatgtgttttgattctttcgaacaagagaggtttgatgcttttgaatccattgtattaattccacttcctactcgcagtatgctctttatgatctcggctcatgattcaattgccatgtatttagctattgaacctcaaagtttatgtttttatgtgatcgcagcatcaaaaagaaagtctgaattttccacggaagccggctcgaaatatttgatcttaggtgcatttccctctggaatattactgtttgggtacgaccggacaactaccgatatctaaaaatatcctttcttataatgttgttgttaaatatatatctatatagtaaactatcgggtattacttagatgtgaaacttgcagacctcattggttgtgatattgatcttacggggggaacgaaatcaaagaatatatagacttgtagagaccctctatgtagttgtctagctagggcgtctacatctttccccatagccctggggctgtgtctcgatctcctacgtgcgaaatctgaggtctgcaagcctatggagattccccttggtctaattccacgccttatgacgaaaggggagtcggcgtggcgtaaagtgaagattgagggaagtagagcaaaattcccttctggggtattccgaaggtgtaacctaggcaacgaaaaaggggcccgatacttcaactagaggagcgaccagttggttcaccaaaccccgacccagcgttacacgttctccaggtccgaagggatccagtacccaactaccgactcctcccggaattgcgttatcggagccgagccaggaatggccgttagtggacacccaccacttttcaccggttagagaggccctctttaatacattaagaaaagatgttcacaggggccagaaagactcggtcataggaacttagaccacctacgcgctggtaaacgaaaaccacctcgaccggatcagagtaaaaaacaatgtcgaatcaggccgccccttgccttgaaagaattcacacgcggccaccagctttcccaaaatcaggggagatctgctgcttactgctcacgaaaacatccgacctatactatagtcaagtcgtccgcgtatctttctgatctcctttccttctatttctcagatttttggctttgactaattcaaggtgaaaaaaggggttggctaaaaaagggggagagaggagtggggtacgctcacttctgcatttttgtttaggttatcgagattatcaatcgctctttttagtggggaggaatagtgcgtgaatggcggttctcagacgagggaatccttcctctctaactaaataataggctagaatacttctatcgatagagctttcacgtctgcgcatagaatcgtttttttgcctaaacattttgaaaacccatatcatgggcagttggatcggaatccgtgtgatggttcgagagtggtttcaaatattcttcgcatccatcttcgacctttcctattgttggagaataggtctactagttcccgattccatgttaatgtatctatatgaacctaatctctctcttcattcttcttgagctgtccccgcttagaggagcgggacccctagagttgagagacgcaacgaaccagcaaaaaaaaacttagagtccccttttgggctttcataactaataaggcgtaaaagaaaggagtctcggtattcgttctgacttccgctcgcaaaggaacaagatctggatttgactagggcgagcgcagtttactatgcgagtggactttgcccccctttctttatacttgcagtaaaggtgtgcaggtgggcatagaggttttgtagtcgttaccggtaggagtgagttacacttctctaaggtgggtgggcaacgagtaacgaaatcagatcccctgtcaagtaggtttcgtaatcgctaacgtatagtgttgttattcgctcagtgaagtagaaagcaacgggataatggttcgcattgaattcatttagtaggtcgccttcttgttcaagccagaaggtcaggtacagaagcttatgttcagtgttaagaaaggtgggcggcggatgtgtgggtagttagctcgaactgtccgcctgccaacaataagtcaaaaaggtgttcacctcctccgcacgtataagagaaaggcgctggtacacagttgttgttctaacgactacaagtatagtccagcattatagggaggggcgcgaaagcacaaaaaggaagtgaagtacagaagagcaggttatctctgaggtacgaatcaaaaacttaagatgttcatccccaagcctagcctactctacattatcatatggtttcgcgggcacgtccaaccgtaccttgccacttgccagttcaaagtctaaaagccggtcaataagacagatccggatcctagtgctttcgagatggttcgatcgctaacaaagacaagcatgggaaacagcagactcccaacaagcaactccaagagctcaagcctaaagccttagtaacgcgcatcctcattgctcgcgtaaagcaagcgtaggctcgaaggccgaagcgcgctagtgctcgttgcatttccctcctactcgggtaaagtattccgctcgtttgctgtcaggaattcagtagagtggccggtcgttgaaagaagcaagcctatagcctttggctgaaatcccagaaaagtctcaatgctatctaccaaggggaaagaaagatgcgccattcttagttagggagagggtatgttcacattgagtatcctcgtatgctcagtcgagtgacaaacgtacctatccccgacgtgggtaacgcatctacaaaaccatggtgttaacaaggccctcccttctcctaaatccaattttttatttacttaaaataaccttcactggccaagaaagtttggatccctccgctccttgcccgttcgtttcacttacttccgctcctctcatcgagaaagcaattacacatcctgactaaggagcacaggcaataggttcgtaggaagaggcaagcgttcacacatccgtctctatcatatgtgttgggtgaagagctaagactatgcctgggccggggtcaggaagacaggcagaaggagtaagcagcgcctatactatataagatagggtctcttgcaggcaatttctcttatccagtaaaggaagttcgatagctgtccaaggggcaaagagtagtattccggtctctcttgaaagcaatcaagcgtgagaagcaggatctgtccacagcttttagccctttcccttaataagttcctccttctctccggattctcgtataaagaagcaattacctaaaagaagaggtgacaggcagttggacttagctttccgggcacacaaatgagatattggagaatagatttatttcaccgatgcttcgttctcgaccgggacttcttcgataccggagatatagatataaaggaagctttgaactacttatttagagggagaaggaaaggaactagccctctccatatcgttggataattggttttaggattcagccgtggatgcaggatcgaagagaaaagaataataaggtttgattgattaccccagcccaggaagttttagcacaaggaaatcgtggagacgcagccttattgggaaatgactggagctttggcctatgttggagtatgtggagaagcgccttctgtcgttttagttgaggaggcggaatgcatctcttatgtgaaggaaacacttttcaaatggaaggtagcctatttcgctttctatcacgaaaacaaagagcaaatcaccccgcagttgacccggatctgtatgtccaagctttgcatacgggagactctaattgaatgagaaaaggcaagaaagagtggctcgacaggcccgtcaacagaatggaatatgttctagtagacttaaaccaagaatgcggcacgcccctatttgtattatcacatttcacactatgcctggttcactggtatcaacatagtccaacggtagaaacactagttaggggcaacccaaagtaggaatgctattcggggaatagacaggtccaccacagacaagcatgaagtgaaggggcgcgctagtcatctcctttctatctatatgccgattgatatggctattcgtaccttttttctcaatcccttgcgccgtgttttgaagtctgtatcgcactaatgagaggaggtggcaccagatagtttgttgatgaagaacttcattcacaagagtcaactgtggcctaaagtaggaactagatctgacgctacaatccatagaaatgtcatatgggcgtcgtcatactgggagtggggtcggggtctgctgggtctgggagctgtatgaattggactgtctctctcttcttttatctatcatcatgggccaaagcccaatcttcaccagccatgccatgttctcttggtgagtactccatgccttctatcttgatgcatacctgctgctgcgatcgctctgtctgaaacgaatactcccgtccgcttgcgctgcgctttcgtctcggggtgtgaagttgaagtggcgcgactgactgcttcgcctaactcagattcgaattgatactagtctttcttcattctcaggtctgtcattgcctgccaagagtggatggattggctgccgtgggcccactaaaccctcgccccttggggcctggggaggcaaccttaacggcgtaagcacctttctatcaactcaaggcaggaaatgcgcatagccaagatggaattgactctagtagaccactactcgatggtggaacacgggacttgtagtagatgactagtctgtcttcaaccaattatcatatatatagagagtcgtgtcattgcgtagggccactaagagaatgatctctttgacatagcttttcaatcaacaaagcggcgggaccaatgagcctacatagcacccactggcatttatgtcgggtcgtagtccggtatccttcgggcgctgtaagaaagaagatgctatgtctctgttctcattccccatgggggccatgaactacgtgatagaaccagtctttcttctatagttatagtcttcctctacgaaaaggtggaacaccgtctttgtagctgtttactacgcctacttcatgtatactagcgcgcccttttctcgcgcacaccgcccgcggcggaggtaggtacggccgatacctaaatacgggtgtcttatccataggatcttttctaaagggataagaaacaaatagaagaacataacatagttggctatttctatttgacccactacggtcgtgacaggttgaccattgtcgtcaactagggagacttcagtcagctccccgccaatgaaagcaggtgactgttccaactgaactggatcaggtgcacccattggacgctagagccaatgttctacacacagaaggactgcacttaaaaaaaaaaaagaaaagaaaggaagctgatgaccaacatgatttattagtacatattccaattctttgataagttgtacacctccagccccaggaaagcccatccggaactcctggttttatcaaagcctccagtggtatccgaggatgacaatgctttcctaactgctatgccagatgaggacgagataaaaagcacggtcttcgagaaggatgtcccctgggcccgatggcttcccagaaagcttctttcgaacctgttggcatatcataggcagcgacgtttgcaaggcgatccaatcctcttcttcccgtgaaggctcaatgaattgctgttttattactgtaattccgcaatgctatctccattgatcagtttagagcgatattttatgttttgccaacttaatcctcttcattataaaaaaattcttggcgataaggttgccttctatctaaacttgtatctgagtatcagggtgcctttattaagttaagggctttagcgccagacaaaataatattggattggcatcggagcttgttaattcgttgcagctgaaagctagagggttgaaattggacattcggaaggcgtatgacaccaataaatggcactttttttcataagttctcgcttgagcaaaaatggttggattatcttccttccctaacttttattgggataaggcctgtaagcttcttctttgatagctagatgtgactccggtagtttctgtactgaaatccctgagtcaggttgttcctgtcgggttatacaagataggacagaagagattagatcgatcaagtgataaccgaagatagggtccatccacttaagttcctttctatggccatagttcaagcagagaaaaggcaggataatggtaaccccaccattacttcatttatgaatttcatagtaatagaaatacatgtcctaccgagacagaatttgtaacttgctatcctcttgcctagcgggccaagattcacctccgtggaaaggaggattcattcggatcgacatgagagtccaactccattgcattgccagaatccatgttgtatatttgaaagaggttgacccccttgcttctctcatgttacaatcctcttcccgcggagccccctttctcctcggtccacagagacaaaatgtaggactggtgccaacagttcatcacggaagaaaggactcactgagccgagatcactaactaatactaatataatagaaaagaactgtcttttctgtatac

SEQ ID NO: 14030 - DNA, 4647 bp, Cannabis sativa
  modified_base (3589)..(3592): a, c, t, g, unknown or other
  modified_base (3906)..(3911): a, c, t, g, unknown or other
gttaaaaaatttagtagttttttttttagtaaatattccaattctaataattataatttatattgccaaatttatacttcccttttaaccaaaaaaacaaaaaaattacaattaagaaaacaagttgatatttaataaaaaaaaaaggagcaatatgagtaaagtacggtacaacatgtaaatattagttctacaagtcgtgttaaaactattctaaaattatgtttggtaagaaggatgaagagtaggatgaatggagagtttaaaaaatatgagaagtaagaggaagaagaagataattattttccttcctattatttgatattaggggtaaagttaaaaagataaaagtaaaataaatgttagaaattactattattttaatagaattatacattatattttttaaaagggtggaaaatacattttatataatatttcttatcttttcatagttctacatctaacccatttaacccaaagaatatcatgcttttctatcaaagaccaaagaatttttccattttgggccttcttaaaaaccaataccaccataagacttcggtaaataaacattttcacatgaagcaatttgaatttcgcaacgatcgattgccattttggctccaaaaaaagctccgacaaggcttttccacttccttaataacaattagcacaaaaataatcgtccggaattggtaattatactattgaaaggcagggaaatagatttcgcccttaacatgtttttattattattatttagataaagctacaagtgcatatatgagttatgacgttaccaaaacttgagaataatttgattcaaaatatccatataactaaaccaccatggagaaaagaaaaaaagaaaaattcaattttcctttcaatttatatggtaaatttaaacatacatagcagatcatgatcatctccaaagaaagaaatggagaatgataaatataatatataaatatatatgtacaacttaatactgtagaatgaaatgtgttcttgtgtgacttataactaacataatagtatagagagtaacactaaataatatggtgtgttactctaaaaattgcaataagaagctcaaatttaatggtctgcaaggtccttattattgagagcaaaccaagatcttccaaagctttcgagttcttcttaccattttttgtacaccaatggcaacaaaatttggtagtaagaagacaggaggaggttgaacaacaattccagaggaagaagctcttaaagaagatgtttcagaggtaaatgaagctccatttctgctgcttctttttctaagataaaagcttctactacccacatctccgattgcatctgatttatccaaacctgaaataaatttacatacatgacctgttatcattattcagtaccatttgcccaattcaaatcaagttcataacttataagaacaataaagaaaactattaaaacatttgatttggttgtgttgtactagtagtagtagtgtttactttgaaggctgaaataggaatggtgcaattcaagggaagatggtgaatccttctcaagcttaggggttcgaccttcttcattgtatttctcaacaacatttttaatagtctcttccacacttgatcctaacttaaccatggtccgaactggtcctggactcccttcaactgtcacattaagaacaacctttgcatctttcttgtaatctggcttctgcattacaaaattttcaaatccattatcctaaacttccgtttaaaacaaataatgggtttactttactttacttcaaaaattgacacaagtaaatgaaagaaaaaaaaaaaaagagttcaattttttctttgtttttatacatgtgctcaacacctaaggcaatttcaaaattgttactagatcaccttccatccaattttcgtccaataatgcatatggctatgtttaatgaataaaatgccagaagattattaaataccataaaaacataatatgggcaatgtagaagtaggtgaaaatttatatccagtctaaatggccaacggtatattattacccaataatcgaagtttaatatatttttttttaattgatgatcatgtgcacacaaaatctatacaaagacaagataaagggcactagggtcagatcacactcttgtgaaataacataaccttattgctataattgaatgtcaaattatactaagaaaaaaccgctaatcatttatatatacacatgtgacacatggcagcgcctccttttaacgtatgaatttcattgatatgattgattaatgttatgattatttggcttcaactactaaatgatatataattacaaaattaccctatacaaaaagtgaaacttttacaaaaaaaaaaaggaaaattaaaaaacttgactaacctcgtgattccttggggaggaggagaaacccaaaagcgaaggagaagaagcaaagatctccgtgcaagtatagggtcggagaagaacatgttccgatccaaaaatcctgcgacgatcgtcctcgttaccatcgctgctgttgctactactactgctcccgatccatagaaggggctcagacgagcaacgcttgagaatcttaataggtttggagtgcggcttaatcaacgatcgacgaggcggcggagtcctccgggaaggcgacggcgatgggttcggaggtctgcttctccggctaccggtgggctgagctcgacgccgtagacccctctctgacatgtaaatattaagtgaatatagaaacggaaatatatatatatatattgataaatttgtgaaatggtttttatttttttattcttttttgaagagagaagatgacaggaagagaggtagtttggttagtttgcgtgcagagttggtttgggttcggcagttttcgaagttgattgtcttcacttccattcactctcctctcctatttataatatatgtatttttttttcaatttaaaatataggtgcttgtagacaatgcaccctacttaaattaaatgtatatggatgatgtaacttttaactcttttggtatataggaataaaaatattagaccatttttttttaataatattgtactttatcattgtttaagagattttgtaaaattttgatgaattcaaaataatttactagaagtcaattttcaaatcgactatttgaagggtataaaataaaaaggtcactcgtgtaatagattctttaaactatattttcaacatgttaatttttttttttcaaatttcttaaaattttataagatatcttcaataacaacaacacatacactcataaaaaaaaaaaaaaatctgactttttttagatcttgaaataaataaaagtgtatcgatacctctttcaagaagtgcattgtaaaattttcttaaaatatataatcaatttatgtgaatatataatatgttaggggtagttttgtaataatagctcaaaattaaggggtatatttgcatctagtattaatcactcttattattttttttataaaaaaaattatcttattattttgtattaatttcaatacttattttannnntatttttatatattttttaaaaaatcatatataattttttatttttttaataaaattgtataatttctttgtcattataattaaaatatataattttggaaaattctataatgcacctttaaaaaggatgtgctaatacatctctatccattttagtatccgaaataattttttagtcaatttttttctcatgctcatgtaaattatagttatttaagacattctgcaaaattttaagaaattcaaaaaagtttaacacgccaaaacttgcattcaaatagtgtattgcacgcatgactattttattttatacnnnnnnaaaatagactgtttgaacattattctctatattgtaaattattctaaatttctcaaaattttgtaggatatcttaaataactataacgtacatgaatatatataaaaaaaaaatcaaattaaaaaattctcttggatgctgaaacaagtagaaagtgcatcagtacatccctttttaagagggtgtattgtagaatcaccctataatttttatagatttttttaagaatacgaatcaaaagaaacaaattaaaataaactagtataattaatgatagggtgcttctataattcacccccttaaaaaggttgtactgatacatcctctacctgttttgtcatacagaagaatttttcagtccaatttttttaatattcgtgtacgtaattatttaatacatcctaccaaattttgagaaattcagaataatttacaatatagaaagcagtgttcaaacagtttatttcaaacgggtataaaataaaatagtcacgagtgcagcataatgtttgaaccctgtttttggcgtgttaattttttttgaatttcttaattttttgcaagatgtcttaaataactataaacatatatgacaataagaaaaaaaattatttcggataacaaaatagagagggatgcatcggtatatctcttttaagggggtgcatgtgttgacctcgcttttagccaatgacaatgagttaattaataggcgataaaaagtgtcattaaaata

SEQ ID NO: 14031 - DNA, 4464 bp, Cannabis sativa
  modified_base (65)..(69): a, c, t, g, unknown or other
agttttatagaacatgtttttgaaaaatatttttacttttctacttttaaaaacagaaaactgannnnnaaagtgttaccaaacgccaccctagttttcaactccttggattagactaattactacttgatccttgcaacttcaaaatggaatacacaaagcaaattgtaaaagaagataactgatcaacatgacaacatcaggttttcattttgttgaattatctgaatactttctaaataattcaaaatatctatctgcaatgtttccttacgtaacataggtcatacttaaattaagagtttgaatattttttgtatttcaaatttaaaagaagcaaagtctactccttagttcaagcctacttgtaggtgttgtctttcgcgatttcttatccataaattagcttataaatcagtcacaattttccagatcattcaatctctctcaaatttgtattccacaccaagtcattaaagcattatgctggcatccttaaggaccttaactactacaaagtgagtttactcagaacttaagttgcataagtaatggagatcaataattatgctctttgttttactttctgtcaagaaacagaaattatatggaaaaaaaacaagatatcaaattcgctaagtggtaattaacttaaattttgacaatgactccattaaagtaacttcatcatttttaagaaaataaaataataatattaataataactaaatagaagtaggtgcataccatatgtttctttatgagtgtgtctcgttcactctcagatatttgtgcaagatgcaaaattgaatcctgaagcacaaccactcctttttccccacatgccttactgcaatgcaatcccatacaaattgaaaagatctgcacgaagtgatctttcaacagaattggcaatggttgaccagctatctaaaacaaaacaaacacttggaaaatgaaaaacttcaacagaaaatatagaaagttaagacacataaaaaagaaatgacaacactaaatcttaggaaatacatagaagttaacacataatcttatgtccatattttactttaatattttttataagaattgagacttgtattaatgagtaaaaacaatacagcagcattcagtaaattgattgctaatgaatcatttcaggagtctccccatgcaaggactctgtgcaaatccttagcttcccccaaaagtaaagtgtctgtgaggctgttactattattggagcttacatgtcgaaaattattttgcagtacttgatgacattttgatgccaactgtagtaccagcccaattgcaacatcagaacaaaagaaaaaagttttatcaatcacatcccagtttataatcctaccttagaaacccagtttaaattagaactgtcgccatgcagaaccagagcaggaagaagccaattgcaacaatactgcataaaataactaggttccgaatctgaaacaaagagctgtcttatctgcaaagtttaaaaaaagaaaataacgataacaaacaaagaagatttctttatttttgatgagcaaacaaagacaatattatcaaggaagtaaaagcaaaaaaaaaaatatatatatatatatatatatattatctagacaaacagaaatcctgctggtagtaaacttcgtatactttcagaaaaggaaaaaaaaaatagcaaaaaaaatgataattttatgaccaatcatcagcctgaacacttacctcaacaagtgacactaagctcacaccacaagcaacccaacaaaaaagaatggatcctatgagctcttccaagtactgcaaaagaattattgagatttaagctctataaatctaattcgtatacaaaaatataaagtaaaaatatatatataatataacaaagttgaatgaaatccataattcatccggaatactccatgcaaattaatagacagtgaaactccaaatattctataaaaccatgtggagccacaaatatgaaaagtgactagcccatggactagcagtagaaagagagaactgttgtgtcaccttaaacctagttgcatactgaagcattctggaaagattgtcaagtaccacaaaaaccaatcccctgaaaagaggtaaaagaaattaagatagtgttaccagtcatcagaatgaacttgggattcatcaaaactcaaaattttatttttcaaaataccttccaaaagaagaaagtagagagctgctttttttagaagacattccatttagataaataaattttaatctcaacccgacattctaaaatgcaacttcaatctctagaagagcttttaaagccaagccaaataaattctacaacaattcaatttgcaaaacaaagggcaaacggtacctcagacaaggattaatagcagaaatcacacacatcataaatacagcctgcaagtaagaataggaaataaatgaatacaaagtagaacacttcaatgaaaaagtactaataatgcttatgcataatcattaaaacgaagaaacaatagagaacgatgatccaccaagaccatacaacataaacttatataatagtatttgaactcattaaaatcataagcaatagaaaggggaagaaaacaaaatatataaatatatatatacaccatgtatattatacagaaattaggagaatagaataaagacaaaaagttgcagtattacataaatgaactttagaaaaatcaaacccttattttaaacatttgaaaaagaaagaaaaaaaaggaaaatgtctccacggaatcaaccactcatattgtactttgccttaagaattttccagcacaactccatacagacaaagagtgactctgacatactacctttaacagacccttatttgccccatacacaaattaataaaccaaactgagaaagacagcatatttacctgccgttctattttctcgctgttcaatgcaaggttcatgagtgtaatgataacagtttccattgtaagaggaggctgtggacctactgctaagacctcagcagcagtaacgagtttttcttttgaggaaaccaccaatgaaatgccaaagttggaactagcaaaataaccaaaattaaaaagaagttatagacaaaaatgctgttgattttatacatcctatcatcgatgaaaacctacatccatttgcataatgacaaatctataatgtaaaaaaaaaaaaaatagtgcatttacacaagtatggatcaagaacaacacttcataacttaactagttccatggagaaaaaaaaacagcccacttcaatttagctaacttaaaaaacaaataaatatccattttaactacaaattgattttctttttctttttttaagtaccttgtattaaaaaaatactacaaattgattttctatatttataatccacaaaatatacctcctgtgatttatttattggtcaatctataagagctctttttcagagcgccaagttaaagtttgggacacagtctaaattgaatttatgttacccatagacccaaataaatttcataagaggagagaaaaaatttgtattaagtataagagctagcaatcacaaaaaaattttaagaaaaaaaaatggttagtaaaagtaaaagttaccagatatcttgaaataactcttcatgaccttcccaagtttgaaaaagaacaccaatccgcccagcaacagaaaacctaacacgataatcagtatctcggagcatcattaacaatcgctcaaccattgcctgttataagttgcatcacagcaaccacaaaagaacagaatttaaggtaagataagaaatgtattccaattccataaataaccaacaaaagatataatgtatcctgaacagcaaaacaaggggagaaataaaaataaagttccaatagtaaaacaagatcaataatgagcagtccttgaacttcagaataaaggtgggcagtatatggcttcaatttgttttttttattgtggtagagataattcatcaggtctgaatagtttactatagtttttttcccaagaatgttgggactttgtaaagtttgatttttaagtacaaaagatagactaaaacaaaattatcaatgggtgattggccaaaattacatgacagattgcggacaaagtaccctaggcaatataagatggatgacatttggtaacttagagtctttcaaattagagtggctaagattccctacaatatttaattattttagtttggcttgatgtgtttggatatataaaccctttcattgtgatgatttttataatcttaataatactagtttctcgattcttctcacaaaaagtcatggaaacatttttttgaactaagcaacttatttttttttttgaaaaggagacagaggccaatgtcttagactggcccctatccaataaataatgaaaaccctcacttgtggc

SEQ ID NO: 14032 - DNA, 1982 bp, Cannabis sativa
gttttctatacatttatgtgtttaattcattatttttaggaaatttatattttagaatgttagatatagaattataatccaacatacatattagtaaatcttgatcctggtaaatatatccaatagatggtggatttgggggaggaggagtatgctcgggaacaattgaaatttgaacatgcaggttagaactagaagtgttggaattggtaagagtgggaagagatgtattggtagtagagtaagggaaagagtactcattgaataaaacatcttttgagatgtacatatgactagtgctataaagacattgatatccttagtgtttgatactataaccaaagaaggtacattcttcagacttaaattgaaacttgttcctattgttaggtcttgtattgggaaaaaaagaataacaaaaaattctcaacttagagtaataagtgtacaaggcctaaaaatgagacaagttattgataatatgtgatggcaacctattaatcaagtaagcagaagcttttacagccagggccgtccttaaaaagggcataagacagttttaataataataataaaaaaggacccttttatatatgtagtttttatttttttttatttatgtaatttttaataaaatgaaaatggtggtctattggtcctggagagagagagaaggaaaaaggactgtcgagaacgatatagaacgactaggcttttgagtttccattttttttttctttagcctttctttactgtgagagacttaaagctactttttggtttggtagctattgggccgcatggggccagggtttaagttttataaacctttatttttttttccttataggggtatatatatatatatatatttatatatatatgtttggcttttagttttgggccttaggcacgggcctagtttgccttaacctagggtcaggcctgcttacagcctcatcccagaatttgagaaggagggaagcatgaactaaaagagtaagagaagattcaataagaagcctatgctttctctcatccactctatttttctcatgagtggttgggcatgaaagtctatgagagatgccatgtgagagaagagtgctttcaaaagcttgaaactcacaccccaatcagattagagggctttaaatttgcaatcaaactcattctcaacccgagtttcaaaattaatgaggcatcagatttgcatttcaaaagaaacacccatatgtacctagaataggtatttatgaaatgaatataatatttgttaccactagatgataatcactagggaatgaccctagaggttagagtgaataagttgcggtggtttagtaaattatgtctcaaaatttggaaacagtagcttatgaatttttcctaaacaaaatgcattaaaaaaatcaaatgcaattttatcagactttggcaaattacattgagaaaacacatttttaaccacttttgtagagggatgtctcaatctgctatgctaaagagaaaactgacaaatagtggagacattacaagctgcaaaattagaaaaatttgtattagcatcattgaaagaaaaatgttaaggtacaaatggaaagaagactgagagagagagagagagatatagcatacaagccatttctaagtcctccttccatgagaacttgctggggatcctgatccttgacaaaacaaatattaaaatgaaactcaaaagaagattttattatctttagtaaatggagagacactaagtaaattttaagtgatttttggagcaggaagaagttcatcaagaagaagatatttttgagtaagcttggagtgtgttgaccccaaaaaattactaagtgtaatatttggagtcataagtatgcccaaaagttttccaaggggagctccacgcgccctcgctcccggctcccgctcgctcaccctcggcccgcggccctcctcatgcggctctcgcccgtggc

SEQ ID NO: 14033 - DNA, 8248 bp, Cannabis sativa
cactgcatagccatttgtgtcaacggacgccaaaagatattcaaatgcagcctaattttcttagtttttagagagagaaagtagagagggaaagttttcttttttttcttatgttttttttttttgggtgttgcagagagttaaagagtttgaagttgtcaagtgtttctgagtgttataataatttggtagagttagtatatatatagggaatagtactactcctactacttcctaaaactccaatcattttcctcctttttcattctcataatcttaaattatttaattattttaatttaaaagtaataataataataattaaagggagtttcttttacagtttctttgtctttcacttctagttttccggcgacagaggaggaagtagaagagtggaagaaagaaattcctctgcttctacgaaacactctccctctctatacccttttttcttttatttacaatacccattggaaatgaactctttttaattactctctctctctcttttctctctcatatttattatttttcatcaggtactctctctctctctctctctctctctctctctcaattactatgaagtaattcaagttgggtttgattgtttttttgttttgcatctgggcttgatctcttttttattttttgggcatatgatttttttttggggggttgcatgtttgtgtctattaatttctaggggaaatatgttaatttgaaatgatttcggctttttgttatctgggtatgctgaaagtgatgatttttcttcttgttctggaagatagcaaagctaaaattgaaggcaggacagtgttgacttgacttgaaacttttttggtgcatttcctcttcatttcttctgatgattttgtttgatcaatcaagtgggttttgcatgattttgcttgagtagagattttgttaatggaatcaatcgtctgtcggcgttgatatttgttgtacactttagtagatgttttgtactagaatttataagcacacagtcacacacacacatgttgttgctgttttgtgctttaattttctgcattgattactctgcttttgtttatcttttcgaaaaaaagctgatgttttctttatctgctctaaaagcatgtgtctttacaagctaatgatggttttcttgattatggttaattttgtggaagacatttttgattgatctgatttatgattaacttaataacaaggttttcacattctgtgtatgttatttttggtagtgctagcaatctttctgtttatctcaaagttttgtaatgatctttcctgggcagaaagtgaaacttcaatatggagaagcattctgaggattctatatctggtcaaataagaggtgcttttttgttctttcattttctttaactgttcaaaggatgacacaaatgtagttacttaaattcatgttcatgatttttctgcaggaccttctgagattccaccacttaacttttctagaaatatgggaagcaaattttggggggtgatgcgtggtaaaactgatgcatatcatgcaacaaatgatgccagcttgttttctagctcattgcctgttcttccccatgagaagtgtatgtgtttgcactctgcacctgttaatttccccttcatgatattttgttttcctatcttttggaattgttctttagatttgttttttctttcttgttattttctgtatgcagtgaatttcactgatttaggaaatggtggtaaatcaattgatgatggattgcctaatttaaacaaaattgagcgagcaaagtggagtaatgatcctcttgaagatatagaaccaattgaaattggaaacatccttcctgacgatgaagatgatcttttagctggattgactgatgattttgaccttagtgggttgcctaatcagcttgaggatatggaagactatgatctttttggcagtggaggaggaatggagatggattttgaatcacaagatggtctaagtataggtatatctaagatgagcatcagtgatggggtttcttcaaatggtattaatcattatccacttccgaatggcgtggggactgtggctggggagcatccttatggagagcatccatcaagaaccttgtttgttcgaaatattaatagtaatgttgaggattcagaattgaaaaccctttttgaggtatttagcatttttcttactaaaattatcatagttcttttgtaatcttattcattacatttactttactgcttatgattatggtattcatgtcattttgatagcaatatggagatatccgaactttgtacaccgcgtgcaagcatagaggttttgtgatgatatcttactatgatatccgagctgctcgtacagcaatgcgtgcgttgcagaacaaacccttgaggcgtagaaaacttgacattcatttttcaattcccaaggttggtttttaacccctctcatatgacatgtttgagagttatatgagcaaccatataatacatatttttctcctaaaattccaggacaacccatctgaaaaggatattaaccaaggaactcttgtagtatttaatttggatgcatcagtatcaaatgatgagcttcgtcaaatatttggggcttatggggaggtcaaagaggtatggatatcattgtttcagggttcacccatttgcatgtctttttccttgttatacttatgttttaggaattttcctttggttatgaattctcatttttgttcgcagattagagaaacaccgcacaagagacaccacaagttcatagaattttatgatgttcgagctgctgatgcggctctcagagcattaaataggagtgacatagctgggaaacgcataaaacttgaaccaagccgccctggtggagctcgtcgaaagtaagtttgctctcttttactgggtcatctcccttactttcttagatattcagattttcaaatgtttacgagttttatcatatatattcattaggtgcatacttgagaatggcttctaattctatgcagtattggaattaaaatgctttgatcttttcaccaaattagagcagtgggatgattttcttcctgaattgtttacaaggttaataggttataaatatttaaatgtcatttccatatttttccaatggaatgcttaatactgtgagaaatcaatacttgtcataatatgtttgtgcaagactaggactgtgaataatgggggaaaaaaaagagttgagatcccttaagctgtatgatttagcttaggtgcttttttggtgatacgacttctgggttctcggttcccttctaatctatttgtctctgtcagtggcatatgactttggctccaatatattgtttatggaatcaaaacctatattcttggtcataagcttttgttgattaaggggttaacatcgcttactgaattctttctttcacttagcttaatgcaacaactgactcaagagcttgaacaagatgaagctagaagtttccgacctcaagttggttcaccaatagccagctctcctccaggtagatacccattcatactcttagttgatctctgaacttcttttgggctacctgagttatatctcagatgtatggcaagatataagctgaaatggcttctctggcaaaacaggtaactggcaattcggcagttcagtagaacataatcccatgcaggcttttagtaagtctcctggtataggaagtctcagccctgtaggtagcaaccacttgactgggttagcttcaattctcccgcctcacatatctaactctccaaagattgcaccaattggcaaggaccagggaaggtttaaccagacaaatcagatatataacaatggcgggtcatctcaaggagcagcctatcagcagtcacattcttttagtgatcaaaaactgagcactagccctggtcccatttcctttggtgaatcaaaatcaaatccacctggtattggaacattgtcaggtcctcaatttctctggggtagtccaaccccttattctgagcgttcaagttcttctgcttggtctatatcatctgggagtcgccagttctcgtccaatggacaggcacaggcacaggggtttccatacactagccggcatggctctttaattggatcatctcaccatcacgtgggatcagctccatctggtgttcctttcgaaaggcactttggcttcttccctgagtctccagaatcatctttcatgaatccagttggatttggaggtgttggtttaaaccgtaataatgggaattatatggtgaatgttggtggtcgtacagccttgagtgctggtgttggtcttccaggaaatattactgaaaccggttcacctaacttcagattgctgtctttgccaaagccttcttcagttttcattgggaatggttcttatgtaggatctccatcgaacaatggtgagggattagttgaacgaagtcggagtcggcgtgttgaaaatgggaatttggataacaaaaagcagtaccagcttgacttagacaaaattgtcaacggggaggatgccaggactactttaatgattaaaaacatccccaacaagtaaaaaaaacttcttcctctctcacttttttctttttgatacatttgcttgttagtttttcatttgaaggccttgacttaatgcttcaccctttttctttctttattagatacacttcaaagatgttgctggctgctattgatgaatttcacaggggcacttatgacttcttatacttaccaattgatttcaaggtattcagacttttgatacttttcattctaattaccttaactactgagtatttggctcctagaacttgagagattaaggcttgttggagtaaagttctcttttatgaacccttttcattagatagttgttgatggtttctctccttgtaacagaataagtgcaatgtgggttatgcgttcatcaatatggtgtctcctgctcacattatacccttctataaggttatcttttgtccccttaccatctcatctgttaaaataaaaatgctaggctcatagcaataaattagttcctactatccaactgctcaaataattataaattacttggcgtttttcactttgctaactaaactattattacaggcatttaatgggaagaaatgggagaagtttaatagcgagaaagttgcttcattggcatatgcacgaatccagggtaaggctgcccttgtaacacacttccaaaattcaagtctaatgaatgaagacaagcgatgtcgcccaattgtcttccactcggaaggtcaagagactggtgatcaggtaatatgtttgacttgctgaactcttatttttgtatatgttttaattgctgagcttgtatatttccatcttcaccgaagaccaatattccctataatgcttgtgttgtactcctattttaccatttacaaaaagcatttcaatttttactcataagttggtctggatttgttgtcatattttccagacctgttctacaatttataaatgcttttgagcttttcaattcataagtagctcgataggagtgatatttctcgaaaagagagatgtcaagtagctaagttagtaaatgtgtcttggagtagaatctaaggacctggcatcaaattccatttacaaccctgcttgggatcataatcatattatgggaaatgagaaaattatcttcctttgaaaaatagcagtaagtggataattgtttgacactttctctatcttttgactctccaggaaccttttatttcaagtaatttgaacatatgcattcgacagccagatgggtcttatctaggagatccacttgacagcccaaggggaagtctggatgagaaaatagagaattaacagtgttggtgatcctattctcagcccttgagaaataggtattataaggggtgatgctaactgtttcataggtatctaagtgtatattctagaagagaagccgaggaatttggtgtcttttgctcgttcgtttcgtggtggtgtccgcttttaagttatggattatcacagcactcttggaaaatatcacagggaaaagaagcagagagcgttttgtttttatgtagagtaacaatttgatattcaaccaagggagaagaataaggtgaaagtctatggccgaactgtgaagtatctgtgcagccttatggattagtcgccggtttgtgcagacatctcccttggaggtttttcatttttcttctttatctgcttttggtcatgtggatctttttaaaatccagttgcaaatatgtttttacttgttaatatttagaggggtcggtcgagttttaggggctttcaacaatttgtataaagggggaaaaactgaaccatcttgttgatgttttagttgtgtgttgtagagaaacttgtgaattggacgatataaaagccttgtacagatgttttactactttcccttttctttatagctcatatcatatgatgatttagaatttcatttcatgtaataataataaaaagaatgtgttatgaaacctttcattcattactttcaactaacaatacttgtcagaacagacactgtaatgaaatgaatttggcacatcattttataggttctttcaagcaaaagattttgacataaactgagaaacaagatgggcaatcctcgtaagcatgaaatatttcctaaattacattattattctagtaaaacaacagccccaaaggcaggcctaaatcataactaatgctttcccacttttattctggaatcctgcaaatgtatttttctaaatttgcagagcatctgcaattgatccggcaagacttataacctcaaaaggagccttgttggctatgtctttgactgtcatcgggcaagaatctgtgatccaaaagtaagcaaaggccttctccgagcagtctaaaacagttatcaaatggcaatgagttcagtaaactcttcatcaagagagattattcccatcttatggattaaaaaacatgcagcagattgattacttaccctttttgtgggtgaaccgctcccatgaacgcttgggaaaaacaccatgtgtaacgtaggcactgaccttggccgcaccatgagctgccaagactttctggtgaaagcagaaggaaatgttaaaaatcaatgatattttgggaaatgaaggttttgacatgtctttaagctatggtattcatcatattatgttctaatggttgatcacacgaaatcgtgaaagggatacctgacactcaatgagggtgcctccagattgaaccaaatcgtcaacaattactacatgacaaccagaagggtttccctccttgatccggactatcctcttatcaccttcacgaaccttagcacataccacctgccatttgataaaattttattaagaatataacttaggatatgaggctctgcttattagcactcttttttttttcttcagcaaaatctttaccgtgggaaagtgatctaattgcttgtgaaatcgcttccaagcaccatcgtcgggaaatgcaataactatctggagaggacaagaatcaaaatgaatctatttaccacatctgttatttgaaagatgttctgacaggactcaatgataacaacttttaatgttggaagtgaaaaaagaaaaaacaatttgaatatggtaacagattatttgtgatgtggaattgtataaggaccttatcagagtcagaaagctggtgcaaacgttgctttaagagaggaattccggtctcaaacacaggcaaaacatggtctccaaagtaaaacctttcctgcataggaaaaggaactaggaaacattaggagttacaataacaaatgctaagtcaaagaatcgaaatctaaaataaaattagaaaataattaggactgcaaacatctcttcaataaatacgattggttgaaaaatattaggtgtaatttgtgtgcgcacatatcattatccataaagattatgttatcaaaagagttatgattttaaagtaaacatagtgatgactcgaaactaatataaaagatgggaaaggtttataaatgtcctagaaaatcaatatgagattatgctgttcaaattacaatctcagcagcaatatcattgaatacctcgattattttttgaagaaaagttgtgcaacttgaatatctttctattagtaaaataa

SEQ ID NO: 14034 - DNA, 3847 bp, Cannabis sativa
  modified_base (27)..(41): a, c, t, g, unknown or other
tgacatatgttatagaaatactaaatnnnnnnnnnnnnnnnttccaaggtttccaacataatgaaatacagtgtcctctgtggttcttcatacgtgcgggggttagccgatccaccagggtcactcttccttattatgagattctcatgtccgtcttctagttctctcttacgcatgttgtaccacaacttactttccagacggatttccacagcgatggccatcttgtgctcatccttggttagcctcccaaccctccctgcttcaacattgaagtgctctatgtagctcttaaggctttcggcctttccttgcttaaaattttccaagtttgttcttgggatggtgtagtgtgtggacgcatgctgttgggctaagaattcaatagtgaactgtttcgaagaggtgatagtcctaggcgccaacctcttgaaccacttgtatgttgcatctctaagcatcaccgaaaagcactggcatcttgctttgcttgtgaccctcttcatcttcatttttaattaaaagcatccatgcagtgttttgggttcgttatgccctcatatggtaacatgttgggctctttaaagttcacgagcaaaggctatgcttgaatctcccttgagactggggattcctcgtcaaagtcatcatcgtcccagttacaatgctcagatgcgaccaaaactatcctctgtcaaagatctccatctccttagctaactctttcctccttttagttaacttctcttgtaggtccgtggtggcatgctttgcttttttttttcatttcgaagtgattccactgttagcgtgtgcttctcaactgtggtcttctgacagggcttttctctcaagtctccttggaccgcctttgactcggtctttttgggtcatgatgagggttctggaatttttcgagttgaagctcttcgtggggaggattcagtggtgttatttgtcaagtaccttaatatccccatcctcacgcctactcgctcctctttttcctatttttggcactcaaaatggcctcccaggagctcctctaacgccatttgcatgtttgcaactgtttcttccaagcgcaagttgcttatcctcagctcgttcatctcttcattgtgtagtcagattcgtgagctagaaatcactgagtaggctcgcttttccatcctcgactgatggtgtgaggttttggggtctctcgacctcagtggctgcagtggtcatatcagagacagagccttcggcctttgcacttcgtcgtctacctccggggtgatggagatagttggcccattctgctggttgtttttttgggtcatcctcaggccacccattctcttcttttgcctaggattttttgaccattcatgcctatttcattctgagacactaggtctccgtcacctcctctctcagaagcagacatgggcggagtgggccttgaagcgatcaagtgatggttatcaagtcgcacttccacatcctagcagtgacgagaacatctcgacatcttctcaacgactccaggtagggaaacggtgttgcttttacgtgtcgacttcccacagacggtgacaaattgttgacagttagaactcgtcaacaatataattaggattcaagactatcttttaaagaaaaaaaaaacttaatagaagattgtttgaattaaaaatctcataagctttcctatatcaagaaattactgtttttctcattctaaaaaaaaacctctctttacagtaaactcaagggccctatttataatgagcccttgacactttacaacttcaccagatccctaatccataagatgttaagtcactatcacacctgataatgttatatcctaagtagtctaatatacttggcatcctaagttacattaaaaatacccctttaattttgtacttcagatgaaatgaactttgtccacattatctatactcattgtgtcgtcgttatctcgtctgatacttccttgcttagactgttggtaccaggagggaaaagaagattgacgaagtgtaggaggctgagcgcagggagcaggcatggtgcggggtgcgggagcgtgagggagcgcaggcgtgagcagcgtagggcacgggagcgcgggcgatacaagcacaagggcaagcaggtgcaagtagcgtcgggcgcgcgggcagtgtggggcgcgagggcgcgggggcacgcgggtgcaaggcacaggagcgcatgggcgcaatcggtgcggagcgcggagtgcgcgagcagtgcagagcgcgaagtgcacgggcgcaggctgtgtagagcgcaaggcacgtatgtattgaggagcagcccaatgtaacaaaagggtcgggggccatcctttgtcctcttttggttgtcttgggcatcttgaattattcatccttttatttgttatttataagaatacttgttttttaaatttttgcggttaataatatatattgaaaaataaaaattatagagacattttatataaagaagttttaattaatacttaaaatattgtagatatttttacaatatctacaatattgtatatataaaatatgtagatatataattacatctaaaggactcagcaatgtagccgcgataactaaaaaaaatctcaaagattctcaaaaccccatttcaaaattttataaaaatacattacttaattaaaaaaataaacatcatgtattgcacttaacatcacttaattgaacttattaaaaaaaaacaattaattatgcgtacattccacgtaacatcaatctagtatatatataatatcttagtaataaataattttagaaaaaataaactatctttttaaaattaatagttaaaaaatatctaatcatacataataactaagaaagtaaagtcaaattatctatttatactttttaaatttataattaatcaataattaaataaattaaaatttctaaatatcaattctttaattttttttaaaatgttttttgttatactttaaatttttttcttaattcttttattttcttctatttttttattctgctttatttaattagagatgattgataattaaaaaaaaaaaaaacaaaagataactatacttttctatatgttatctaaaaataaatatatatatataataagaaaattaatctacatacaattttttttcaaagagagatatagttaatattaactaatataatttacgaaaagaaattattaaataacatactaaacatatcaaaattataaatttgattatgtttatcacccctctctcctcacataataaaagtaagtatttcctgattattatttaatttattttatgtacagagcacacttattagaaaggatattaaggatgtttacaagtgagatacggtgatgacattaactttaaatatagtgatgactacatataagatacggtgatgatggttgttttgaaattatatgatgatgagttttctatagatttattactttctttctcttttagatctttattttgtgtaacaattgtttagtttttaattaatgtacatttaaaaaaaaattgcttgattttttatttatgtaagaatagtatgataatttatttttcaattttagagttttttttatatagattaatcatcatatttttttttaaaaaaaaatgcatgaaaataaatttaaaattatttgataataattttaaagttcaattaatatttatataataattcaactaccgcacgcgaagcaaaacctgttcactagtatataattatttgtaagagctggcatgtgtaaggaatgttcactatttacatgtgatgtctgcacatgt

SEQ ID NO: 14035 - DNA, 14320 bp, Cannabis sativa
  modified_base (35)..(37): a, c, t, g, unknown or other
  modified_base (1843)..(1848): a, c, t, g, unknown or other
  modified_base (13587)..(13587): a, c, t, g, unknown or other
  modified_base (13764)..(13772): a, c, t, g, unknown or other
ggccttaaaaaaatgggggccttgtgcaatggccnnngctgcccaatgcttgggccggccctgaattaaactaaaagcacgttacatcagatgctctaaactcctttaatttaaagcttctttaaaatttactattcaagcattacatttatagaataatattcatgattttaaatatattatattaattgttttataattttaattttactttttatatggagatatgtgtaaatggataaaatatacttaaaaaaatagataaaatatacttaaaaaaataaaggagtttagagcatctgctctagcgcatttgtacagttctttaaattctttttaaagtttctctattttagagaaattgttgtgagtgctctaaataagtcctgaaaaaaggatcgcataaaatttgaaggaaaaagtgataaacacaaaaaaatataatatagtaaaaaaatgatactaatatactacaaaaaattataaaaatgatactaatatactacaaaaaattataaaaatgatactaatatactacaaaatagagaaaccaaagttttggtaagatttttaaaaaatagagtagagaagttgatgtaagtgctctaagaactattcatgagctaaatattttagctaaaataactcatttgatagagtgacattttttatatctatttttagctattagttaaataatttaattattaactattttaattactctattacatgtgctctaaataagtcctcgaaaaggaatcgcataacattcgaggcgaaaggtgataagaataaaatagagaaaccaaagttttggtaagatattttaaaagataaagtagagaagctgatgcgagtgctttaagtgctttaagaattagtctatagctaaatcttttagctaaaataacttatttgatagagtaatatttttttgtccatttttagagcacttccaacaatttttttattatattctttaaaatacatcactaaaatattatctttttttattattattttacagcacacttttatattacacattacatcagcttttttaaaatacatcaccaactttttaaaaattgtattatattttattcatttcaaatatataatattaatatatacacatatccaaaataattaataaaatatatttagagtagtgaataatattctataaatgtagaacattaataatgtattttgattaaagaaagagtttagagcatctactataacgtgtttttaatacagttctttaaaattttcaaagcttttctattttaaagaagttgttgcgagtgctcttagctcttagcaacaactattaataatggaaggtgttttttaatgtgttggggtgttattttgagacgttatagctttattgtctaaatttcaggagcagttttgtcccatatagttcgcattgaaaatttaacaacccataatttaacaaagcatactaatagaatcaaagaaaagtcctacactgactgcgaatatcaacatcataaattcataagtaattctaataagtctccgaaaaaagaatcgcgtaaaattcgaggggaaaggtgataaacataaaatagagaaagagagactccatccatctcaatcccaatcctaatctcagtcacaaaacagagtcctaacaactaacaataacacgcccaccatagttgctgccaaaactcccccaggctatagggtccccccaacattacccatctacattgacaactccatctctcactctctttctcactttactatttttgtttattttctctttttctttttttcatagtaataataataataatannnnnnaaattaaaaaaaaaaattaaaaacccctctgtctcttctctgtctcatctcatttcatataacatatgatacatttatttatatctttagtctttaccgtacaaataactgaaaaagataacatctttttttctaatacctatacataaagccataataataataacaatacaactattttattttattttattgggctcagatttttaaattgaaatgagttttgtgatgataggaattataataaagtttgtttctttattgcattgaatgaaaaataaaattaaaaatctcttctttttgtcttggtggagggtctcaccctcatctcacctctacccagaacagtaaattgaaaatattataataaatttatagtaaattttaaaaaaggaaaaaagataaagcaatggcaattggcaaagcagagagaaagagagaagaaaatgagtggggaagtgtgggttatgtactgtcttagcctgtcccccccacttaacacagtctctctctctcttttatttttagttttattttctctcactaactgtctgagtctaaaaggcattggctttattttaattattatttttttatttatttattttggcttttttgttttcctgtgcttcctatgcaattgtctgtgtctgttgtttctgctccctctattcagtacctgcaaatgggggaggaatcatactttgaatttcttagttattattatttgataccctctcttcttttttcaatcaaagttcctttctttatttaaatctttttttgtatttttttagtttcttcttggccatagaggcatctcatctcacctctcacttttttccaaacatgttttttttgttgtttttctatcttctcatttgctcacaacaactactactaccacttcttcttctttttcttctcatttagcttcatgggtactcctcaaaatatggtttttctcaccaaggttttagctttttgggtattcttgttccacacttgattactctaaaaccccacttgttttcttttctttttttctttggttgttgagaaggggtggtttgtttgtttgtttggttggttggttgttgctattgttgtatttcataagggtatttgttcatggaaattgatctgaaccatgtagtggctgaggtggagaaaaatacattatgtaatggagattgtgaaaagggtagtagcagttgtgtttgttgtttgtcatcttcaacttcttcatgttcttccaattcatcttcagctcctgtaacttcttcaatctatttggagctatggcatgcctgtgctggtcctctcacttcactacctaagaaagggaatgtagttgtgtatttcccacaaggccacttagaacaggttgctcctttttcatctttggatttgcccacttttgacctcaaaccacagatcttctgcaaagttatcaatgttcaactacttgtgagtattgggttttcttcaatttcttctctctttttttcccataatagaaaatcttatttatctgaggtctaactttgttgttttgtttaatgaaaaaacaggctaataaggagaatgatgaggtgtatactcatgtcactttgcttcctcaacctgaggtaatgattctgaattcttgattactgaaaactctgatattatattctgtttgtcttcatttggttcttactgtttttggactttgaataataataatattactttattgaagatgattaatgatgatgagtatgaatgtgttgttattatatagttggtaggagtgaaacaagaagggaaagaggttgaagagttgggaggagatgagggcattgcagggtcacctactaaatcaacccctcatatgttttgcaagactctaacagcttctgataccagtacacatggcgggttctcggttcctcgaagagctgcagaggactgttttcctccactggtgtgtttttatgttagtttcattggtggttctagttttaactattggcataaataaactatatcttttttgtgttcttttttcaaaggattataagcagagaaggccctcccaagaacttgtcgcgaaagatctgcacggggtagagtggagatttcgacatatttatagaggtaagttctatataatctgttgaatggtttgattgttgtaaggaatgctgaaatttcggtatacatttgcttgtcaggtcagcctaggagacatctactgactactggatggagtattttcgtgaatcaaaagaatctagtttcaggggatgcagtgctctttctgaggtaaatagtaacactctagtaccattattatgttgtttgaattgtaggcttggtcccattctacacattgtaagattcaaccgaaaaagaaggaatttttgaaaaaaaatcttaatttcttgagcatttttgtacacatgttcttgtcaagtagtcaagtaggaataatagtgtttttgttcttcttgtgtgtacatttaagaggaaagcaacaaaagttcttgtcatgactcatgtaaaaaagaaacaaccatattttttggttgtaaatggcgatattgtctatccttttcgccatcagagccttttgagtttctttctcatttattacggtttgtgtaggggtgaaaatggagagctaagattgggaattaggagatctgttcggccgaggaatggtcttcctgattcaattgttcgcaaccagaattcttatcctaatgttctttcactagtggctaatgcagtctccaccaagagcatgtttcatgttttctacagtccaaggtatgattagtagtcatcgtctttgtaaaaggaagatgaatttgcttttaccataattcgcactcgattgaatttgacatagttttttaaactagagatgtctcctaggttgatagaaaatgtgaggttcatgttcaatatggtaaaggaaagatactaagaaatgttacactagcatagaaagtattcgaaagtaaaaatgtaccgattaaattttcggtgggaagaaataggtttttgctactaaaagtgagttaattttggggtgtttgacaaaatattcttttttaaatgtcactttacgaaatgccttttgttttttttaataattctttgtaaaagtactttccaacacacttgacaccctatctaggagctttattaaggataataagctttaaatttttatattttgtgggggctgtaatgatatttttatcaactttaggggtatttaaaaaaatcacaaaagaaaaaaaaagagttattacattggaaagctactttgtaaagaattatattaaataaaaagatcattttctaaagtgatattaccaaaacaaaggtctctttttcactaattactattagggaaaataatactaatacattttgtgatactttattctctaaaacagttatgatttgttattattaaataaatcaagtttagtctgattccattatattttgtaaaagtgatcaaatccatgatcttgtgaaataaaatagtaacaatctgttttcgaatgatcaaatgcagggcaactcatgcagaatttgtcattccttaccaaaagtttgtgaagagcgtcacaaatccagtggcgatcgggactagattcaaaacaagatttgacatggaagattcaccagaaagaaggtcttgtagtgtagtgaattgttttgtttagtaaaagatgagctgatcttgtttgagtagattatatgtctgataatacaactcgggttttttcgttcttgcagatgtagcggtgtagtgactggtatttgtgacttggatccctatagatgggcaaattcaaaatggagatgcttgatggtatatatagtcttttccatattcttctttatatgaatgagaattgttttctgtacttcccttttgcctcttttaattgttttgtttgtatctctctctctctctctttctgcagcctatgataaactattctagtctcatttatccatgcataatttgtaatcgaaaaatgatatgtggactcaaaatatccaccgaaacatctctttcttgtgcaaccctttatcatgataactattcaattcttatttagccacagtccacatgtataattcgtaatcgagaaatgatatctgcactcaaaatatacacctaaacattacatgtcaattttatagacgaattatttatctaaaccgaggctgttgtcttaaaaaaacagaccgtgtaatgttttggtgtatattttagacgcttgtatcaagagcataaagatatggattgaagtcatctgcttggcaccttacagggcaaaaatcttatatgtttacattattgagcagaataacaatccttagtagcaatttcctattggtaatgtgtgacaggttaggtgggatgaagacattgggaatagtcatcaagagcgaatttctccatgggagatcgatccttctgtttctctcccgcctttgagcattcagtcttccccgagattgaagaaaatgcggacaagtctgcagtcaaacccgcccagcaatcccttaaccggtacaagtcttgcgaatcatttttgtgtatgtattaagcttcattaattcttcatacatctaatttatgcatccttgttttattgtagtaggagggggtgggtttttggactttgaggagtcagttagatcctctaaggtcttgcaaggtcaagaaaatatcggtttcgtatcacccttttacggtcgtgatactgtaaaccacccgctagattttgagatgcattcttcagctcatcagagtctagcagcattgaacacaacaaaaaaatcaactatgaatgagttcatgagaactcaacccaccacttacacaggctttgcggaatctagtagatttccgaaggtcttgcaaggtcaagaaatttgccaattaaggtccctaacaggaaaatccaacttcaatcttggagcttggggaaattcctctctcggcagctgcacatctttcaactcatatcaagcagccaagcccaatttttactcgatggcatcggaacctttacaaaccacatattttcctttcggtgacattcgcagagctgggtctaaccctagcattcgttcgaatgttaccacttttcctcgcgagaatgtcaacattagtccgtacactattcagactgggattgtaaggaatgaaattgggataccaaatacaccgaacgagcttaagccacaagaaagcaattctgctcttcctcttcccactttagaaacaaatctaagaaacccgaaagatgacagctttggtgggagtgttagtagctgcaagcttttcggtttttccttgacaggggaaactaccacaccgaactctcagagttccaataagagaagttgcaccaaggtaagctatagtaatggcttagttggatttaatttgccttttctgaatgctttgccaactgatgttgaacatattgagcgaaggttcacaagcaaggcagtttagttgggagagccattgacctctcgaaactcaatggctacagtgaattgctgagtgaactcgagtggttatttaacatggaaggcctactaaaagaccctgataaaggttggaggatcttgtataccgacagtgagaatgatgtgatggttgttggagatgatccatggcagtaagtccccgaatcgtctacctttaaatttgtttcttgtttgagctttatctctgttaatcatactgactgtttcttctggttgcagcgagttctgcaatgtcgtttcgaagatccacatacatacccgagaagaagtggagaagatgtcgtttggggtgactagtgatgatcaaagctgtttggagcaagctccagtttcgaaatcttcatcggtcggccagccggactcttctccaactgttatcagggtttaagtgtgtctttactattgtgttttcttcttctatgtcttcttaagtatcaagtttgcacaagaaacctggtcatgtatctatctatttttaagtcctaagttcagtagttgaatattgtaatgccataaaaggttaaaactcagctgtgaaccttttaaatattggtcttatttctgtattatgactggtcaagagtatgaagtgttggatttgcaatattcaaaagactcactcccattaagggtcgaagttattttctctctaaaccgctaccttattcgacaatttcatcagttctaaaaatgaaactattttgaacagattttcttatataaaattcttacttacaacaatatcaacttcattttctatactgaccaattgctaattcattttaaggattacataaaattatttcttgctgtggtatagttagccatacccaaccattaaatagatacaggttgcctctcattactctttgaagagctcacgaccaattattatccttctaacttcactggtacctgccccgatttcatacagtttggcatcacgaagtagccgaccggttacgtactcgtttacgtaaccgttgcccccgagacactgtatagcctgcaataagagagctgattagacaatgtaatggcaatatcttaagagagcctatggattatgaaaccatttcgcttctgttttcgttagaagtttaagataaacaaggatggcttgaatagacattgtttttgtagtcggccaaagttaatttagttgaatttaatagacatttttggataatgtaggagtttgaaagaaactgttaaagtcaacaagacaaaaaattgcagtgtagtgtctaatcacctgcagagcaacttgtgtggctctttcagctgcacataatattactccagcacaatcctgaaaaatttgatcacaagaattattatttgagtttgaaaaacaaaaaggcaaagatttaagaaaaaatggggaaaagttcagggaccggactggttccctctctcgaaaaagcaccttagggttaacatttccgttgtcacaatctcttgcaacagaatatacataggacctgaaaacaaacacaaatgcacatgtacagatttatgcacaaacgaaattctgtaatgttaaaaacattttagaagcagaaaagtaatagtacaagatcaaattccaaaaccattttaccttgatgattgtaaggaagtatacatgtcagccatttttccctgtaaggacaagcaacagtatgagtttggcaaaattcatgttgtaaacaccatgaagttgtaaacatatcaatcatgaacctgtataaactgaaattccccaattgggcggccaaattgctctctttgtcgaacataaggtagaacaacatcaagacatgcctgcatgatgccaaggggtccggctgctaaaacaagcctctccaaatccaaacctgacatcatgacatagacacctggaaaatagagacgaacaacagccttgtgaacataagacatgtaatgaagcacgtagttgaattaaaaccagaaaagaagtaaccttttttaatagcattaaaactcttaagtggtctcatgttcacaattcataaagagtatcattataaaagggtcattattgtctgatctatgataataatgattttttttttccagaaaacatatgcagagggagtctgagatatttaagttaggtcaacgttcacggtatatgagctttcaattttataattggaaacaaagcaccatattcttaattcgtatatctcatggaacagataacatacatgagattatataaatttcaaaccttttccttcttgcccaagaacattttcttctggcacaaagcaattctcaaagacaagctcacatctgcaaaacaccagttgagtttttagaagagtaaagacaaaagagatgataagtttaacattagataattctactacagacatacgtatcacttcctcgcatgccaagtttgtctaacttctgggcagtactgaatctgcagaaccaacacaacatttattataagtagttttaacaacgtttcattgcacttttatactaattctctcatttaccctagacaaaaagaaatttttaaaagcaagcaacaaaaacaaaaacggcgatgataatttttgaaaaataaatcagcagtttcagttctttcaacagtttgaacaactcacaaacatcaatcctccagtacttgctaagcctgactttatacaatttcataatttataaacttcttattctatgagaaactagaagaacaactattaaatagattacccgggcattcccttctcaataatgaatgcagttattccttttgaccctgctgttacgtttgtttttgcataaacaacctgattcaactctaaatatcagtaatacatacacaaattttgaactttgcataaataagacatctaaatactgcgtacaagactatgcaggacctagttcatagtcattatttgagggagaaatgcataaaattatgaaaatgaagtgtgtcatatcctatacagacttccctttgatcttggaaaaacatcatagctttctcaactaatgaatatttaatacttaacacacaaagaacaaaatcaatagtgattgcttttcataattaaatgcaagaaattctagcataaataccagtgtttgagcaactggcccattagtacaccacatcttgttcccatttagaacgtatccaccatctacccgatcagccttgcacttcatgctaacaacatcagaaccagctgacagaacataatagatcagaatcttgcatgttaataagcaagtacataaaagcttagaaactgcagtaggacagatcaaccaagtatacgttgattgttgttgttattattattttcctaaatataattaatcttatgatttaccattaggttcactcattgcaagagctcccacatgctccccgctgataagctgtaaaataaattgttaagctttgcttgtcataattaaaagaagtagagaacatcatagcttatgaaacaaagttgactaaaatgttttagtattggacgtatacaaagatattctaagcataatagagggggagagtttgcaagaatggttaggaattaatcttttgcaacataggtacacctctgattggaattcatccacaattttaatgatttagttagaataccaagatttatcaatcttaaatgttgatagttgagaaatagatggagctaatcccgttgcaaaaagataaaacctaaaactaataacattagttccagagtgtcttttcttgcattaagtatagatgaaacatcatgtggatcaaagatgtagatgaacatagaacctttggtaaatacttctgtttctgagcaggatttccattcctcacctaccaaaacaaacaaacaaaaatggagagctaaatacttatgacagaaagtgagactactctctgtgaaatgcaattatggttgttttttaccagctgattaatgcaaagattagaatgagctccataggaaagggcaacagagcctgaagcacgactgagttcttccaaagcaatacaatgatacaagtagccaagaccaagtcctccatactcctctacaagaaaatcaagatttgagttagaagtgctggaaatttcacagacaggatgagagttcaaactaaataaattgtctgattataaacgaaagtcatcatctagaatttttcttctgccataagtactgaagggaaacaatttctaacttctctccctaaatcaaaataaaccaaacttctgaagatgaacaacgacaaaattccaattcaattgtacatttcactagggtgaactctctgcatcatcatgaaaactttacctggtgcagtaattccatgaagattaaactcccccatgagtttccataagttgacatcctgtaataataagaagaagaaggatcagaattcagtcaattttataattacgatgtagaatagcattcatgtacctttgggaaagaatttgtttggtctatttttgaggcatgtggagcaatcttttcttgtgcgaattgagaaacactttctttgaactgtaataataaggtaagaactttcataaagaaacaaaaaaactgaagttttttgacaatggaagacaataaatgcttgtgaacaaacacaatcaaaacaaagaaaaaaaaaaaaaaaaaaaaccaagcacaaagtagttgaaattttcactcaacatgaacagaattgaattcttcaataatcattctctaataaactatcaaccaaaggacatggaaaaaatattacatagaaggctgtaacttttcttcattcacctgaaaccccacttctcaaaacaataatatccagaataatcactgttctcttctttaaaataacacaagaaattgcttaagccggtttataaattatctgggatcagtaactttcttccaaaagatttgggttatgaatacataaaaaatacatagaagaaggtagatgaggggtaaaacttaaaagaaaagaaaaagttcacctctttatttcgattacttccatggatgcctagagtaatttttatacatgccccaccccaccctcctagactttatttgaacaatgaaggtatcattgaaataaccaaaggttagatgaaaccccacctaggctcctagacatgaatagatataggcttacatataaattctttaaaataaaagaattctaattttgaggttaggcaattacccaacctagggctcattaggtctgtctctgattacttccacggtttgtaatcacattcattttcacacaaaattcagaaatttgaacatatcaccaatttttcaaaatctccttttctccaatttccaaattccaaaatgatcatatcagccataggacaacaacgagtactctacatctacactacacccttcgatcgtaaaatctataaataaataaataaaaaagtaatcgaatagaaatacagaacaaggtaacaaatcatagataaaccaacattaatacatatatataaacatatacatatatagtacctgtatttgggtgtcatcgaagagcagagaagtggagaaagaagcaaagtgcctttgtttactgattactgaagaacatcgtgagaagaccctctgcattttttgactcttcaattcaaaactcgaaaatgagaagaagagatacactcaactacgtatgtatatatataggtatagctaatagtaattgtacaaaacacacgtttcaaattgaagacgtgtgagaatcttattggctatttaaaattgagttagcctagtagcggccacattgaaacaaaaccagtttattaattaatggagcaaatgataagaagaagcttacctgtcattcttattttattattatttttgggttcggtgtttatctttgtctaatctaatctgcttgcatgtacccacactcgacgttattatctacatccttcacctttttctctaccattatttttttattctaaaattatcatatgaattaaaaagaattttcctctcaactttgacatatactaattttttggtctaatttcattcaattttattgtttcagtgtgatgaaaatgatggggtccatctcaaaaccaattggcgatgagtgttcatgttcttatatatggctcantacttttacatttaatccatgtgagacaatgttctcaaatacagtgattatttatgtactaaatcatgctccctaaactttgatatctaccaaatcatgcctctcgaactttaatatatgctaaattatgccccttaaaattttatatatgttagaatttttttactaaaattggannnnnnnnnttaaatctaacaatctcaatagtgcatgtcaaagttcatagagcatgatgtagtacatgtcaaaattcggagaaaaaaaaaatcctaattagctaattaaaaatgataatttatgttttaattttatctacttaaccccccttttttttgtactacttttttttaggcgccaatggagattatcactatgaatgaagctatagagtttaagtaggacggttgccccatttgaaatttaattcagttttaaattataaaatgcttatacttaaataatttataaatattaatcatgtcaaatattattcttatattattttggtgtaaaatttaaagtatattgttgttggtgcattttaatattaggtctcataaatttttatttagtgaacattataaaaaattagtattttattaataataagaaaaaaattatttactaaaaaaattattttttccttattattaataattgtcattcatacaaaaatgctgaaggatgtgataaaagtagtggcattgtgattgtagatggtaaaatccacaat

SEQ ID NO: 14036 - DNA, 2377 bp, Cannabis sativa
agttcagtaagcatttttaacgaccttaaaagttcaggaggtatgatttggtatatgtcaaagttcagggagcaaaaatcctaattagcattttattaatgtgtgacagacggggtaaaaataacaatggggatactgtattttggacagcagtaattaaaatttatttaaacaaaatcatttgtagaattgattagagggtttgaaaggaaggttaattttgttttttgtttttttttttttaaaaaaaaaaagtatgatttggaatgacatagaatacaaatatgtaatagagaaagagtaggtaaaagactgtatttttcaatctataaaattgtagtaagaaggatgaaatgaaatgaaaacatacattagtttttatagctggccaatttctagttttattacaataattatctttggatagttggcattttgtgatttaagattaaattttagaataagaagatattgcttttgttttttgttttccaagtagtaatgcatagtctattcatcaaattgatagaggttcatgaaatttaactcctacaactgcctcccttacacgctaatcatattttggtgccaagttcagatgacaattttaatttaaacaaacggcataagatgtgtgatacctgggttaggatgccaatgaacaattgcatgacattgcaatatcaacccttaaaactcctatataatctataaagaacccaattgatgtacacttatatacaatcaaagttgaattaaggaagaaggaaaaaataatgaagcattttaaaagcctgacaatgctagttttggcgcttatgttgttggaaagagtgagaagtttggaagagcaacaagtgcccatcccaacttgtgcaagcactttcttctcagcactcattcagctaataccatgcagagctgcagttgctcctttcagccctatccctccaagcgaagcctgctgcaactcccttaaggctctaggacagccatgcttgtgtgtcctagtcaatggtcctccaatctctggcgttgatcggaacatggctttacagctccctgaaaagtgcactgctaactttgaaccatgtagtactctctatcctctttaacaagaatttttcttttcttttcttttcttttcttttttttttttcacaactctttagcagtcatattatttgtcaggacataatattttttttatttcttttaagcatgtcaagaaacatctataaacttcaaatggttcaacttatttcagagcataattgtaacaaatgattttttgttagtacctcactaattgtataaaattttctttctccttgcaggtgacaccatgaactagaaagcagtagaagagtggagtttagatagatttgaagaaaataagtgcttgaaaaggttcaagaccaattccaaattagctctaataagaggacacacatgttataaaattatatacttattatattatttgtctttattttacttactttagagtttattccatattttgtagcttgttagctgtctaatttctgtcatactaaaaataataaatttgtctacttcttctctaacttcttatcatcattgttggcaatgaaattttaagaataagttcatttttatttcttgttgttcaaaattttcaaaatgattaaaagtttcatgaaataaatcttaggcaaactcagctaatttaagtggccttcctcgagttcataaaattgtattaaataagaaaatttgtgctaaaaaatgcctgcacccttaaaaatatagttgcaccgatgtacttttttttttttttttttatgaaccgttataatctcattttttttatatattatggtgcatattgaagttattcaaaacattctacttaattttgagaaatttaaaataatatattacaacacaaaatgtaaggttcaaaaaatttatttaacacgcgtataacataaaaatgacacgtgcaataaatcactatttgaatcttattttaacttttaaataactatgttgtaaactatcagataaaaagaattaagaccaaaactctggatatcgaaacataagggggatgtcgaaaactctagacagtgcaccataggatttttccatatcacttgaaagttgttcatcgagatttttaaaaatcgattacgagtaatagtaagctgaagaaaaagattaaatatggatatttacaagagtttttacttaattagcacataaaatgggacttagtctacaagttaataatactatctgttgacttcgcttttagccaacgacaatgagtctattttataagcgataaacgatatgtcgtaacaaatatataataaagcaataataagac

SEQ ID NO: 14037 - DNA, 7400 bp, Cannabis sativa
gcttggtggcgaggacgtggctgagtggcatcaactcaggagtttcatcagtagcataaccaaacatatggccctggtcaccagcaccaatctcctcagggcgcttggtaaaatgtccatggacaccttgggcaatatcagggctctgctgttcaatgttaacaagaaccttgcagttgtcggcatcaagacccacatcgtcagaaacgaatccaatagaacggcatgtgtcacggacgatcttctcgtaatctacattagccttggttgtgatctctccaaagaccatgaccatgttggtcttggtgcatgtctcacaggcaaccttgctgtcagggtcctgggcaaggcaggcgtcaagcacggcatcagagatctggtcacagagcttgtctgggtgaccctcgttcacggactcggaggtaaataggaaggtctccatctttatatctgaaatcaaaacaaccaaacgtttaaatatagatacaatgaaaacgagtcagagccgaaagaactttctctgcttaaaatattcattcagaaattactatttcacaaccaccgacattcaaacatgtatatatttacacactcctatgctaagaataatgaatacaaaacaaaaataaatgaactacaaagctcaacaaaaaacaatacgaaatccattagagcctgaatatttgtcgttaaactttacaaaatgctcttcatatactcatcaagagctataagggcagagaaaaacgaaccagaatctaatgtataaaacaaagtgaaaaagaataaaagcctgcacaaatcacagtcagaataataacagctttccgttatacaatgacaagttatctgactaactcaaaattaattctctcttttttctttaatttcaaaacacgaaacaaataacttcaaaagaaacagagatctaaccagatcgatctgctaatactcttaaaaatgacaaatgatatagactcttcatcatactttctcaaattcaacttcataatacgtttcaaacacattataatcagatctccaacacaaatatgccaaatcaaacaagccagatctgataccataacataatcacatactggaaatgaaaacaaattttgtattctcagctatacaaacgagatttgagctaaaatcagagtagagaagagaaaaacagtacctgaaatggaagaaggaaagagcgaggaagttgtataatgcgtagatctgtaaaaatggtgctctcactcaacccagacctttcttcttcaccgaaactcaacgactggcaacttttcccatcttgttaactcggtatttatagagctaagctctgtgtgaccccttaccggagtgatcggtgggggagttggtgggatttgacgttactattaccggtaatagccggtcattcaccaaccctagccagtttcatttccacctatcccgcggctcggctcggctacgactacacagctgtggttctcttaacacgtttttattattttaatgaattaatatctataattataatagttcgggtgatgaattaagacttgaatattaaccatatacattcttatatgacttgtccaaaagaggaattgatttgattttaagtaaataggaaatgcctaaactaccctcgaggggatgcccgaaattttgaaatgcttaccgacaatacatggcaaacaatgagctggaggaagtaaagattgttagtggctatgggcttttcttcctctctctcttgaaggataataatggaaatctaccttcaaatattaccaactcaaattaatgtatgtttttttcaacaaagtttttaaagataaactacaatattcattaataggcaaattaaatatagtcgaattacatgaagatagaaacccatagagtaaaaaaattccatataggctaacaagtcataatccaaacgaacatacaacaatcgaggtactcatcatttaatcaataactataagttaaaaatcttccaacaaaaaaaaaataaataaataaactcattattcaaaaatgaaataaaatgaaataaaaagaaatagcaaacgacatgagaaggcaaacaaacataagagatttagggctcgttccaaacgagcccttaaaaaccacaacacatagggttaataaacagatttgaatgacaaggataaaaataaagacccacccccgcctctcaaatttgagctaatcaacaacacaccgatcacccaatggggatcaaactccactccatttgtcaaataaataaaaatccctactaatctagcaaggcaataaaacaacatgttattataaagtaaaagaaacataaaaataataacagaaacaaaacagataagtaaggcctatgatcttattgaatgggattttcttggtgcaatgatgattcgcatggggtttgatcaacgttttgtggacctaattctttgtactcttacttcagtgcaatacaatattgttcatggtggtcaggttttgaggccgaattattcctaggtgtggtcttcatcaaggtaatccactttcacctgatttgttattgttgtgtgtggagggtttttcatcccttctccgtcaattgaaagttgaggtgatcttaaaaatattaaagtggctcatggggctctccagtagtatcacacatgttatttgttgatgatagttgcatttattttcgtgctaatgatagagatgctcataatgctctgcgtctattgtgtatctatgaggaagctttaggttagaaggtcaactttgctaagtcatcgactttctttagttctaatacacctcatgtgacttgtgatagaatttgttctctcttagggatttctcctactgatactaatagtttgtatttaggcttgccttgggttatggataagaatagatttactattcttggtttcctgaaagaaaagatgcaaaagaagaatcaaagttgggaggggcaatttttatctaaagcttgtaaaaaggttatgcttaagactgtggcacaagctttgtctcgttatgctttgttagtctttcttttaccattagaaacttgtagttaacttgaacggttgatgtcataatattggtggagttctggctctaattgttgtcgtggggttagttggatgagttagtctcagctttgtaagcataaaaatgttggtgacttgggcttttgtagcttgcgtgactataatctctctttattaggagcaaggctggaggcttttggtgaatgaaacttctctagtgagctcaatctataaggcaagatactactcttgtggctctattcttcaagctcaattaggccataatcctagtttcatttggaagagtttctttgaagctcaacgtttaattaaatataggtgctagagtaagtataggctcaaggtgtaatattgatatcctcacggatcattggctttcgaactcatcttctccttttatccaatccacccacctaggctaatttaaaatttcaaagttttatgaagatttgttgttgggaatgggatgaagaagttattggtgacttgtttgatgagagggatcgcattctcattcttggaattcctttaagtatcacatgtgtaagtgatagttggtattttatcattttctccaagaataaaaagctaattggcattgagcaatagaagaagatttttggaagtacctttggaagcttaaagttctgcccaaaatccaacatttttttatggaaaacccttatgggttagcttcctacttagcatttattataaaataaacatgtgttcattaatttgaaatgtttattttatcatcaagcacctgaatcgaaatctcaaatttttttgacttatccctttgctgactcttgttggaatcgttcttctatcgataagggtggtattggccaagttgatttttgtagttggtttcaagccatctaatctcggagacaaaaaaaattagttgaggaagtgacaatgattgcttggtccctatggaaaagatgaaatgatattttgtgtcactcaaagattaattcaactttagtcttagtcttgttggcttgttttgttcttgatcaatggaagttttttcaatccaaaaagtttgatccacttttgcttgtccatcatatagacagaagtgttgagcgttggtttaaactagataataataagatcaagataaatgtcaatggggctatttttgaagcaaaaaattctttaggatgggtttagtggctcgacaatctaatggtttttttgctttaagcttttactattcatcacttggggtgtgttcagccagttactgctgaagtaacaggtatgaaggaagctttgagttagattaacaggaagaatttgaatgatgttgttattgaaactgatagtttagtgattgttcaagcaatttaaagtcctctccaaattccctctacatttagtttattaaagtaattgcaaagttttattatctactcttcttaatgttgagttatttttgtttcacgatctgcaaacaaggttgcacattgtttagcacgctactctcatttttaatctgatcgccttttcactgagagaaatatttcttttgctcttcaatcccttgtaatggttggtattattgtttaatgaaactatccaatttcattaaaaaaaacagttgaaatgaggcataaacaggcataagatatagacaaaccaaacactaaatcaatactgccaacaaatgaattctcctatccatcacctcacaccccaatgtcaccacaccctaaaccaagagtcgcaagtcaaatacccacaagcccacaccacccaactctcactaaccaacccaacatgttggtccaaacccacaaccagccaaaactagcgaacaacccaaatgcttgcaagcttcaagtccctaccaacaaatcttcccaaatccaccacgtataccactccacaacaacaagcaatgtcagagaacaaatgccagaagttggttgggagtagaagtgtaaggacaaaagaaaagagcaatcaacaaagatggggaacctcatgcccacgatgtcgagtcgatcaccaacccttaaccaaggccatgcacaaggccagaaagggttggcgggcctgaccaggaaaaattaagaactagtcgctgctagatagaaagaagaaacactaagagagaattttattctttcaaagcatgtcaactgagtttattatgtcctacaaatgaaataataataagacctcatccaaatataaaaattttatacggtagatatgattttgttccacatttttgttggtagtaggtatttattttagcaagtagataaattagaatataattttgtagaacatttatattgtagttatttagggtgtgtttggaaatgtaattggacttaggtgtaactataggtaattatacaatttgacatgtttgtctgatcatataactgtataatgtgagataattgagttatttcaattatagtagggccatgagaatttgtgtaatgaaactgtgtaattactaaaaaaaatttattttaaatattaattactaaaaatattagttttgatgtaattactaactattttatcaaataaaatattagaaattcatatataattgccacattatatctaaatgcactttgtatttcaaaataaaaaaaaaaaaaattgtggcataggttctcagaaagtttactttgatgcaaataagtttccaaacttaaaaattggtcgtaatagttctcaaggtcatgtttattgtaagtccgttaatcctcttttttaatagattcatttattgtttaaaaatgccacgtgttgacatattattggtccaaattataaatttgacttaaaaaaaattaaaatttaagaaattttttttttattttttcttcttcttctttttgctacccagaaactgctttccaaaacccatcacccaccaacccctggtccatcttctccattatggcacaagctctggtcgactcagagctctatctcgagcagtcgtccctgagccaaactctcacttcaccactggcatccttgctctgtttgacaccctaaaccccgagacccgtcgcgacccctctccatcactaaaacccaggtctgtttatgtgttactcatttctgcctattcagaaatgtaaaaaattgctccgcctcttcgattgaaactaagaagctatccgagaaacctgctccactcagtccacccaaagcttagtcgcattaccgcctgttagaatattagttgcaaagaaattaggaaaacttggagcttgtttggttatattttcagttttcagtttttaaaattgtgtttttaaaagtgtaaatagaaaacaattttttgacattttaaaaatttaacggtgtttggcacaagttttttaaaactatttttaatttttttcttactaaaaaaaatcaatattttaacaccataccataatatgaacccattcgggtccgggtctaggatttgagtatgtgagcaaaaatataaaatgtaatatgttagacaaaaaaaaatatttttgaaaattgaaaacaacattttgatgttttctattttttagtttttaaaaactcagtttttaaaaaactgtttttcaaaaattttgccaaacaacctctattagtttttaaaacctgttttctgtttttaaaaactaaaaacagtttttaagttatgaagtcaaacaaccccttgtattttagtagttttctatttgtatttagtagtttcccttttagtctcctagctttatatataaatatttactattttatgaaatacatacacaattcgattcaaacatctaggttcaagtttttaggcacaccccaaatctgaagttttatatttaaaaaattgcagcaccattgtacatttaacgaaatcatttgtaatgcctgaattcttaaaacttgctaaattgaaaataatctaattatataatatttatacaacctcataagccgggatcccgagtttaaaaccatgttgaaaatacatatacaacatataaagttacaatatacttattttttttaaaaaaaaattacagggcaatactaaaatttaactcaaaatgtgataagatcgaaaccctttaggttgcgttgccgcgatatgtacaatccttgccgagccccaactcactactcctccagccaagcttaacccttacctacacaaggtagcaaactgatgagtcgacagactcagtaagatgtgcatataacaaattatgaaaccaacttgtgtctaggcgcccatacacctattcacaagactaaccaaatgattaagaacgttcttaa

SEQ ID NO: 14038 - DNA, 18606 bp, Cannabis sativa
  modified_base (874)..(878): a, c, t, g, unknown or other
aaactaaaagataaaagcgtaaaaatgctccaaccataatttaaattaaaccgaaaaatgtgctaaaattaacctaaattaaatactaaaaatatcctaacagaactcacgcccgaattctagatttgaaccccagatttgaaccttggccacaaaccacgacccaaaatcggacccgaatcccagccccggacctcagccccaaatccttgcttgttgcctgaatcccaaaccccaaaccctgaacctaaatctggtctcgaacccagactctaactctagaccacgacctgacttaaataaaaataaaaaataaaatttacagaacacttccatttttttgtttttaaaattaaaaaaacaaatataattactaaatacattctttttttcaaaaacaaaaattttatttttatttttatttaaaaaaaatattactaaacttcagcataattcttataaattttatagaaaaggttatataataaactaatttttttttttttaaaaaaaacaacaaaaatactacgagaaaatttcatttttacactttgaacttttttatttataaaaattcagattcaataaaaacaataaactattttatatatagtttatttatagttgtcatgaaatcattttttttttttagtaattttgtagtttatttataattgtcgtgaggttaatctttcgttattttcttactttttattgagtaaaatgtatctttgtaattttaaaatttataagcatatttcgtaataaaaattttaagatgtaaatttgtaacagtaatttgcggcataaatacttaaattttactttcagttacaaataaatacctaaatttaatttttggcggtaataatannnnngttatatttctggaactctgtaggtacctggtcgttaaatgtcaaataattatccacgtgtcatttttttattggtgtatacaaattaattttttttaaaaaaagtacaaatatatggcctgtaccaatcagggattgacacatgacaatttatctaatattaacaaccagacacctataaagttccacaaatataatttaggtattattacctccaaaaattaaacttaactatttatttgtaagtgagagttaaaattaaatatttatgccccaaattataaattgtaaattaaaaaaaaaaaaaaaaaccttttttaaaaaatttcccaaatttatacccatttttgtttattatacttttaaattttgtacgaaataaaattattactttgagaaacttttttgagtttatgataataaatgtatggtaaaattggacatccttacattgcatatttgcagccatagtcaaagatgtaagaaattcccaaacctacaaagttaaaactaacattaatcagtaagcactcttgtataatctcaaattacttctcttttgttatggattttaagttttaatcataattatcaataatacatcgtctacatctatggtagaaacttttatgtccattaaaactataaatttgagattttttttttttttgaatagataaatttgagatttaattttaaactaaaagataaaataagtaaaaaatgaaagactaaaatcataagctcaggcaaatctactaattgttctaaaatcatttttgtttagcttaatgaacatacttggtgcaaaactgtagtgtcaatattttcaatacaaactactaaaagaattaatgcaatgaaattaatacaaataaaaaccaaaatatagatatgaatatcggaagtagaaactgggctttgttatatgcagtacttttagcaaggctatagactcaaaatgaagaaactagaaacacttgaactagtgaaatagtgaagaaacttgaactctttggtttccgaagtaatagcttgaaaaataaaaagctttttattatgctttaatattacacaacaggaaagtctcacacacacacagacatatgacaaagtgattcaaagcccgcgtcgaaacaaagttgcattacactttgtcgaaaatttcaaactgaataaacggtcaccccaagttcctttctcctacacaccccaattttgagcatttgacacctgaagatttacgagttgaagctctgttctgtttagtccttagtttcctcctcattgacaattttttctccaagttcttcactttaccattcaggttggatatgacattcagctggttttttccttgttcgatcagcttctccatcatttccctcagtttctcgttctcttcaataagttgtttatcgtttatgctccccattttttcaatgaaggttggtgttgcaggcaacccagctgctatctcgtcattggaactttccaactcagacgacttgtcgttcaccttctcatcagtggcatatcctatatggtccactgcttgaacttccatctcttcctcttggttctcttgaataccctcttctgcgaggactaactgcaagatctcattatcttttccatttttctcagtgcttgctgatattgatgaactttcatcctcatgcaaaacattttgagttccctcctcccctattgagatcaatgtttgcaattcctctggtttggataaaagtgtggtctccttcgtcactgactccttgttctcctcagtttcaacttttacacattcatctgtatcagcaataggcttctcctcagcgacttcctctggtatcttatcttcaaatgagctcacttcacatgtaccttggcattcattatgattgtccgtttcagcgggagatacaagatcatcaccatcaattgcctcatcaggcaacttttctagttcttccgtctcccattccttatgtgcgggtgccaccattaactcctcatctttatcatccccgctagctgtacgatctcttacttcagtttgttgtacattgttttcaaactcaacaggttcatcttcaattacttccagcggcaattgatccaaaaggttatcttctttaccacctaaatttgatccatcgacagctttgcaggaactgacttctgaattagaatcattctcttcatcttgaagagggatctcatgatgttccacaagttcaggagcattatctacttcttgtgtcgttggttcttcatcagcttgcataagcttagaatcattacctatttcttgtgacttcattggttcctctttacaaaccatagacgactcgtctctcaccacatcattctgttccatgatggcttttgaatcagtctccttaggcttcagatcacttgccactgatgattcttggctgtaaccttcaggttccaccacctggagaaaatgatattggtgagattctactgcaccattaatgtttccgaggacatcatctgaatttctttctgtttcttcttgctttccctgctttggcatgcattcattattttccgtcttggaaacttgttccacaagctcaacagggcacgcctctgctttcagtttttcatctttcactatcatgagagagtcgagtttttcctggagagtagtaagctcctttgccaaagattttctgatgtctctaagacttgggagaagaccctgttgagtagaaggataagaaaatatataagaatttgatgccacatcgagttattctagcaagatatcattaaacatcatgaactaaattttacattctcctcaagatttttttattcatgaacaagataacttgtacttataataatgcaaaaatcccttcaaaatgttcatttctcgcataaaaatgtagcataacttacgatgtctacatacaactaatttagaactattacaaaattccaattctagcattatgcgacatagaatttagacttacctgaatagtatccaattttagcagcagtctcatgatggtttctccaattaaaaccttctgcttttcgtccatttggacttcagaagatgactccaaagcttgaagacgatttcgaacatcagccaactgttcacgcacctcacctatttgctttaatttcttcaagggctccgatctccttaccatgaatccgcggtaaaaagattgaatacgcacagcagcctctgtatctgataacattttcttctcgagcttactagcatcaccagattctacattctctgtggatctatttctctcttccactctctcagttgttgtatccacctccttagctattgcagcctcctcaggttgatgtccatcactatcttcatcagctttctcactaataggcttctccatctcagaaacctcagtattagtgttcggtgatgaatgaacatgaacttgagggccatcattatgatgttctgcattgcttgtattctcagtcacagtaatttcttttgtctctgccctctttctctcacttggagtactttcatgggacaccatctcatttgagttcttttgagaacgttctttcacagcaggcggactaagagacctggaattagcattttctttcttctttcttggcaaaggatcaactctaagacaaacaggaggtagtttagccgatcttggcggagaggaccctcttttaccatttgttccagaaggcttgcttgttaagctcttcttgtcaatgtcctcaggcttatctacatctgcatgtggttgatcaacctgcttcaaaagagtgtttttcttagttgcattgttatccttcacctctgtcacattctggcgatcgaaattctctccattggtcttacaattgtctgtgtggttgtcatcaccaagatacttcactggaataagcttgaacttaattggttgattaccatcacactttccagagccgtccacttcctcacgccttttgtcatcagaaggcatccaaactataggaaaaggaaattgtcctattctatcgatttggttctcactcttctgatcctcgttagcatttgtatccttcttatccttgttttcaacctcttctcccatgccattgtagggcaccacaacagctggtttcttttgctcctgagtgcccttgtcatctccgccatgaattagatgccttagcttgtctgcatcaagtgggaaccatccattcaagagattttgttcctgttcttgagttttctttttctcaatgggcttagtctcgcaaggagtggtttcatactctaccaccttaggtggttcaagaggctttttattatcttgcaaatactcagggggaatccatacgaccgggtaagaataatttcccgtctgaactgggatcaaagacttattattccctttctttgccacaacaacatcaggctccccctgatcttcaattctcaaacccttatcttccttctgttggcaatgatgattatgacacccacaacagtaattattcccagacctgttcctgtcgtactcgtatctgggaagatcagtggaatagagtgagggaggaatgtaagacatgtgatgggcttcaggatatggaatagaataacctccatggaagtgatgaacaggtgaaggtggcattggcggctgaggataacaaggtctgaaaccatgaaaaccaggaaagctaccatggctgtaacaggaatggcaaggtgctggatagccataattaccgttaccaggccaagaatcgtataccattggagacttggctggatccacctgtgcataagttgggaaagccctacatccagtttggttggtttggtgtgggaatgtgtccatgtgtgtgtatacaggcatcattttgaattatcaactataacaaagcagagctgaagaagtgctctactattatagatacttcttgtacggtctggtgacaaacacgacaatgcaatgcaaaatgttagaaaacgaaacataaaaatatgcggaaaatatagtaaatttggatgattaacgaaaagtgaagaataggggtgtttgaattcatgaacactggttgaaaaataacagaaaaaaaacatcttcaatcaaacgacaagaacaataaaaccgaaatcttggaaaagcgacatcaaactgagagtgaatgcaacgacacaaataattttacaccatatacttttaaaaacaaaattaaaaaaatcaacccgaattatatcaaacgacaaactaagagaacactggcctgtcagtatctatgtgataaagaaaacatttttcccaaaactgaactatgtttcagtctcaattctgatctaagagtgaatattttgatcacatcatattaaaaattacatttccgaaaccgaatcatttcaagattcccaacaataacataattctgatctaaaagttttatttcgctaacaaaatttagattgaccgtaatcttaaaagaaataatatatagagagcactaacttaaaaaaaaacatcaaagcaaattgtagaattgataataatggagaggtcaagatcaagaaacaataaaacttacagtttctaatgcgtgaagaaaacgaagaaaaacccaaagctcctcaccaagacggttccacaaatccgaatgactcagttatcggtgcaaatcactccacaaacccgaagagaaatggttctcagttcctcttttttctgtttattggcttcttgcgttcaagatttttttgtttgaaaatccaaaggctgggatgttagccgtttatatatggtgagttggaatgagtagaaggaggaataggtcccactcaaaacttcgagagttttcgcgcctaatctaacggtgaaatctctggatctttccacgttacacgttgatgcttacttggtaaggtttaattgattttatttccgtaattatattagtttattgaaatattatttataggtagttaagtgttttaagaataaaataacttatctatagagtatcttctactatttagattataacaatggataattataacgtatttatatgttggtacatataaagcgttctatataattgagagtgcaattccgaatctatagtagcgcaaagaaaaattaataagttaaaaaatttacttagtaaattctaaatctactaattggaaattctgttatgtaggtctatggtcctctcgatagtactgcttgggcttaattgtgaagaaaagatattttgaagttaatttattaattaataaactttgtatagtctaattaataaataatataaatgataattttatttgataattaatcataattattaaataaatagttttgacatttataggattaaaattagaaaatatagtattattgaaagaataactagtaactagtaaaagaccctttagtggccgaccactatgtgtaatttttcccaatattttattctttttcaattcatataattcaaacataaattctagttgaaatattataaaaagaacatgatgctctcatttacatccaacaccttcaacctacgaaatctagtttctaactctgtcagacaactagtagatgagagacacattctatagtatttttcgaacctccttcattatttttcataatcggccttagtgatagagtgacatgcccacacatagcaagtcaaatactcaatcatagtgtagaagacggtggtaaccaaacccaaaggagagaaagagattcaggctcagatcttgttattattattatgcaatagaaaggttgtgggttagagatctgagcagaagaaatcaaattattctgcttcaatcaatgtaaggttttctaaactcttatgtatttaatttcaccgtattagagaattcatatttagggtgttaatgaaaatatacatgtaagtaaatctaaatcctagtaaaataaatctcaacagacactacatttctcaatctcaaattagtgtgcgacttgcatattttattctctttctttaataaaattaaagaagtaaacaaattcaaacacgccataggttacttaatttgagaaaacaaaataaatagaaaagtattttaagtaaatatttgattggtaaaattgaaatgaaaatgctaaaacagaaagaatataaataaaataatgaaaaaattcactacattccctaaaaaattattctttagtatattttttatttgtttcaatttgcatttaggagagcttttatttattaatttttttttcagcccacctcgaaattatttatgattaattataattttttgaattatttttaaataatttaccgtaccgactgcttttttcttatacatgtggtaagtaattatttaaattttattttcagtactataaactattcagaattttctaaaaatatttataagtgattccaaatatttacaatataaactattatgaaataaaatagattaaaaaattcttaaaatagataaagatatactagaacgatcgatccttctaatttgcacttaaaatataccctaaaatgataataataagaacatttccaatgaaatactataaaaatgatgtaaatgtattttttaatgcatgttcataaaattaaactctaatgatggtgtataatgtggtctaaatttaacacttgctaaaaattgtgccaaatttagcacaaaatataatgttaacggtaaaaactcgtcaactaaattttatttaaaaaatcaaatgcaaagagctcagatgaaaaatttaaaaaaaaataaaaacacttggttatcaatggagtaaaatattctcatgttgaatattagagctctcttacaagtaattattttcaaaccccttctctattgaaagagaagagtacttataaggagctctaatggctccaaaatacaagtgatctcaaaagttagaggacaaaatttattttgtaccatgaaaaccagtgcatcagatgggtagtggggaggtggtggtcaagtgccagttagtactccgagtgagacaaataatatctccactacttgtatatgtcgtacaaccacttcttccttagagacgtgcatgctttaacgattttatcttttgttgtactttctcttttcatccccctctttatagtttgcactcatgatgcggatataacacttaaaaaatttaactaaatgtttggtccatgctgagtctccttgtctaggtgtggagcatgggggagtgagtgaagagggtgatggggtgagagaataaggagatagagagttagaacatgagagaggggagcggggagtagggagctcccgcttgcgtacgacgaaggagggagcaaggagcagagagctgtgtgcacgttgggagtagctggtgcggggagttgctggggtgcaaggatcttgctggcgcggggagttggctggcacattgggagcatgcccggttgctcctcgtggaggatattctcgtgaaaggcagacccatatttgattttctaacaccagtgtgttttaagatttttctcgaaatctccaaaaattacacataacaagtgtcaaactccttaccaaaatgtattataagtacaactccttaataagtgtcttataagtatttaaagtttgaaatttacttaatctcaatcccagtacaactccttaaccaaaaacaaatctcagtattctaataccaaagacccaattaggagtttgttactctgattgttgtggttgctaggttcactcaatgactcaaacggttggctagcacaaatggatttaacttagtatagcttctcttgttttgaataaaaaacactaatctgttttttttttcctccctatatatttatattctttccctatatttctgatgaattcaaatcttacagccaaagctgctgctaggacaggcaatcagatgtgaatctgtgaaaacaaaaatagagtgaaagaaatgctaacaattcatagaacaacaaaagatatattcattcgtagtagtaaattacactttcaacaacagaaaagaaaaaagaccaaggtactatgcaacacaaaattaaaaaaatgaaggataaaaagacgggcgattaaacgctaaaatttcaaaacaaactaatcaaaatataaacactagacatttttcaacaccgcactttctttttatttttgttcactcaatcatttcttcatcgtcaataatctcctctatcttcatcttcttcacggcctgagcagcatcatcactctttactccattgggcagttgaatgagaacatctgacttttgaccggtggcagcattgaccaaacctccattcttctcaactcggtaagccaactctgatccacttggccctgcatctataaacacagttgagttctcatcaatttcttccctcacaagcattcttgatagctctgtcaccaccttcttctcaagccatctcctaattggtctagcaccatatacctgtaaaagccaataaaacatgtagagttaagtatctttccattgaaactcaaatcaaagtacgaactcttttaagttacaaccaaagaggagtcgtttgtaacattctaaaatcaaatgtggggtatgtacttactgggtcataactctctgccaagacatagtccaatgctgcatcagtcacacccaaggcaattcctttctcagctagtctgccagctacatccttcatttgtagcctggcaaccttccttaactgttcgtgagataggggatcaaacacaacaacctcgtcaagcctattcagcagctctggacggaaatgcttcctcacctgtcatataccagcaatggatttgttagtccagcaagaaacacactacatactgtatttacgtagaaaaagattgtttatcactcccttgtaatgcatcccagaaatctcccaaacccactaaacaaacactgaattcagagattagagcatgaaatatatacctctgtcatgactcggtctcgggcaatttgcattgtgcatttacccatcaacccggaaaggagatgctcagctcccaggtttgaggtcataataatgacggtgttcctaaagtccacagtacggccttggccgtctgttaatcttccatcgtcgagaacttgaagaagggtgttgaatacagacacgtgtgctttctctacttcatcaaacaacacaacactgtaaggcctcctcctcacagcctcagtgagttgcccaccttcttcatgcccaatatacctgaaaaacacgttaagaaggaagtcagtttaattttcttaatccaataaataatggtatgctccagcaccaaaaattttcactttaaagaaattttcttaagcattaaaaggaaaaatgttcaaaggggatgataaacttacccaggtggagcaccaatcaagcgagaaacagagtgttgctccatatactcagacatgtctatcctcaccagtaagttttcatcatcaaaaagttgctcagcaagagccttagcaagctcagttttaccaacaccagttggacccaagaagaggaacgatcctgtcggctgttgagggcgtccgaggccagccctggaccgcagcacagcctctgcaacagcagcaactgcttggtcttgtcccactactctcttgtgcagcctatcagcgagtccaatcaacctatccttgtcatcttggccaagccttgtgactgggattcctgtccaacggctcacaacctccgcaatttgatcgggtccaacagtttctgttagcattagattttcatcagttgtcccctcaagctgagctatggcagattccacctcttgaattgccccatatctcaaatcagcagctctggccaaatcatatcttctttcagcctcttgtaaagctatgagaagctcctcacgtttctgcttgagacgcctaatctcatcaatcctttctttttcctttctgtacttcatcatcaacggttgaagcttgtctcttaagtcgtcgagctctttccgcaccttaaaattaaaacaaacaaatgttaatacgaaaacgaattcatctaattggaactttacactaaacttcgataaaaccaattactcacttcaactagacgagctttgctagccttgtctttctctttctcgagcgcatggagctcaacttcaagctgcattctctttcgttcaaggttatctatttcttcaggctgactgtcaagttggactctgacattggcacaagcctcatcaacaagatcaatggccttgtcgggaagatggcggcctaaacaaccaaaacaaaaacataaatcaataacagaacttcccaatcaaaatcacaaccaataaccaagattcaaaaatcaaagtactattttcatcgatgtaagttaagaacatacctgtgatatatctacttgataactgagctgcaattacaagagccctatcctgaatcctaacaccatgatggccttcgtatctttctttcaaacctcgaagaatgctaattgtatctggaacactaggttccgccacataaacctgttggaaccttctttcaaaggcagcatctttctcaacatactttctgtactcctcaagagtagttgccccaatgcaccgaagttgacctctagctaacattggtttaaaaagattagctgcatccatggacccttctgttctgccggcaccaagaacaaggtggatctcatcaatgaaaaggataaccttcccttcagcctcttcaacttctttcaagacagatttaagcctttcctcgaactctcctctatacttggccccagcaaccaaagctcccatatccaatgctatgagcctcacatcagcaagattacttggcacatcgcctctcactattctctgcgctaatccttcaaccacggcagttttaccaactccgggctctccaataagaactgggttgtttttagtcctcctcgaaagaatccgaactactctccggatttcctcgtctcgtccaatgacaggatcaagctttccagcctgctccacaaggtctcttccataagtcttcagtgcctggaaattagtatcaccagaggcactttctactttcttcccatctttcccgcggagcttttcaacctcggatttcactctggcagtggcaacaccagcttctttaagcaaatcgccgatttgggaatcctccaaaaggcctagaatcaactgatcgacggctaaatgagtgtccccgcgtgatttctgggccgcctgtgctctcctgattaccttgattagagatgtactagctggtatatcatctggggcaggactctgagatgggagtttcttcaatgcctgactgaagactctctccacagactttggagcatcttcactgccactggcattggcaacagcttggctaaaaatgccacttggatcattgatcaacgacacagcaagatggagtggtgtgaactgggcatgactcccactcattgccagttcatgggctgcagctatagcctcattggtcttgtgagtgaacttgtctggattcatacttgcttcgtttactggttagtacctaaaaatgaaaaaggccaactataagcaaagtctcagccaacacttgcaaaactacacaatatccccaattaaaaagcaccgttccattcacagaatcagcaaatgataaaagacatcattcctttcacagaattcggatgtttaatcaaaattattatccattaaaagaaaggcttttttatatatatataaataaataataacgataaaaaaacgatcatttcgttcacagaatactgatatgttatcaaaattaatatctaataaaacaaaaggattgaacagaaagttgaatgatcaagagccaaacagccagttattgctttcaatatgaaagaaaacataacaactataaaaattatcagaccctgcttggaaattctcatttcagttgaaagggaagaaataataagaaaaccaaaaagatcaaggaaataaagaaagaaataaaagcagagcaagaagataaagaagagtctcgtaccttaaagtgactcaaaaatggattttgaacttgttgcgttgcgaatatttacagttgctgttgatctttagaatgtgttatggattttttgtgttgaattgaatgagaatgatgagagcagagtgtgggttttgttgagggagccgatacgtctggaaacaaaagaaaatgcagaacaaaaatcgagaggtttctagcagaaaaaataaaacttcgagaggtttcgcgcttaatctaacggtgaaatctctggatctttccacgttcttgtccacgtgtgatgctttcttggtaaggtgagcgttcaatttctttcggtttgtttgcattcggacacgtgttaaacattgcgaacttggaacaagagtgggccaatttttaggatatatcaaaggccttaataattccacacaatcagcggttgatattctttttttttttgaacataagcggttgatattctttctcaagtaaatcatatccctctattagtaaaagagaaatgctaagaacaggttaaattctaaagaatgttttatagtttagttagtaaaatatgaagatgttattatattgaaaataaattgatgtaatttgtattcatgtcattctaactgttgctattgttttttttaaaaaaataaaagttaagttcacgaagttatacaatttataaataaaataaataatgtatttatattagtattttttgaaagatgctatattattagaatacttttataagtaagagcgtgaaaaaaaattagagtgttatttgtactataagtttcttagattttgatacgtttattctcaatttttttttttaataaattgattcctaaattatataaatgttttcaaattttattttttaataaattagtctctaaaattataaattagttacggctttataatttttttaaattttagttaatattcattttttaaagtttaacattcatttttataatttatgatttttttaaagttaatattcattttaaagttttgttaattgaataatattatattatattataggataattaattcatttttaaaataataaaaaagtatacaaaataatttgtatataaaaatagtagcttgttatattacaagataacttattaattttaaaaataatttttaaagttatctaactgtattttaaattataatttaccataatataatttaaaaaaaattaattaattattaagttgtatacaaatatgttttagaggtaactaaaatatatctcaaaatacataatataaaaatgaaatatctttatataaatgtaattatgtaactaattggtttcttatcaatattattattatttttgtttgaataagtttcttatcaatattattaataattaaaaaattatttttaaaataaaaataaaaaatttcaaaatatggtgacgtgaccaatacattcttgtatttttaatattcagatagttttaattttaatttttttatatgccaattttaatttataatgtatttatatgagatatcttacaaattttaggaaagagtagtaccttttcgcatttcttaagaaccattacaccagtcactttctaaagtcacagaaattgatcaatactggagagacgacttagagtcaagactagagagccaagccattcaaattccactagaggcgtgtaaattacttccctacattttcggtagtcttgattatcacactgattcacattacaataattaacattcttccttctctatcatgttttcactttgattttaatggaaatgaataggcatttacattatatactatttacaacttaaacgtctgaattggggtggagaaaatttcttaaaaaaaaatttctataaaaggggttgtctatgaaacttgtttattatatttatatcagccataactaagcaacaattattaacaatatagtatacaatattgttacaccatggcatgcaagttgtcaacctcattagcacttgtattccttgtgctctctgttttgatcaacttctcttatgctggtacaattgtggtctactggggccaggacgggaacgaaggtagcttggcggacacttgttccacaggcaactatggaatagttaacattggttttctagtggcctttggcaataaccagagccctgtgctcaaccttgctggccactgtgaccccaccagtaatggttgcactttcttaagtaatgaaatcaaagcttgccaaagccagggtatcaaggtcatgctatccattggtggtggtgctggtagctacttccttacctctgctgatgacgccaggtatataggtttctattatccccatttaaatattcatatactctcaacatatgttatagctgtataatatatgtatatgcaatgcagaggagttgcacaatatctatgggaccattttttgggagggcaatcaagttcaaggccgctaggtgatgcagttcttgatgggattgatttcgatatcgagggtggcacaactcaacactgggatgaactggccaaggctttgaacgagttcagtcagcaaaataaggtttacttaactgcagctccacaatgtcctttcccagatgcctggctaagtggtgcactgaatactggtttatttgactatgtttggatccaattttataacaacaatccttgtgagtactctggaaacgctgacaatttgaagagttattggaaccagtggacatcatcaatctccgctggccaaatatttttggggttgcctgcatcgcctgatgctgcaggaagtggctacgttgcgcctgatgtgctctcatctgaagtgctgccaacgctcaaaaattctcccaagtatggaggtgttatgctttggtctaggcggtatgaccaaagctacagctcagctattaagcctaacgtttgattcatcgttactctcatatatagttttaatgtattttatatatttatagcagcaaatattgacagaatgatttctgtggagaatatgtggcctctctactagatctgcttataaggaaataaaagccaaatttattcgctgcgtgtatcatagattcatatatgtatttgttttgtattgttaagtaggactctacttatatgcaacacaattcatatactatttatgttaaaaatgagtaatttcttataatgtaatttctggttaacttaagttaaatttttttaattttgtaagttgctgtacattaagtgtcattattgatgtattattttttattagtatatttaaattaattcttaaataaaaaataaaaatttaataatctcaaccaattaaaaaatgtcatgtgactcttaaaattttaagtacctacaaaagttctaacaatataccttaaataatattaccgtcaaaattaaatttatctatttatacaataaattactctaaaaagaataattactataatttaaatgtcattaatggggataagaaaaaaaaatagctaaaaactataaatcaatgttttcaaactattcgtcaaatttgttaaaaaagatcaaaacacaagtaagccaaactagtgtaaagctacatgttaaaatatcacattttaagatcttgcttacgcttttcataatttcattctcggaagttgctaaagaattcaaagcaggtagccaagaattcaaggtaaaaacctcctcctccactcctttcaactccattttggtgcaatactctatttttggttcatttaagttctgctttctcttgattaattagtctaaatctttcttctttacgtccacattgatttgagtttcttgatgtttaacaaagttaatgaattttgtgtcttaatgtgtaatagggagagagtcccacatgaaatatgtgactttgtttacaaaattattgaattaaaatgtttatttatcaatatttttatataacactattttttagacaattttttataattaatatcctaacacaatatataagatgggatcaatgcaaaagaaaagaaattgtacgtagctagtaaattgaaacattatacatttttattaacaaatatttaacaaatatagatatatgatttgattttgtataatttaaaatttttattgatgattattaattagctatgcgagataaaaagaaatataataacaaataaaattgtatagcaattaattatttgtaaattaaaataaaaaatgaataaaaaataaaaatagagctaaaagactgtttacctacttggctcactcagttttcacaaatgttttattaacaacttcgtacactttatcaattatcaattcctttgtgggtgcaatactgtgtttgagaaacagagaaaggcatgtgagtttgagaaaggcttcaagattaacttattctgtattattatagcatttcgataaatgttaattttcttttctatcaaccaagtttaaacctgtacactgtacagtgtggcgtgctgccccatggcacacccacactagggccattttgtaacatgagcatgccttggtgcttgatcattagtcaagtctcgcaccaagcacctcattggggt

SEQ ID NO: 14039 - DNA, 20128 bp, Cannabis sativa
  modified_base (5525)..(5526): a, c, t, g, unknown or other
  modified_base (14108)..(14115): a, c, t, g, unknown or other
  modified_base (18039)..(18045): a, c, t, g, unknown or other
tgccagcgcagtttacaaaatgcgctggtaaaagttacttttactagcgcaatatcgaactgtgatggtaaaagtgacatttcttgtagtgtttcttgctaacatttttttttatatatattatttcttttattataaaatattgcatggtaataaatatttgtttattattattttttgtaggcatttggttttatttgttattttgagtcttccagactttgctagtatatttaattttcaataaaaatatattggggacacatttcttttaaatattgagaaattaatttgttttccaatagtgttttttcattattattatttaaggtgctgattcattttataattactacaaaaaattattacttttggtgacaatagtttagtcacaacataatttttttgtgattaaatgtaacttttagtcacaacaaaatgttccttacgactaaaatatagtatctagatacaagttgtcactaatttagttttagtcacaacaaagtattgtcactaaaactatatttagtcacaacaaactataatttttgtgactaatacttttagctacagaccttttaatcacaacttaggaatgatgatttataattagttacaactttaaaacttttaatcacaagttttattttgactaaaattaagattttttatggtgaatgatagatgttttttttatatatatatttttgtgtgctagttcctgatctttttattgggaatattagatggctagtgatctttgtttgttgcaatcttcaatcgctaagtatgtcttttagttaaacaataaaatattcggacttgtggaggtgtgtatatactaacccaatttcttgattattataataataattgttgttgttgattattagttgtagttaagaaacaatatactggattcccccatgtcgtacacagtttaaattagctaattacaagtatatacacagacgtagagtatacatatagaatggaataacgtatctttttttctatccttctttttaataagaatattaattaatattatacatacccgcgtcccaaaatgtacaaatttatctcttataatatattaacatcacatatatatgaatataatttatgtgttaagtctatatatatcatgaactgaattagagtataatgggtttctggtcttaattaattatataatatatatatatatatataaacaactcaattaggtacaatatatataaataataatagttaattatcacataaaccagaggagagacgtgaactcgaagaataaaccaattaagagggagagagagttgagatcgatatcataattatgcgtataaaaaaaaagaaaaattaaagagtaaaatagaatcctttgtagatcatgagatccgcggtacttcgcatgcatagaacgtataaatcaaagatcagttgcatatacgattattattatctatataacatatattataacgtacgtataattaaaactgttaaataaataatgccaatattcaataatggttaatattatgacctaattaactagctagttattgagtacatacatatatatagggggtgtatatgtacaacatcatgaatcatgatcgttcttcttctgagtagttacacaaactttatatcctctttaatttgtatacatgcgcgtgtatgaattatatatatgtatatgtttttataatagacgttttcctgagttaagaaattttggtacctagttagctacacgtacatgtacaattttctagcaaagaaaatattattcattagttggttcgcaagttaataataatataggtacaatctcgttgagctttctaaatcgtcaattacaaattaaagaaattgacgtttaattgcgacatgacatatatatatatatcgatgtaaatattcattactataatctcaagagaaaaaagaaaaaaagaaatatattcaatttataaaactctctttcgaattctatacatgcttttaattcactattattaattattataaatagagctttctctctctttctctatatatgaaattaagaatatattttagtgatgagtcttttttttctttactttctttttaagaagtcgtgtagtatatataaaatgttggagttttagagtgcatgcagacagggaccttgagtcatggaaaaacttccccacttatatatatacatatacatttatataataaaacattttgttttaaaggataatatatatcgcttttggatgaacctccatgattacaggtaataatatatacatatacatgggaaaaaatatatatagggccctcatccccattataaggctagccacttatatttatatttatagagcaatagcagctatatataaaacaacattatgtatatatatatatctcctcatataatttttttttttgtaataagaatctccttcacataattaattctttacaaattaactaatcactacctgatcaatatatatataatcatcaaaaactcaatagccataattaatttcaaacattatatactagaaaagggtcagtccttcaagtttttccttttattggtaccatcaaaattacatattatatataattagtacttaaattagtcttagattaattcatatcggacacccagtactaaaatttatttgttcccggaaatctatctatctatatatatatacatatgttatgttcgacctaaaactgcacaatatgatttgcccaataacccaagtattgattgtcacataaatatatatgtaataatcttaaaaaaaaaaaaaatctctggtaatttacctaccatatgaggataactatgtagatttattataacaattgcatgtattaacaaatttgtgtcatttacaattctgctaataatatattcaaacttttttttttgttttaaaaaagaaaaaatccaatgtaggaaaggataacaaatttaaatccttacaattgacaacctgtctttactataataaatggttattacagtaaatttacattcatcatttatatatggtatacatatttttacaataatatcatacagtatccttattaagtgctgattttttttttcattcattcttttctaattatgaaaagaaaaaaaaaatctcttaccctctattcatggaagggtatctatcttagccactttagggttagatgccctcattactcaccagaaaaataatatatatatttatataatttgaaagaaaagaaaattagggttttgacttcttattagttccactctactgactgggacagtgcaacacacgcaccaatacaaaaccgttaatgtgcaaaggcatcttatgccctccttgacacgacaggtaaaaaaaataacattaaacaataagcacgcaacagagcgtgtaataaacgcgtcagtacagtaacttttattttattttgtacaaaataaattatatttgcaattcccttcctagggtttcctttcatgaaatggattgtgataagaaccgcaccttctgtccacgtggccatattgtattggttatcgattttctctttctatatatacatgttatatgtatgacaaaagattattatatgtgttaatataaatggtatatatatgtatgtgttggatgcccatgacatcatggtgtggacaaaattaatacaacaaaacaacaaaaacctcttcttcgagacaaaaaaaaaaaaaaaacaaaaataaataaataaaaataaaaacccctttctaacacacacactctctctctattcgcatttctctctctaaaaggatcgaaaaacctcggttctcttttctctctctagggtttctcgaaagttcgcagtgaaattctactgaggcagctttcgaatcaggtctccgagcttggcttctgatcttcgccatgggttgctctatattttggtgccgttttctcgatcgatagcttgcgcgtgttgattcggagccccgagacgacgaggacgagcggatgatgatggtgacgcgcgcgcctgcggtgggggactgcttatgtagtgtcgcttcatgtgaagtttaattgcgtttcgaggtttgttttttttaagatcagattgatattttttgttttgtgttttattttaattgcgagctgatttagttttagctgagatgtgtactgtgttcaaaagtaggtcaagattaagttggtctttactttttcattttcttatcggggttttcgtttttagggattaaactatgcgtttcgataataattctagcgtttttatttatttaattaattattgttttcttgttattggaattagttggtttccatttctttagtaactgggtttgaattttaatgagctaatttaatcctttcacctcgtaattttggagttttctatggtaagttttcaagtggggttttgttttttttttttatatcgattgcatatataccttcccgagattcacgctactttttttttttgccttgttaatcgatatttatatgaaaaaaaccctaatttatgttttgctttattttaattaatttatggtttatgtgggaagttaattgagtgggtttagctgtatgtttgattatatttcgtgatgggatatcaaattaattggtgtagtaatcttttgtgtatttcgtgtgatgtcaaattagggtttcttattttacttttagtaagttaactgtaatctgcttgtgtggatgtgaaaatgggctattattttatgtgatgaatcagtatcattggatgtgttttgatcttcttctttggtttctaatgaatgtgattggctaatgagcttttcacggtggttggcaataaaccctagttcgattaatgtttgggaatttgactaagatctttgtatatgttgtagttagacttcttctatcattttccttatcatctctcatttaacatgtgatatataatgattcttatccatgatatatatatatatatatatgtagttaattagattttgtgtgaaccctatctaggtggtagcaaacaaagattggcaagacacaataagctggcttaggggtgtactctaagatgatgaagtcaaccagtagtgttgtgatggaggagaataatccaaagggaacttctggtactactgcctccaagaatgcgggatcgtttgttaaaattgattcaatatctatagatctggatggtggtattgacaagagttatgtggggactaagtgtgaacatttttccatacggtaagcctcatgttaatcctttggtgatcttctagaattattcgtctactgctgtccatgcagatttttttttttgccttttgtttttgattccattctgctattttgtccttttctttttaattataaaagttctttgatgtagtaaatatcagatatgatcatgattgtgttattatacacacatgttttttggatatatatatatatatnnatatatatatatatattaacattaagggtgatcgggactatctaactgaactcctactctattatgcatgaatgtatgacctttttaatcgtaaaataaaatatgctattgaaaatagtattcttcgtcatataatgtctcataaactaaagttaaatagcataatttgattctgtttctttgttttaagggatatttacaaaggtcaataatttatgtttttgtttttttgctgatattgttaggcactcaaaaacagtcacgttagaatatagactagtaacaacacagtatctcttcattctaggaacttatatattttacatgaaatccttgaactatctgtatgaaagtaaacaatttagttctaaagtatccgttaacgctgatgctagctgaaattctttgttatgctatgaatgcagtggatatgtatctgaaattcggagacaaaactggaagatgtgctggccatttgctttggatgataaaaaggataataaggttgaaagtgaatccttgcttcctcctttaattgctccgaaattcaaatggtggtcttgccaaagctgtcagcaggaaataagctctaaaggaactgtaaaggattatgataattctggcacaattggatctcgatccaatgacactccctctctgatgccatccctttctagttctgctacacatgatcagccgaattttctgcaagatccatctcaaaacatagttgagaaaacaaaatttgatgtcaacacttttactgaggtgaataggagtggggaacaaattccctcctacagtgacaagaaaaaagtgtttgctgcagatgcacctaaaagcttcacaggtatatatacaatatattattaaggacgagtttaattactttgaatatcctaatttgctaaatttctagctaatattccccactatttttttttcttttgattttttgatatccagggcacaaaaatggcttagaaaaggatgtggttcgtgaatgctctagaaaagcttttgtcccacctcaaagtgatcccaatatgatgaaggagaaacctaaatgtgccgcaggtatatttacagtatgttaatttggaacctacaaattttcttaacaagtcagatgggtgtgacattgttttgtttttgttttttttttaaagcagaagctataaaaccggagcggaacagacttttggaactctgtaagcatagctgcagaaaagatgacattacggatgttgagtttccaatccaaaagtgcaattctaaaagctccaccaagatgcttcaaacagaaaaagaaaattttgcagctgaacaacacatggaattgaagaaagcgtctgggacatctgtcttagcctgtttgcatgatgaggcaggcaatgatgttaacagacaaacaaatggattaggtttccaagcgttagatgagtgtaataatggatcatctggaagtgttcaaatctttgctggacaaaatcctcaggatcataacattgataagtcaagtggcttacaacgtaagaaaatccgaaaggtgcgtctgctgacagagttgttatgtgacaatggagatgcaaagactgatcatatccgcactgaagactctctgtgtaatgctattaacaatgcatctgcgggggcaggaatggtttctgttcccgtaggtcaggtatctttgccagaaaattgtagagatgggttgggtgataataagaaaaggaaattgcctcaggaagaagaattgaagtcgaccgaattgagttctcacagtaatatgaccaaaaagtttaaatacttcaaggcaggagaagaaactgctaatgcaatttcatattcagtatcaaaagaagattcccctactggattctatttgcagaccggtacaaggagctcatggagtgattatagaattgatagaaattctgttgcggtgaagaagaagaataggaagaaccaaataattgacaagcatccttctttagttccaacaggagacactattctgaaccaaacccgtgaacaagttgggttttcaacaaagtgttatacttctgtcaatgataaagtttctctcaaagaagtaaaagatgcgtcaagtagtagagggatggacaaaactctaatgggatcttcaagcaaggagaggaaatcatcatttaagaagaaagctaagatggcagaggttgatgatggacaggcacctcagttccccttgaacagtagcttggtcagaaagggctcagccatgaggaatgatgatgttgtgcatactgggcctgtaaacgtttcgtttcaacaggcagaaaatgcttgtccggatgtagaatcacatctttctttcggcagctacttgcacacacaaagggacaagtataataagaaatatactcctcaagttaaagatggcctatcgtccttcttatcttggaaagaatgcgcccccgtggatcaaatcaagagaacaaaagtggatacaaattacatctcagattcaagcattccttctaataagaaatatactcctcaagttaaagatggcctatcttccttcttatcttggaaagaaggccccgtggatcaaatcaagagaacaaaagtggatacaaattacatctcacattcaagcattccttctaactccacctgtgcattttcgcataaccaagttcatgctgaagtcagtaataaattaaccatgtacaattttcctgttttgaatgagaaacaaaggagcagcactcaaattgaagaaggatattgtcctcttatgaagcaagtggtatgccctttactgttttgcaattgttaaactagttgtttcataattgcttcctgttatgcagttcattacataaatgtcatagtgttactttctaattttaagatttcttaggaaagattattccagaaaaggatactcttcttaagaaaaaattgttaacaaccatttgagggcttaagctgggaaaaaatggttttaattatgtataaagaagaatttactattttgaattgcttcattttaaacattgtgtatcattttgtcttataccttaacaactatgtagtatgttgggtgtgttttaatatgcatgcatactacatttctgaagagattcccatgattttcatacttgaactgaatttaaagtggttagagctttgtttattttttttccgaaatattttagtttttcattaactttgtatttattcactcttacaaattattagatagttatcatcagaagaatttctaggctgtctttcaaagttggacttgtacttggatttctgctcgccttccttagttgagcttaaagagcttttaatttgtacagttaagcccagttttggcttttgtttatttcaattttatcaaattttaatcggtggttcattgggggcaacttatgcttgtttttcttgtttcccagcgagtaatttatgtatagatctacacgctataacagtagtgaatcctttcatatttccgtcctaaactactataatgtttctggtttttcattctcaatttggttttcgtaataatatattttctcaggatattcctggtgcgagcaacaatcctcaaacaattaaaggcaaggaacttttagcagtttctagaaaacatgctgatgaaataactcacaatgtatccgagcagggaccttcagatgacatacccatggaaattgttgaactcatggcaaagaatcaatatgagaggcgtctagacactgctgaaagtaagaaaagccagctagaaccagcaaaggaggcaagaaataatcagattataggttatgataaagtctttagcactaaggagttgagattatttgaggagacgagtgagaaaaaaaattgtcgtgccagaagtgaaagaaaagacataggcacagtaaggaaaaatgtacgaccttccaaacagcagtcggttgactatttttctcctagcaatcgagaccaatttgacatcaagcaaaaggatcagaaaaagttctccagtgttcattttccttctattaattctggtcaatgcagttgtgctcaaaattgcaaatggaatggagatgtggtgggccgtggattttttcaagctcgcatgcaaataggagcttgtgatacatgccagattgattcagcccggaaagaagaggcagctcatttctggtcatccaaaatatcacatcatgcgcctgtaagacataaggctcctcaaaagacagcctctcagtctagtaacctagatatcctttctaacggtcctggttttctgcataaggggaatattctggacagagagcatgagctgaagtttttgaatcgaaatgctaccaatcttgaaaagcataatcaaaatgttggttctgacgttttcaacagaagaaatgtggagtatccattttctaataagcataatggggttgaacctcagcaaaatctgatgggatctttagatctgtattctaatgaaaccatacccgcaatgcatctgctgagcctcatggatgcagggatgcagtcaggtgcagctttcaagacgggtggaaactcaaagttcctcaagagggtctcccctcctgatcataactccaaagagtattctcttttagattttggcgttcataagaaacacggtgatacttctgaagggccacttgattattatggtaaaaaacaactttctgagaaatcccataatttattccctgtcaacgcaaaaattggtacgtctacttcatcgccacatcagggtaaaggttttgaaagggctaatgactttatgggtcaagtatccttttcttctagaaggaaagagaaggtgcaaagctctagttcagctgcacagagtcgaggtcgtagagctctaaattctatgtttgcaagtggtggttttgggacaagtcacaatgccaatcctgttcatagtatggagaaaggttcacttggtgcatctagttcgatggttcttcctttgcaacttcacactacagagaattcaagagaacacaagtttgcagttcctcatactagtggaaccttttggcctccaaaatccacttctgagtccacaacctgctccactaacaaaaatccagctgattttagctcgccagaggctggaaatgagttcatgattagaggtgaagacttgaaatttggaccgagaaagagacatggtttaactagtgcagaccagcgcaagcaacagagaaacgctaaacggacaacagaaaaggaacgccccagacattaaaatttatgtgaggttcatgatttgcgtcatggtagtactttttctcctactattcttatacttaccaaattgctttccttatttactcttccattttagaatgcttcatataaaatagcaacacatctttttgttgaacacttataagccaatggttgatttgttcaatcttagcaggtgacaccttcgatagccggccagtcattcgtcatactagtcagttgggaaactcaatagtactcccttttgctatggtggtctcagtgtcaaggcctgtatatttttttatgccttgacgacttgttacaagtaaaactatatctgatattttcgggtttcatttgccttacattactgttagagtacacaacatatcccttcattttcagaagggtttactctttttgtttctctagtctttgtctcggaagctttctcattcctgatcgtgaagccagggaattaggtagcttatatgttatgtgttgttggatttgtgtaaatttagaaccccttacgggtctcatcaataagagggacttatcgtgtagtatactacttgagttgagttgtactttctaatagtgtctgccctccttcaaaaaagaaaacttgagacaatgtattgctggtgtgattttcgacattataatactgtagaagaaaaatcaattttattctttatttactgttaatctcatggttattttacagaaattgtaagagcatgtttcacattattttctgtttgttgtttttaaaaatgtgttttcgaaaatgagaataataaacggtttttataatataaatcgtatttggttaatgttttctaaaagcttttttcattttcatttcattttacttttttttttttaaaaaaaaaaatacttcaatactttaagaccctgatatgaacaatacgtgactcgaatcttatccctggctccaaattcaagcccgaccccgaatttgtgaaccggccccaaccttgaacttggacctcgtctttgataagagaaagtggtgagagagaaagtgatgaaagagaaagtagtgtgagaaaatgaggagagaacgtgataaaagagaaagtgatgagaaaaaatttagagagagaaagtgatgaaagaaaataatgttgagaaaaaatttagagagagaaagtgatgaaagaaaataatgtgagaaaatgataagaaaaatgatgtgagataaagtggagaaaaaatattgacaaaaagtcaattgtattttaaaagaaaaaatactttttttgatgaattaggtaatattatattgctccaaaaaaaccaacttacaaactattagcacccttacaggaggacctaaaatatatcatctatacaaatcttttcctttttaaatttacaatgaatgaaaccactctttgtctttgtcatggacctttttaggtcatacaaaatcgagcctctgcttcaagttccctttaacgacacatataagcttggtagggtcatctaactcatcccttcatatcttaccattttgagctttccaaatgttgtaaaccaagctagccagggaaactgccaatacaagtttttaaaatttactagtctttgttcttccaatccatcgaattagactaggaagagaattagaaactgctctccattgtaaccatttcttaacctcctgcaagcacttttgactgacattcaaagaacaagtgtaaagttgtttctttctgctggttacacatcagacatgtctctttaacagaaatgtcaaatttgaggagtcgatccttagtttttaatatgagttgaacagccatctagagaatgaagatgcgtttaggagtattgaatctcctccaaacttcatggctctaatgagctttgtgttgtgagggacaaaacattttatagccattagaaactgtgtatttgctctataaaagatgttggacattcaataaggatttgaactgatctttaagggagacaagactcttccaataccagctcccctgacttggagctttgtagctccaccactcctccttcttaatgtacacattgaatccatcacatctataggctttcttccttattggctactacccacacatacttgcacatagcaaccttgttccattctgccacatttttaaatccaatgcctcaatcagcttttgattgacaaattgtatcctaggcgatggatcccgactcttgaaacattgattgtcccttctataagaataccttgcagatagattctatgttcttaatcactttttttggcaatatcattaactgactctagtaagcatgaatgggagaaaacaatattttgttgttactaaaattcttattttttgaaactgttctcaaaaaaaaaaaattatagttaaacgtgtttaattattattgaaaaataattttctgtttttaaaatcaaaaaataattttttaattatgatgcgaaacatgctctaatactttctaagtcttccaatgtgaacatgaattctattgttggggtattgactctaaaaaaaattgcagtacatttactgtgtaactataatatccatcgttataatttataaagtgctcaaaacaataggaggatcactagtgtatcccccttctcaggggcgcacaagaaaattattttatattatattatatgtatcaaattatatataggaaatgatatgttttttatatggtatccaactgcacactccaatttacatatatgtggagttataactctaactttcttacgtgatatttaatatagttgaagtcgtacatcttccatttctatcacgcgcattatattgtgtttggcaacacaaaatattccaaattttcctaaaatgtgttgaatgtctacattatctacaataataaatacccatgcggatgaaaaaatggagatagaacttttacatccaagggtgttcatattggacataatgtttttagttttatattcaaatccgatctaattatagattagatgttaaattttatcattcgatttaattaaattaattttaatcttctaatcgatccaacattcattagatgttggatttgatcaattctatccgttagatatatttcatatatatttattagtttagcttgggtttatctaatcttttaaatttagtatttttttttatcggatcggatttattcaatattttaagtccaatatgtattttcttagattggatccatccaattcaaaaaaaaaaaaaagtaaaattttaatattaattttcatatatatatannnnnnnnttttacgtataacaatataaaatatacttacacattcaaactaaatgaaatactaattagttcgattggatgttagacgtattggatttttggatactccttccaacatccgatccgatccaattgaatattcaaaaataatatctaatctgatctgattatatttagacattcaatgtttgacgatcaattatcattagattagatcaatttatgcacaccctattcaatctatgtaaacttggtaccgtataataaaagcgttagtaatttaaaatatatggagtgactacagttatacacacaaaaaataataatcgctaattagaatttgtgccttcttaattttaaaatatagtaaatcatgtctttgaatttttcataccgttaaaaatttctttcgaactcttgagattgttggattcaatgatttttatccaattccgtttagtttactaatgcaatgattatgcttgtactaaatcgtaagaactttgatatctaccaaattatgtcctcaaattttaacatgtactaaacgtatccctaaatttgcattcatgtcaggcttccattcttaaaattagacaaatttttgaatctaataatctgaatagtttgagtgaaatttttaacggtctaaaaagttcgagcaacatgattgattcggtattgttaaagttcggagagtaaaaatcttaattagcctaaaatatatatattatttgcagtttaatacttatataacaaaataatatttaaatttaagaaatgaagtttgatgtattgattgaaacttgcacttaagtacaaagtttattgttaaattttattgttaaacactcatgtggccgagtaatttataaatggatatttgcgatattaagttataatgaaagttgtagttaagtacctaagtaccatgtgatgtttaagaaatgaatattagcacaactaaaaatttgacggcatttaatgacaatgttaaccacaaatacatacggtataaataaaagttgattttaggtacttttttcatcaaaaataaggttgactacaagttaatggcaacttttagtgcaatttaagtatttcgtggcaattttttaaaaaaatttaattaattttatatttaattttttttttacttaattaattataattttaataaaatttattacttaaacctataattttcatataaacaatagtttttttatgaaacatttattcctaacaaagcaaatacaaaacaagttaagtctggctaattacatcaacaagtaaagatgaaaatgtatactacgagaatgggtaaccgcagtgacctgaccctaatggggtggagatttctcaacttggcgattaatggagcaatagtgagggacaattttaatattcgaagtgggaatggagtgagggcgagaataatactatctgcatcatattcgatcttaatatatataattttcttttatttttaacatatatatatatatagtatatatatcattcataatcaaaattaattattacctacaaagtattatcaagaaactctctaaatatagtgtaagtgtgtaagtaatactatgatctcttcgcatcatatatatatatagttatcaaattttgagataaatttattttttatcttctatcaggttattatgtttttttttaaaaaaaaaaaaaaattgaggtagatttgtctttaatcttctgtacattcactctaagataagatgaatcatgttcttccatatcaaaactaattgacaacaaatcttatatatatcacaaattatttttatacattaacaatgtgagactaataagtgtaatagaagtgtttctattaatccaaatgtgataagttgcagctgccaaaatctcagctttcatccctttcttgaagctttcaatccaacgcagtcattcctcatatttacacccaatacaactttgcagaagctgacccacgcgcttcgaatagatacagtcaaaaaacaaatgacagtgatcttcctcagtcatcccacaaaatgagcaaagacaattctcaacagggatatctagcatcttagcaggtgatctgtgtagtaagtaaatagaaatttacaacctaccataacacaaaacaatgttttggaatatcaatctattccacacaaatttctgaatatggtcaatttattctcttcaagcaagcaaatatacaatctgcctataaaaaaaaattccaaaagccctagcgaactcaatgtcttccttagaaaacaattgacgaatatggcatagcttgtgtccgacgaaagttaattgcgataaataaaattgcttaaagaattgtataaccaatttttttacataagcaattaagtgcaataaatgaaactagattaagaacgaatgcgtttggtaatacttttttaataaatattttattttttaaattaaaacataaaaatattttccaaaaacatgttttataaaaatgtttttactttttcaattgtttaattgagaattaaaattttaaaaaaaaaaaatcacttttaaaatttttttaaatagatttttttaattaatattttggactccgaccctaactttaaccttaggacccggactccaacctcagctacagttccagactcggacaatgatcccaactgcagtcccgaattctagacctaacttaaataaaataaaaataaataaaaataaaaatatatatataacatatttttgttttctgtttttaaaaataaaaaataaaagtggttatagaacacgtttttattttttaaaaataaaattttaaaaacacaaaatttacttttattttttgtgattaaaaaattaaaaacaaaagtgttaccaaaagcctccaacaattatctttattttcaatttgaaattgcttcatccgtccctaatgtcaaaccattttcaatggatggtataaattttgtattaaatataactcacaagatgagttaatgttatatttagttcaaattttataattatactccaaagcacactaggggtaaaataaattttattttagagaaatgctaaaaggtaccattagtgcctagagaaatgccaaagagcacccatggtgtctagcaccatttgagatttaatatcactattagtgcaatttaatatccgatttattttaatttaataaagattatagaaaatcgataatcaattatagggagccaatctcatagtggtgctaggcgccttggtgctctatatcaatcgctcatgtgcctagtaccctctaaggtataatatcactattagtgtaattaagtatcaggtcccatataatttaatgtaataaattttaggggatatcgctaaccaatcacaatgtgacacctctagaagtgctaaacactactagtgttataatatcgtgtgtgttgtgttggcccgacccatattataccatgactttcaaaatatgtgatgtattgtgtcgtgtgccataagaaaatatgtgatttgtcgtatcgtgtcaatatttttaaagagtaggtctggcacgtaggcctagattcgtgccatgctttacttgtgttgtctcgtttttttttaaatggaccaacctacttttatattcgagctcgaatttgtgttttactttttcacatttagttttacaattaatgagttaattactataatatatatttctcatgattttaattatatttatataatttttcaacaacattttatagataattatattaaaaaaaattattagaattattataatttgaatattaacttataaatactcaagtttttatatcatattttataaataaattactatatagttttaattttatattttataatagttttaattataaaattataatatttagtatnnnnnnnaaattttattattattttaacttatttataattgataaatagatatgttttattattacaattattaaattataagattttttaatatttcgtgccatgcttttcgggtttgtcgtgtgtcgtgtctttcagactagtctattcgtgcttactacgtctttcgtgctctcatgtcgtgtcgtgcttaatcacatatttttcgtgttgtgtcgtaccaatttatagtatcgtgtcatgccgtgcataatcccatattttttcgtacttggtcatgctcgtaccaattttatgttgtgtcaaaaagcccgatccatatttacatcactaggtaccactaatgcttattagcaatactctttattttaataagaagatataaaaaaaaaaagtcaacaaaaatattaaattttattgaaagtaaataaaatcatataaaatatataaataaaaatacaaaaaaaattattaattacattaatgagtagaaaaagtgtaaataaaaaaaataatatttattatggtgtaaaatttaacagatgttatattttatgtcaaatttaatccatactaaaaattgtgtcaaaaaattttaacatgtgtgaaatttaaatcacattatatatcactaattaatttaattttataaacataaactcaaaaaaaacatatacacaacatttataacactctattaaaattgttctttaagtattaataatttactcaagagcacttgcatctcacatggagtcaacaattagtatatgagtattttaatataatattaataaaactttcagccaaaacaatattaataattaggatatgagtatttctagcaacaatatataataatagaaaaaaaaaaatcaaagtttgataaagtaatagaaaaatgagttgtgtatatatgattggtgcgtgtccaacaccacttagaaagtgatgccttacaaatattgattagaggtttttttagtaatatttattaatttgatactttatcataaacaatttgatggaagacaagaaaaacatttcatgaggtttaagtaaatcaatactttcatgaataattacatataatttcattaaaaaaaacataattaattacttgagagatttcattttaagggtactgaagctgttacattacaagccattcatttcattttattattccaagcaaatttagcaatttgatgagttacaactctagaaaagttctgatatatatgctatattgaaaaagaaaccttcaaagcctgtaattcttgaatcatatccttcatgtgagctggaaaactgcatttagcattttgattgcagtatcacagtcagaaaaaatgcttaacccaattttaattaatttacaatgacacaaattaatatattactttttcgttgacaagtactttattccaacaataatataattaaaatattttaactgaatgaaacatttttttttcttttgaaaataagagtttataactataaataaagttaacctcataattatatagtatttatttgatttttgcttttaaaaaaagtatttttgattttttgacaaaaacataaaagttaagcataagattcaggtccaaattttaaattattagttccgttaaaatattaaaaataaattaacatttaattattaatacccaacattttttaatatattatactaacatatatataatattagattaataaatttagagcatctccaactatattttttaaacacactttttaactaaattaagaagtgcgacttaaaaattaacatccaataaagtgactctttataatagagaaagtatagagagttcactattattttttattattttataaaattatttttataaatgaaaaatacaaattatagtaaagagcatgattagtgcaacaaaaataaaaataaccctttattttaatttttttttagctatttcaccatataaaaaataaagatcatatatgtatatatttttagggatatgattttgtcttattattgtactttcacggattttaatccgtgatgtacgacagccgtcagatgagggag

SEQ ID NO: 14040 - DNA, 3986 bp, Cannabis sativa
gggcataaaatcccaacaataacaataaattgaatatacattaatcatttattatgactaagaaacaaagaattatctgacttaatcaacatttggactgttaaataaccgagctagtgacaatagcaaatagaagtaacctaaaatatatcaataacaactcgtgacgcagatagaataatcaaataaataaaatatctgggaaaaaaaaaaaagaaagaaaggaactggctatctgttcaaatcggaatatggcaagtaggtctttctttcattagataaatatttatattttaaggaacaaaataattaaagtgtataaataaatgtgttagactctttagtgcgtcacaatcatgattaaatccaaaaatcgtgcggatcaatggcatacccaaatcaatactactaatccatctatagccccagcaaaaacaaaaacttagatcggtcccaccactgaattagaatttagatatgtactgctacacataaattttgtactcaatacagctcttttattgatggtagtaataataatggagcgtatctgagcaacaacacatggaagctgaacaatagagtatagacattgactcctattgataattattatcttcctctcattactttctcttatttaacttcctttaaaaccttgtcctcaagcaaaagttcatagtttaaagaaccagctccaacttccaacccgcaaccaagcctcttcagaaatatatttatatgaaaaacattgtatcttcaaattaattattaaattatacactaaaaagatgtgttagtgcatataaatattattttaaatagaaaagaaagaataatgcaataattacaatgtactatatggttaatttaagacaaattttcgataaaatgtgccgttggtaaaaaaaaaaatcgcgaatttctatactatgcgtcttgccaagacgcccatgttagataccgttactttccttgaaccacacgcggcgtaccttagcaaactacggcggcaaaacaaatgcaccactatattcttttcttataatatttaaataaaataataaaaaaaaaactactgtattaattttaaccagcaaaacgaaaaaaaatatatatattttcacaacagaaatcatttttttttttatatatttataaacaaataaagtagaacaaaaatattttccaatttctcgtacattttacttttcactttttactctggaatggtaacaagtacgggccgccaagctcttctgagcaatctataacgaaacccagctgtaaccgggcgtagtgagccgaatccgcggcgcctagccaccaagctgacgccgaagacgctttgtaaatctacacttggccttgcttcgggtaacaatccgtgttgttcttcttctccatcgcctcctctcttattggaaaccctatcttctagaggcggtggagacgatacaaacagatccttcaacttccgtcgagccctaacttccttgttcttcatcggcggcggatcttccacgtcttctccatctatttccgttacctccgacgacatttcccgccgcgggagtctcctctcagggcggttgaggagcattcgtagggtctttcgccggcggagatggatgacgggacttgccgatggactccttgtcggacttcctgcgacggcgcattgagtagcgaggagcttgaatttttgtaaggtagccatgaaattgcaatgtttgtattaattaattatatgttaatcggattctttgtgtttctagaaaaactggaacattattgggtgaggggtgaatttagctatgaaatggttgtttggtggagagagaaagcgagatctgatctgagcaaaagaaagccatcggatttgcttggggaggctttaggctttctctgtgggatttggagtgagagaggagaagacaagacaaggagatgtgaattgtattctatattttttgtttttttgggtagaaaataatactaaaagagagagagaggaatcggagtttggggctataaaataaagaaaattaatgagagaatacggacggctttttatttatttatttagagagagaataacgaataattgaattgaattgattaagatgatttattatggggatagataatggaaatgaaacgagtttcagttttgtgtcgttaattaatgccaatgggcttattacagcaaacaattgctcaaagttgctataaaattttatcacttaaaagcatctcccgaagcaacccttgtcacaaaattctacatcattttaaaatataatattttattttctctctcatccacatcatttttaactacttattactaaaaaaatactcctatacttagcaactctaaaattactatcacggtcccacacattatattttaatatattattcattttaataataaaaaatatcacaataatacattaaaattcatatattaataaaaataaatattacatgaaatttaaattacaccaaatttaaaaatagttcaaaatataacataataataattaaccaatccaacataattaaaaacatactaataaaaattatttccaaatttagaccatatgtgttccactaagtctgcttgaagattgcggtgaatatttctatcacgaattttggcatttctttgaatcatagtcgggaagttagaaataagtccatggcatacttcaaccgttggggtatcggtagagccttcatcgtaattaaaatcaaatgactcatatatttatctttcatcttcgacagtcatattgtgcaatatgatacatgaatacattatatctttaagagcatctttttgccagaatcgagccatacctcgtataatggcataacgagattgaagtactccaaatgttcgctcaacatctttgcgtacagcttcttgacattgggcgaataattttctcttctctccttgaggcaatggatagttttaacaaatgtaccccattctgggtagataccatctgctagataataccccttgttgtactgtgtgccatttatcataaactcaactcttggagctttcccttgtaagatgttagtgaataatggtgatttatttaaaacattgagatctttattggatcccggaacaccaaaaaatgtatgccaaatctaaagatcttgtgacgcgactgcttcgagcatgattgtcggtgcaccatgatcaccttgtgtgaattgccctttccatgcaactgggcaatttttccatttctaatgcatacaatcaatgcttcccaacatgcctggaaaaccacgcctctctcccatttcaagtaagcggtgaatgtcaccgatgttgggtcgtctcaaatattctaccgcaaaaatttcattcactccacgaacaaaattaagtagatatttaatagcagtggtttcaccaattcgaacatactcatcaacgtaattggttggtgctccgtatggcaacattcgcatagcaacgatacacttctgtagtggcgaaagcccttttctaccgattgcatcaaatctcgtctgaaaatactctgaatgatgttctagagcttgcactatgcgtagaaaaacatgtctaccgcattctaaatcttcttcgaacctgatattctgtataaaccgattcatcataaaagtagtcacggaacaagcattcgtgtccttctacacgacctcagtcaatgtgggctgtttttcttcctcgccttcatgaggtacccgcagctaagtattcatttaaaaaaatttcatcggaatcgtcattacattctgaaattatgatataagtaacactcatattctcaaaagaatcaggagaacttgctgaatccattgcaaaaattttagtagattataattgagaatgttagatgaatgagagtgtaaagtaatgtataaaatagagaagtgagtgaaatgaagaatagaacttggtatatata

SEQ ID NO: 14041 - DNA, 17282 bp, Cannabis sativa
  modified_base (14723)..(14725): a, c, t, g, unknown or other
  modified_base (14829)..(14837): a, c, t, g, unknown or other
  modified_base (16266)..(16275): a, c, t, g, unknown or other
gccaccacaggagaaatcgagccatggaacaactttgtaccgccttctacaaaaacactgttggaatctctcgccacaaacccaataccataggtagagttatcactaaacacaatcgcatcaacattaaccttaatactattaccacttgaagcacaccattgctcagccccatcccctggaatgaaaccagtgaacagcagctcattattcgaattttgagcaacccgacattgattaaggtagtttgttggagacgccacaatgctttcaatccccatcactttgttttgccaaactttatcattcctagcattccaaattgcccaacacaaggccaccaacaaccttgagttatccgaatcaagcaaaacaaattggttcatacaccagtccataaaagagacgtcctgttgcattaccgtaccaatacccacctgatcccataccgctgctacaattgaacaagataagagagagtgctcaatggtttcaggagccatagtacagattggacaaataggatttacattcactatctttgattgaagctgagtcattgttggaatacatcttttctccgcacgccacaacagattcttcattttcggaggggttttgagttgccacagcttcttccaaaacatgtcttcagttgaggtatccagtctgaactcaccattaagttgctgcaaaagcttataggcactcttaaccgagtacaaaccagaaagtttaagtgaccaattcagagaatcatgagttggcggagacaagacagggatagcctgcaccaacaatctgtcacggggcagtagcaaatcctgaagatctcctcttcccatcctgatccatcaattttcatcaagttgcacactttagcaatagtcaagctcggatgagtagagattatcataggattctcgacatccggaaaccacggttcaccaagaatagatatacttttaccatccccaacaacccatcgggccccctttttaccaatgtttgagcctccaacatactcctccacacaaaattcagattcgaaccaatagttgcagtaaggaacgatccctgaggaaaatatctagcctcaaacacctttgacacaagagaatcaggattaatcaaaagtcgccatccttgctttcccaacagagcgagattaaaatctcgaaggtttctgaatcccataccgtccttatctttgtgcccacaaagacgcttccaagacatccaatgtatgcccgaggatgaattattagacaatttcaccaatatttggccatcattctctccatgtctcgaacaatctcacgaggaagcaaaaaaacactcataacataactcaaaagggcttgtgccactgttttaataaggatctccttgcctgcccgagaaaggaatttatataaacaccttacattctgaataaataagaaacctttaaaaatcatattttttttttaaatatatataccatatattaataagaagaaaatttaaaagccatattaataaaataccaaaaaaaaatctaattaatatataatattgtccccttgctctctgaatttttaattccatcctgaatgggtatatactaattaatttatagagatatatattgccaaaaatgcattaaatgtatttgtatgaatatatccaacatccatgtgtaaatcttaataatggtacaacttccaatatatgtatgtcacactataacagctagcatattggtatttatatagatgtaatctataatatatgtttgtgatacatttagtggggttttttttttttttttttgattttggttgaaatttattaattaaaacatattatagtggggtttgaataatattatagtggggaacaatcctcatgatatgattgaaaagagggaaatgaaatgcaatgggtgatgttatgtgtaaattaatggaatttggacatataaacattggcaatgtgagggtgagatcatttctaatgctacatattaaatgcaaaacacatgccaaagtcaagctcttaatctcatggggctcccacataaccatttataattagggccgatcctgaaaatatgatagaaacttgatacaaaatatgatatcgatatctatcatattagtattacatataaaatgataattttcaaaatatgagaatttttggatcccatttgattgggactttaggcattataggaggttgcattgccaaaatctatctagttttaaatattattgaaattctttcatttaaaatttgatttgaattgaaaatagaataaaaaatttatccaaataaattactataaaaaaataaaaataattatgtaataagcctaaatttaaaaaacaaattacaaaaatacgttaaacacgaaaaaaaaaattatttataaaaatacctcttcaataaaaataataaattatttttttgattgttttatagttgtcacgaagttatttttaattattttatagttgttgtgaggttgatttttcgttattttttatttttattttttacttttgttgagcaaagtgtattcttatatattgaaactttacaagcatatttttataattaaaaattttagaccgtaaaattataaataaaacacacacaaaaaaaagaatatttttgcaaattctcctatattttaaaagtaagacttatgaaggaactctatcccacctaatcaatttaggtttatttttaggatataaagatggttagaaatttttattttgcaatctaatccctattttgatttttttaaaaaaaaagaaaaaagaaaatcttaatcaatagatttggcttgctcatacttaggttaggacttgactccaacaagagatgtaaattgtgttgtatctcactctcataacataaactagtgtccatattctctatgctatagtgtcaaatctaggtgactatataaaattaattgaaaatttaataaaaaaagtaactataattatagtatgtatgaaaaaatacttcaaaagaaagaatgaagagaccaaagtgaaaaagatgaccaccactattggttcacattgctttgctcattcctcattccatatgtttaagattctcaaatccctacctaccaagttgtggagaagtgaaattttcaaaaatacaattttttttttatcttttatttataattttatggcttaaaatatttatttacaaaattaagtttgtattgctcagtaaaaagaaaaaaaaattaaaaaataataagaaattaatctcacgacaactataaatcaaatataaataaattataaaacaacaaaaataaccaaaaaaataatcccataacaactataatacaaatataaataaaaaaaaagtagctaaaaatggcttattatttttagtgaagagatatttttgtaaataaaaaaacttaaagcatactaatgaaaatttttctgggttaatgtacttttgtaattttattttaaatttttggtgaattgtataatttttttctaatcctaatattggtatgttaataaactaaataataaaatatttttagaaggttaaatattaaaagttattgattgaaccctttattttgttgagtgacaaattagatcatgtatttttcaaaattgtatactgattttttttttttagaataaaacttaataatagtatatgataagattagttatattttttgcatttgttcgtgttaaaaattgttttcaagctgattatattaaaaagaaaagttaattgagctcagaattatttcgtatcattttaaaaaatacagaatctaatttatttatcatttaacaaactaaagatctaatcgttaaattttacaaaacacaatatccaaataggattaaccatttttaagaatccaaaagttgaatattcattattaaatttctaatcaattctatagacttctttttcccttctttcatagtgagaatttggtttagaaagagaaacacaaatagagagttgggctggtatcaaagcccattacccaatgtaatggtccatcatcccattttgacaaacgacaagtagaaatggaaaacgacaatatttctcactcatataaaatgtacaaaagaatgaaaggtttttactgcacttctactcataatggattctataaactatgaaacaatatatatatggaatatatatcagtacttgttcaattgaacaaaatttacatcatatattattgttgggtaatatgaaggggaaaaagaaaagaaaagaatcataaatattttcaatctagtattaatggtgtcaactgaaccagctttctcaccatctcagctaaaagttgtagagcttgaaacttcttttatagaacaaaatgtgttactgcaatagttgaatctgatgaatttggagagaagaatttcagtttggtatgatcttgagtagctcaatatcaaacaaaagagtcttgtcaatcagtccttggttccttaatacaaaatccaaggctctttggccctgaaacatgatcaacattgcatgatctttaggaggattccacctgaatgtatatcatagaatcactaacacaaaacaataaggagtgttaccgaaaatgttgttggtctggggccgctcttgttgtaatcgttgtcagggtatcccaactccgggggcactataatcctgcatcactggtgaactagattgtgaaatttgcttatacatgtattctcacctatattgaatatatgacattgtttggcaaaaaataattctcacaagagtgtcttttttgctatgatttggaaaatgaccttcatgacacactgaacacccgggtttggagactattttgccaaaaacaactcgaaagaatgtattaaaaaatgctctttcaccaattaatcgatgaaagtatactgttggttatgttctctgcttattttagttctactttctgttctataactttcttcactatcaaacacggccttcgggtgctatcaaaactgtgcccggccataagaatttgaagaatgaaatgtgatggagagttatgtatctttcaaactcataaattgtatttctcataaagctaattactttttgaatccaagaaaagaaaaagcggatgcagcaccttctaatgcttccgatagtcatgcctgttattgcctcctcgaaagctggtattacctgccattcaagaaccaacatagccatccatttatataatcaaattattgtcagtgggtgcatagatttcatcttatgctcaatctatcattctattctctctctaataaattctacattgttgtgtgtgagacaattgagcataaaccccctatcctagtaacaagagataaagggaaaaagagtgtgtatcacctcttgagatcctattcgaaacttgaaaaaatccttgtcatcaccctgcaagatcgaaagacagtgcctgaatcaaatactcatcataattgtattggttttaaaggatgtgtagcagcaaataatacctcaaatgaaccgcctttagtcttatttcgagcttcaaatatacggccatagtatcctattgtgtaaccatcccagtcaacctgaaaatagatacaaatcgaacattggaagagtgaaactttttgggtgttttaagttatagtaatctgggcaaagagcataccacaacagtgtctcccatcttaggagtagggccttctccaactcgcaaatcctgaattcagctcgaataaatgattaagatagaaaaggattaaatataaagagaaatggcagatgcagtgggaatggaagatgagtaaccttatactgaagacctgattctgtttgagtataatccggatagttcattttcgttttcccatagtccttccctcttagtgctggcactgcatacatatatacatacatacaaacatatagccaataattcttttgcaaatgctttcaaagaatatatatatatatatatatttatctatttaaagaaataacagataatattactgtcagtgaattgggctgcagcagcaggtccaagagtggtggaaaagtcccatagggatgcaactagaaaacccagtgatgaaatgacaatgtttcttcttctgctgtcatgattgagtcttacattgattcctgtacttgcatctttttaatgaacaagaacacataaatccaatcaaatactgttccttttctttttcctattaaatatgatttttcctctcaactatgacctttgtagagttttaatcgttgaaccttttttgttacaaaattttccccaaaatacctacttcagttcaattctgctaattttaaaaaccatttgcttaagtgatcacgagtcacaagtatagttacagtacgagagtcttatgtaataactttaaactagttgaaatcctatttatttgtattaaacatatatattataactccgaaaatgcatacatatatatattttttttctcataattcatcattaaactactatttatgtatttagtttttatctaaattcttgaaacgtattaaaattaatatcatgttagtgctaaatcaacaaattgttcaaagaaatgagtagaatgtaattgcaaaggattatttgcggcaaattatatagctcaggggactttatgcaacataaaaaagttcagggagcaaaactctacaagggtcatggttcagggagaataataaatatctatttatttattttgtattaattagaaacaaaagtaacactaaccatcaccagatggtggatgtgaagttatgtcaagttttccatcttcaacagcttgacatctctaaaaccaacacaaaatttgtttgagttgaatggtctaatatcacatatttagaaataggcatatccagacattaacatacctgagtatgagcttgggtttgagtttgagtttgagtatgaatcccaggtattagttttggttttggacatgaaagggatagtgtgtggtgtggtggtacaaatccaagagcaaagactgaaattgaagccatcagagtacttgttctgtctacctaaaagggttagttaatatgagtaagaaatccaaattcttgatgtgaaaatatgtttatgagaaaacccaattggttattctttcatcaatagtttatttaagctaaacaacaaagcctagcttaacttgacaagtgaccactcaactcactcaatcatcttctgtttctaataaaatacaatgaacacgatgaaaagctactaactataaccaatttacacacacacacattttatcaaacagtatataatcaactacaacaatatcaaaaatacaaacagttagaaatgacaatggcaagaaattgaacccacaaaagaaaaacagagaaaattcaaaattaccaaccagatatgatgaacaacagcaagattgtgagtgtagcagctgcttaagcttgaagtgttctcagaggtaagaggatgaagatgagggaagaaggtaccggaaaacagaaactacaagaacatgaaatgtttttttttttttattattattattttggatttatatcaataaaggtcctccaatatcataaaacattacacttagatcctcgaattttattttatatcatttaagtccccaaatgcactaaaatatgtactaaaatcctttataaaaaaatgtactaaaatgttacatctaaatgacgtgtattgttttttttttaaaaaatagtaaatttaaataaatataattagttaaaaaaatattatataaatttttaatctgtacacatattattattaattttatagatgcttaaaaaaataaagttatatcataattattaagtcatataatagtaataattacacaatttaataattatttttaattacatctaaatctaattctaccataatttttcaaatgcaccttatttaatgtaacaagtattctaaaatataaatattttgatgttttacaaaagagttaataatatcttcttattttcaattacatggttacattcaattccaattacaagctaaattttcaaaggcaagcttaattaatttgggggacataagtgaaacaaaataacatttagagacctaaatgataatttaaagaaaggttgaggacttccacggacataaacccttatatggataaacgacaaacgacaattatctctaaaaacgacaatattatagtctctcgacacgtctcttcaacctctctgtctgtgttgtgttcagttctcattcggtggcatgctatgaattattctcaccttcttctgcttccccaggttgcgttttctcacaggccaattctgcaaattcaagcttccaattataaggttagtaacttagtattcatgtctccattttctctgtatatatactctgtgcatgcatatataaatacatatatatgtttgtgtataagcttgaaaactctttgagaagtagcaagaagagttcttttttgtaaacccagttatgatttaaccttgtattcactcatactataatgggtaattcagtatatccattactgaaaccaaactgttcgactttttgtccaagagagaatagtttgtttgtttagctaattaacttgcccaactttatttagtctctctggatattgatacagccatagaacttactctctggatgtcccgattttgggcttctggaattttttcaaatatcacgttcggccccatgtctcttatcattttactcacactttcacgaccaaatgttaggagagtgcattagagttaatctcgatatcatataaaagatgaatgagacaattaattttgagatgaaactacgtacattttactctctttcattcctaattctaacagttatagaccaccaaccaatcttatacttaggaggattctaacaatgcacctcttttaagaggggacgtccacaccacctactctagtggattaggtcgcccctttcggggtttcggttccatctgagggtgcatggctctgatactacttaggtagaacttagtataaaggaacagggtgcctgagtagttatatactatcaaccaatctcaatataggatcgaaacagatatctatagcattgttgatcggtgtcagctcgagttgaatggggaattctgtccagtagataagatggtctcaatgcatttatgggttcctactactgctaaggcttgtgtggtgtggttgttagatactataacatttacttactgctctgtaaaggagatgggggcgaaatatttttattgttttttcatcaattgattgtgagtttatttattgttgaagaagtttctggtcttagttactactgtgctctgtttagtttctaaaaaagctatattagaatgtgagattactgagcaagaaagaaattaaggaataaagaaataaacagatctcaccagcaacttttggatttaaaatgaagatatccccatgtctctagatttgtctcttattgacaaaaaaaaatattcagttgaagttgaaagttttgtctaccatgtctgtctgcaatgaggtttatttgatatattcagtagtaccggggacatgatttcttgcatcaagtaaatccttttctaaaaatatataagaagaaactatactgtgtgacattattgtgagtggtatacagatagtcagagacttttcctttcagtaggaaatgttaattttataatccttgcataacctgtggcagggtagcaacactgtcgagccaacaaagacgaaagacaagacaagtgatataagaaaccacaacaaagttaaaagagatgaagttttcttgtgtgacacagagaaaaccaagcagcagcagtatagtcctcctccacttgttactgcattgaagatttcagctcaacaaaatgctgccacttttcactttcccggtcacaacagagggcgtattgccccgtcttcattaactcacctcattggtatcaaaccattcattcacgatttgcctgagcttccagagcttgataatctgttttcaccacaaggaccgattctagatgcgcaaaaagaagcagcaaagctttttggggcattggagacatggtttctggttggaggaaccacctgtgggatccaagctgcaattatggctacatgttcgccgggagagtatctaatccttccccggaattgtcatttatcagccatatctgctatggtcttgtctggtgccatacctaagtacatcgtacccgaatatgacgttgaatgggatattgctggtggggtgactccatcacaggtgagagtcttagaaagataagatattgcatcttcgttcccttttttttggctatgccatgatgttcataatcagatttctctttccaggtggagaaggcgattgaggaactcgaaatggaagggcgaaagccagctgcagtctttgtgacttctcctacttatcatggaatatgcagcaacataagtgagatttctcgactgtgccattctcacagaattccaataattgttgatgaggcacacggggctcatctcgggtttcatcctcaattgcctaactcagcacttcagcaaggggccgatttagcagttcagtcaactcacaaagtactttgctccttgacacaatcatcaatgctgcacatgtcaggaaatcttgtagatagagaaaatatctcaaggtgccttcaagtgcttcaaagcactagtcctagttatcttcttttggcatctttagatgcagctcgacatcaacttaccgaaaacccaaaaaccttatttgacaaaccactgcaattagtgaccaaagctaataatgtgataagaagacttcccggaatatccatacttgactctctgactttcccaaagttcccagctatggatccattgaggcttacaattggtttcaggcagctgaatttgtctggttatgaggcagatgaaattttgtacaaggacaacgagattatttgcgaacttgttggaaccacgtctcttacttttgcgtttaaccttggaacttgtaaggagcatgttgagagactggtgtccagcctaaagcatttagtatcaactgcaacactaactcaaggtgatgtaaggaagatggaccttggtgttttagcacctttcgctgattttacgacgagcttaattccaagagatgccttttttagaagtaaaaggaaagtaagcattgaaagctgtcttggggaagtttgtggggagcttatatgtccatacccaccaggaattccagtgttgatccctggtgagattattacagaaagagctttggattatcttttagaggttagaagtaaaggtgctatcatcagtggggcttcagatcctcaactctcttccatagttgtctgcaacaagtagtgcacccacagtatggtccgaattcagctgtattgtctttgtattagtccaagagataattgcggcgtaagtactcaaatttttgatcttgtgagcagcataaatccaataaatttttcagtaacacaagtatccaaatattagaaaaattgtaatttttatccaatttcgtcagtacttattccgttagtattttaatcaggcctaaattttaaattattggtttttttgaacaaaaacatgtaatatcagttactttgacactaacagagtttgtaatgacaaaactagacaaaagttataattttactagcattgggtacttatgttactaaaaacaattattgaatctacgctgcttacaaaatttaaaactttgagtatttatactgctatttattcttagtgtccaacttatcttcctagctagtgtgaatattcttcatgcagttctatcattcagagtctagaaattgacaagtataccttaacagatgcaactggtttgtaagatgaaataatatgctgtataattttcaatatattgttctgccacattagcttacagccattcctaatactatctttcttctggtataaaaatttacaagaacaaagatcatatttcctctggtgtagcaaaagaaattagatcagatacaaaatttgtaaacaaaaaaaagaacaatgagggttctgctgagaagtaactctattttaagaactgtgactcagggcatgacttttggatcaatattgtgaatacccatcgatggaaattgcgttgcttgcctctttgcaggtcggtcgtcgtgatcagaattcgagggaggattcggtggcataccgaggtgcaagtcagtagagccatctggagcagcccatgccaagggtttcactgcagcaataccagtaattatcggtttacaaaaccgaaagggctaagtaaacacgaaaagaacaaataacaaaaacaaaagcatggcctgcatactgtgatttatctgcaattcatggtcgaatttggtttgtcattcagagaataattcagtttagtttggatacaacatacctacaccaggtctaagctgtccaatgctatcatcacaagaagcaggtaaacgagcagggcgcttcctcacataattatcctgcagcggtttcgggatttgaaaagagaattgtgacaactttactccatctcttgtgtactctggatgttccaataagtacctacaaaagaaaaatcagcaagaaagattagtacacttttcaaaccgagtaaatgcttcccggaacttcatgtcaacaagccaagggcgtacttttggacctccaccattgaacgaagtctctttcccgatggtgcagcatagtacctgaagttttttgtacaggcaaagcaaattgttagactgctaagtctatggaccgaagtaaatgacaaacatcaaagaagaaaaggattcatacacatctgcaaacttggtgcttccttcacctctgatccgaagcagtcgttgccaaccaggaggaggctgagcaatattaggcttatcaattgcccaaagcctgctaccatcttgattaagatcagctggatcatcacacgaaatatcaggacgccattggcgagcagtttcacagaaaaacggttgctctagaatatgctcgcgaatttcttcatacttctcttttgttggaatgagcctccatttgaaacaacttgcacattgaactgtaaaagctccaacagatggcaaagcccttgatggttggtttgatgaaccgaaaaatcttttctcttttcggggctgatatggaggtggctcaggaacagttacaattgcacttgtattactattgttatcattagccacaggatcataaagcaccatttgcttagatgcatcctcactgaattggccattttcatcatcagatgaagctgaggatgaagatgaaacatctaaaatctcctgatgattgctgctgctgcttccctgccccaataaactcggttcaggtaattcattctctggtttcttaaatttaactcttattttttgagcttgtggccacatttagaacacctgcatagaacacataaccttaatgaaaattttgattagcaaaataaccttgtacggtcgcagaaacaatcatagatttacattgtaaggccatcatagttgaggttattttgcaagttttagtatttcacattgttagtttggcaaatttcacccaaaatatcgactcaatcaaatggatatggaaggcttcttattccacaacaagaaaagcacttcttcactctttctttcatgagagaataccaaatatccatctttctctctcttcctatgagcttaggttgtttatagataaaaataacaacccaacacacatgatgaaatcacataaaaatgttagtttctatcatctaaaaaacacaaatttttctcatctataaacttacattctatcaccttatcttttcatacatagatctaaagacccttttcttgaaacaagagccagatgtcaaaaaattactcaaaatttcaaagatcactcgcaaaaggccaaaaatttatgataaagccaacaaaaacaagaacaaaagagatcttacaacaatacccagaacataaaaatcgatgatcagagagaaagtgatgaactttgagattggtgaagaggagagagagagagagagagaaagatctaaccttgatagtattgttaaacagaaagcagagaacagaagctgtgttctgagattgttaggtgattttaagattgatttgttacaatacaaacttcgaaagcttcaaccttttcagttcctttgctttcattcttctctcttcgtctggtatacccaaagataaaataaataaatatataaataaattaataataaaatttagtttagatttttcttttaccattttaataatagaaataaataaattgatgagcatagttaagatgagtttctcaatgtcataaatttaccaacaagttttgatgagcatagttatgtagttttattaattgatatattcattagctattaaatttacaccaataccagcatatgtttatgcttttttatatggaaaaatggacattattagttaattaattatatatatagttattaaattaaaaaaataaattgcggcgtaaatacttaagtttagttttcattgtaaataaatacttaagtttannntttgacggtaataatacttaagttatatttctgaaattttcgtaaatatatgactgttaagtgtaagtcattattcacatgtcatttttttattagtatatttnnnnnnnnntttaaataaaaaataaaatttaatgatttgaacaaatcaaggactgtcacgtggtaattttttgacacttaaaggtcaggtacttacaaaagtttcaaaattataacttaagtattattaccgtcaaaaattaaacttaactttttatttgcaagagtgtaaatttagatattactgcaaactactctaaattaaaatataaattgttattgctttcaaaaaattatatatttttattaaattaaagaataaatatatattactgtagattactctaaattaaaatatatattgttattgctttcaaaaaattatatatttttattaaattaaagaataaatatacattgttactgcgtattactcatgaccttgaataatatgtcatccacctcaaccaattaaactatgaatatttattatttacaatacacttaaattttacttaaataaaagtttaataattttttttatttttttattttggccctcgaaaagtgggggctctaggcacgggcctagctagcctatgtctagggaggcccgtgcctagagccgaccctgttactagtgcataataccatttggtgacactttgcaaataactagaaatatttgtttatataaggcaggttaggccgtttttaggacctatctaacctaggggccaaaaaaaaaagaagtctttaaaaatacatatttttttagtgtttttcgaaaatatacctaattcttttaataaggcctataaattcttttttttccttactaaagttcaaggccgagtctataaagtcactaaggctagcttagtggtaaggaagagatgggaaaaagaagaggtcatgggttcgaacccaagaccttcaaactacaagctattaattgatcgtaaaaataccattacgctacacttaaaaaaaaaaaaaaagatcgagtctatatatttggggaaattttatttttataggttttaagatataagtttgcaaaaatatgatttattatcaaaaaagttattttatgaaaaaattaaaaaaataaaaataatataaggtaactggttacctctttagttacccctacttaattttctcatctttttattgatattttttttcataaaatattttttatttttttatttttgcccaaatagtataaaatcctataaaatttataatttcttctatatttaattttagcattgtaagtatttaaaatatttcaaagataacttttataactacaacaaatcatatacctccataaaaaatacaactccaagtaaagagttaaaatgtccctaaaatttcaatctaaaaactaaaagtttagataaatagaagttatatggtagttttgtggtccaattacattttaattttggggtaagttaaaaaatatcccttttattaatcaattaatnnnnnnnnnntctaattttatatttatttgaaatatacctgtttttatatgtattgtacccaaaataccctgacataagagagtcacatggagactatattgaggtgacaggggtaaaatcggtaaagtgtttaaaaaaagagataaaaataataggatttaaaaaagaggataaaaataaaagaggacaatataaaaaaggtatagagtctaatttcctcaattaattatgtattagaggcacatgagatcaccctttatattataattggctcattaaattatagtataccataaaaggaccacttaagccctataagtaaataaccccttagggttataagggtatgggatgtatatatatatatatatatatgttattgatgatagagtggttttaaggtgtatggtaataagaaaagaggggatggctccacattgtggctctaagggcttgggtccaatcttgagaacttgctagtgattcttgttggaggcattaaagcaaaatggctcatatggatggattgagatgtgtgtgtatttatgaatttgatgctctaaataaatattgatcttggttgatgattatgagtaataaagattagcatttaatgtgtttttggttagctcataatctgtagaaagattaacaattggcatcaagaccccctatccccgtatctctttatttgggcggcgacattctttccagaatcctggagaaggcaattgaggaaggaactattaatggcatcagactgagtagagatgggcctactttatcccatcttttctttgctgatgatcttattcttgtgggtagagcgacgattgaggaagccaaaggtatttggagttgcattgagaaattttgtaactggtcaggacaacaggtcaataaactcaaatcctttattttctttagcaataatactagtgacggaatgaaaagaggtatcatgcaggagttggcacttaatattcctaccgcgaatatcaattacttaggactcc

SEQ ID NO: 14042 - DNA, 10509 bp, Cannabis sativa
  modified_base (10034)..(10039): a, c, t, g, unknown or other
aaactgtttaattaaatcaatagatatttttaccatttaaataggagtactaacgaagccgtcctatgttaaaaaaaaaagtaataataatagaaaaagataaacactcatcgatatttaaatatataaaatctttcctttttttttttataaaatctttctcttgaaaaataaaaatttaaattcaaaaacactataaattaggatattcctattctatatataaatgttaccatgagaaaaaacactctaaatgtaacataggaataaaattcagtaactatactattttggtattaaaaaaatagtttaatttttgtatatatatcctttaattatttaagatattctatttttttcgacaaattcgaaataatttattataaggcaatgttcaaagattatttcacacatataaaagagaagcatgttcaaatcttttttttttaaaaaaatcttttaaatttctcaaaatttgatagaacatcttactaaaaaaaaattctatactctattttttttggtgtgcaacataaaattttcctaataataataattataatttctaacccgagaacatgtataaatgaatcaatgaagataacaagaccaccattggcgagtctaccctaactgttattgacttgctccgttaatggcccaaacaaaccgacggtccatatttcatcaagataagatgcaactcaagtcaaataagcaaggactcttcattaataaccaaaaacacttgttctggctcaatctcgaatcacttaactaatctctctattgttggctcacaaatgttgggttgttgtaatatgcctcattgtaactaataataatggtccttcaatttggaacccatgtaccaaaaaatacaccaaattatcttataataaatcaacaccaaactgtcattggatttggttaggatcctctaacagatgactatatgctattaacttacacaataaagattcgtgatgagattgacatgacatgttctttatgttgtaggacacgtctttgttgagaatcgtttgtattggaaatttggaaagtaagcccaagattggaccttattcatggccataaaagctttattttctgttatgatcttcagacagaaaaacacacttctgctttgccatttgaggacacaactaacaacttatgtgtttggacctgtggatgtggaattccaaggctgtccagtgtttatgtggttagtcgtgtactcatcaaagcttggtaacttccttgtctttttgacatttgggttaagaataaagattgtgattggagtttaatattttgggtagagactagtggtcattgttgtggacgtactcctacctattttgaatatgctcttcctttgaaatgttatagaagtaccaatcagcttctcttggatgttctatgagatttgaaaaccaagacaatcaaatctcacctcttctttaattgatttttaatgaagaaataggttgccaacaaagcctacttggattttaatgcttctaaaggattcgaacttgggacctgctatttatgaaaagaaatctaaaattactgtactcttttggtacactttgttgtattgtattgcatagtattatattgaattgtatgagtattgtttaccacaataatatgtttggtacatgtattaataatttatgtaaaattatacaatctataaactcaacccaaacatcaatcttgatcctagacccggaccccattcctagattctgacctcgaaccctaaggtcgggtccgtggtctagggtcaaggctgaggttcagggttggtgtctgagtcgtggtttgggactaggactgaagtccgagtacatgattgtgtcaacagccaggggccggttccaatgcccgagtgtgagtgcgagtccgaaatctaggtctaaggcctggtctgggtccaaagtccaggtttatggttggggttcgagtccaatttcagtgcaagtccgcgtccagaatttgggtctagggtctgggtaaggaatttctatctccaaccccaaaccctttctaaatattataatacaaactaatactaattatttgttatgtattaaataatatattctcattgtattaaaatttatagtcgtaataattaatacaatacaaaattttatccaaacataatattttttattatttgataaaatacgactcttatataccaaacaagccgctaaatattaatactaaaagatggttgaataaaaatgttacactttcagtactttaacacattttttactctcttactgccataagttttatgttggaattctaataaaagtgggaacactcatacatattaataagataatcttcacagcaaaatatgttcttttgttcataataatcttccaagaattgatgaactgaacaccaccgcaaaaaaaaaaacactcagtagaaagtatcacggaaaatttaccaagttggtcgagcaactaataaatgataaggtaacactattaaatagatggtcaaaaaattcgatactgataatttagttacacttttaccattgagacttagagttagaagagatcaccagttgctttcagcttctttaaggttgttgataatttggaaagtttttcatttttaaggacattaggtatgatttggtgtgtgtatagttgtaatcacgttctttgaagttagccaaacaatcacaatcacaatcattataattgtcaaaaaaaaatatgatgacattgttgggggtaacagtaacaagttagccaatgtccaaactttcaagtacaacttcacattatcatataaccttcagtcgaaacaataatccaatttaagttcagttctaatacgaattccgtaactcgtacctgtaaccacactagagtgcttcgtgaatgagcttttctgtaagagctttaggtagtcccataactgcatcacttgttccaacctgttacagataaaatcactgtttataagattaattactaagttgaaagactaaactctcatagcgagcacggaaagtgatggcgagctaaccactgcatctacaaaacgcagtatcaggggattttccagtgtcaagcccccagcaacattgagtgtgactgcctcttcaacctgaccaacaactcaaaaacaaaccgctttttgagaagaaaagagaaagaacatctcaagagattgtaatgtttaggaaatttaccaggctgtcaataatgtcctctggtatgtcatggaaataaacctgtgtatacatacatcaacttgtataatttctcccatttacactaagaatcaaccaagaaagcaagataaggtatttttgagcttgacaagaattaagcttagcacaatctttagtctaatcaggcattaaactaataagtaatatgttagtagattgatacactattgatccaatttagttgttgaaagaattaaagaataggcatttattgatatcaaagaaagaattacaaattttctaagcttttcatgatacttggatacctccctgagtaaatttaacactaaccagtacaaattaattcctatcccttacaattaactagacatttaaactaactcacccctaaactcttcctttaactaacaccttaggactattagcatagctcacttaaaacagtccatttcagccgttaagaatttgaatactcaaatctctataactataatcctaatcaattatctttcatgtcaaatatttctatactataaaaacgatttagattgcatcagacaagttagtatgcagagtaagacaacatacatgattttgacctgttgcaaatactcaatttagccattgctctcactttttggcaaggcaaaaactacgagttagcgagagagtaataaaagcagtacctctgctcgctcccatcctcctcttctttttccagttttaaggttggttacaagaacagatcctacaactgctgcttgactaccagaatagcctgcaatttcagatggattcactcgctacataagctaattcttgcaaaagaaaggtaagaattttggtaaaaaaaaaaaaacctttgatgaagctccgtgcttcttccttgctggacggtttttctctaatttgtccataagataccaccacctcaaaatcaattagacgatgcagtaagaaacacatcttttaaaaagatctacaagtgaaacaagaaacatatcactagaaaacaacaggcattggtaacttttcaccattgacggcattttaacactaatacatttaagaagtgacaagcatgccaaacttgatggattaggctaaatacagtaagtgataactgagaggacaaaaagaggttggattgataactatttctattaataaaaactggggctaggagtgctctattgacaacttttatatccaagaatactttgtctaagagcagagtcgtatgaggataatgtagtagaaattatggcactcgtatgctattttattcttaaattaaaacaacatgattttcatgcttagggacacagttgctcactaaaatgttaaaattagggagttaagaatagctaaaaggaaagctaagggcaaacatgaattgatgcatactgtgtctgcagtaattaagagtctttcctgagaaacttcttccaattgacctgtacttttgagtcttgatattatggcatctgcctgagtaaaataaaacaagtagccatgaatgaatgaagtttataggtttcacaatactttaactagagaaaataataatgaacaaaactaatgaccaattgaaccaaccactaattcacaatgcatttctctaatccaagaaagttgtacaaaatatatagctttgaaaaacaacagaacaaagaacaagacctacttttgcctcagccaaagccactaccaattcttctggcgtttctttccttatactcctctcatctatgtctgcagtctaaaccacaacaaaaccaaatatatatatatatatataaataaatatatataaatatagccatgaattcaatctaacacaccaaacaagaaaaagaaatcattatacaattactattctatacaaacactgtaccagtatagtaaactcatatcccatttcagtaagaagtcgtcgccgagccattgacgccgaacccagtattatctatcaccaaaaatcaaaactttaaaactggggcaccattttttttagaattacgatctgggcttttacaaaatagagcttaaatgggtaatgcagcttcagagagagttataatagtattatgcaacgaacctggaacgacatctttcttcaccgtcgtttcacgttattctactctgtctcagagatgagaagataaagatatgaaagctttcgatttggaccacctttcgttattgcccaaataacaggaagaagggaaaaaaaatcaaatcttttggccagagaggtatttaaatgtcgaccctttaaagtaaattaataaataataaatgaattatgtaattacctaaaaacgacgacgtttgtagggttcttatcactgcctcctttgcctttgtcccttttctgaatttgaagtttaacgaaaatggcgtctcaaaaggacgatggtgaacatagttcttgtcgaaggaagaagaatttcggaagtggaagctttgtttctgatttaagggatcattttcatgagtttattcaagcttcggctaatgaacacagaacttgcttcaaagacacgattcggaaggttagtagtagtgccactggaatctttatcagtaatcattttttgtgggttttgtattcttggaattgattctgttactttacacatggaaaaacagttgtttaaaacttcaaaggttgtgaaaggaaacaacaatggtggtcggattgaagaaggtgaagtttcactgcctcttcagacaaccttggttgaggattaggtattcatgtgatcaaatttagtccttttttttctcttttttttggacagatatcaaatttagattcttaaagcagaaaaaaacaccaaacttttttcatgtactctttttatatcttttctattattaccatttgagattttactttaaaaatcatctattaaactatatctgaaaatggaaaatgctaaagggtaatttccagcacttgacaaaaaaaaaattaacataaaaatcttgtgtcttgtagcaatgttgttctgtttgtaaacttttaggtaactattacaatgaggtcagatattcgatttaactgagttttctgtctcataagactgtagggaccatgataagataacacaataaattgtcatataaagttattatgcattacacagatggaagatgaccattttctatcaattttgaaggtttcaccttttttcttaaaaatatcttttggggaggtctttatggtatcatggtcttagttttaatagattaagaagtaacagagtgaatatgacatacaatatgacaaggaaattaaaaaagaaaagagaaagaaagaaagaacactagatgattatttttcttgcttcatatttgtgcaattactgaagagagtttgttgaattaagaaatagataaatatatggaggaatacaaaagtgaatcgttgacagttactggttcagttgttaattgctagatctgctgctttcagagaaagtgtggggttcttgagttgtctctactgcttagtgaatgccattcttcattgggatttagagctttaagttcttcagcctgtagagtagaacaccatttgaaaagtcagtatacacacatatgcattgttaaattgagtgttcatctaatttttggaatgatctgaatgaatctgagaactatgttgaaagaaaaagggatataaagatgaaataagcaatcttttacacattcaagaccatgtagaacaaaattgcctgccagtgtttttagattctactggtttggttcagggactgaactgagcaaagttaaaggtttatctgggtgttggccatatggcattgtgattacagctttttatagtatgattttcttagtttgtcttaggtgattagatggtttaaaacaaaatgaagtgaagtgtaagttatatatatatacatttgaagatgagatgaagatataataataatactaacctttgttcttcattgctaatgttgctacttcttctacatttcctatactgaggtatgggaaatttgcctgactcaatgcggtttatgtcttctttaaggatctcatattgtctctttacttcctcttcagttgtccctccaacaatcttagctatcttatgccaacgatcaggtgtttccctatcataaattgccagagcattttcaaacaacttgttcttctcagctgtccaattcgatgaacaagaagaagaagaagaagaaaacttcttggtagatgccattcttgactgactataaaactttttccttatcaagatttggaagaagtaacacaattgtgttattaattgagaaaaaaagaaagaaagaaagaaagtatttttagccaaagggataatgaaatcttaaactgaaagaagaagcaatagaaaacaaattgaataaaagtcaaatagaatttatataatatagtccaaaatgagttatacagggaaaaggggttttatgcaaattggcagacaatattttggagataaaatattataagatgttcgtactcttatcagtaacagtaacatgaaatgtgaaagagagagagagacaagtcagtcagttgcttgcttttgaagatttttcttttgttgttgtaattgttgttgttgttgttcttattaaacatcaactagaagtactatgatgtttaatataatgttataagcatgtgcattttgattagttaaagaattcttaacattctcgaaattaatgatgatactaaacaaaacacccgtgaattaatttatagtcttaattttatttatttttattactgtatatagctttgtttgcaggataatcctagttcttgagaatctacatttacctaattagcaggttaactacgtgttctacattgcttttatctagaaatcagtgcaaaaattgttcatccaaatatcaaatccaggtactatcttccaaaccaagaagtctctagttttaaagatataatagaaaaattcaactaagaatatcatatgctttgataacttataatataatatacgtgtctatattgtattgttgtttaactcaaaatttaggagaattctttttgttaacttacacaaactctagttcatctaataaactactctctcccttgttttatggcagttgtcagtgcttaaaaaaaataccaattattattattagtacctaataaatcgctagtttcaagagtcccttttaataagtatagattacaatgcaattatggatgtttactagaatttgatattaaattactattcttttttcttagttgatactataatatattaccttattggacaattatggtaagggacaaggctaaagaaatatattatcatggtatagataaaatttagagttgaaatttgagattgtttggtgtaatacattataagaaaataaatagtattgttagttgaaagcttcaatattaaaactgggttcaacttgaatatttgtaatgctaattaataatttttttactggggactttatatagtattgtttctaacatttgtaagagtatgcatgcttgtataactatatggtatttaatatggtcttaagtttttaacattcaactttaagtgataacttatctatgtgaattggcaaatttcatttgaaaaaagaaaaaattgactatgtttatatttgaatttgatgacagcaatgtattaacttagcatatatataaccctttctaaaaagatgttatttcttcaaatgtaatattacttaaatgaaatttttctttttgtagcggctatacacttttttttttatactttttcctttttgagttgaccaatgtgaacccccaaattacatttcttttcttttttgtttccttaatacaatatttgctcttattggtccaactttgtgaacgatcaaataaattaggtgaggaaaatactactattattacattacaaatacttttcttcgtttatggaaaatttactactctttagttttttattataaataaaataaaaaaatggtagtcattgttagaaaaagagaaagctgaaataagaaatgtgatttgtgagtggtgtttttgtttgtgcttttcttgagatgttgctcaatgaaaaagtgtattattaataataataataataaacatgtgatttgatgagacaaagcatattttctaagataggttttacaatatttggtgtagaaaagaaaacatgttgagggcaaaaacaatgaatatatttaggatgagggaggtagctttaactttaatcacaccgtagaggcagagtcaccatgtttggcaaaatttataggtgtttttgaaaatgaaagattatcaaacaagatagttttaggcaccgccacccccaaaactcacactaaaatcttcattgcctttttaaatgttatgcattgcaacacatcaacacaaaagtaatataatagtaatgtagttttagcatcttataaattttctcttccaactattaaaaccggaagatacacaaaaacatttttatattattaaaaatgataaatcataaaatattataaatttacaatattatatataagataggttttagagttgtccacttcaaacatatatatgatgagtatgaaatacttttgtcaatatttcaaagaaattaaaatagcataattaattgataatattgattagctacccaataactcttaaatatatctaatataaggaaatttgcggcataaatgctcattttgttcattttattgctaataagtannnnnnttttaaaaattgcggcattaatactcaaaatttcactttttaaactctgccgttagtacccactcaacagagttaatataaggacacgtgttctgtcctcataatttctcttttttttcttcacctaattaattaaaaaaaaaatacataaaactaattaaaataaaaatatacaaatcaataatggtatgatcaaaaaaaaaaaaacatccgctagtacgctcctccaccatcacatctgcgttgagggtccggcccacaaaagaatttctggaagaaacttcgtgcggcgagaagacacctctgcgtggagtaatcgaccctcaagggcctcaacgctgaaggtaatgtcactggaagccattgattaacaacttcgagtaatctaatgatagagatcttagggagtcttctaggtatactactacaaaataagcctttagagtcgcttttttcagcataataattaa

SEQ ID NO: 14043 - DNA, 9504 bp, Cannabis sativa
gtctttcgggcatattctccattttcaaaaataactgagatacaagtattttcaagaatcaaacgaaacaattcggtggaagaaatttgaacccaacgcccaggttgacactagtgttgggcctagtgcccctgttgacattttgtcaacctgggatatttccaaacatttttcccaaaaagtgttttgggcatctattttgttttcaaaaagaataaagatacaagtgatcttagggagaaaatgagatcgccagaggttagaaacagggacccactgtctaggttgacatggacattgggctctgtgcacaagttgacatgcaacttggttcgcatgtttccgctccttaaacaaattttctgctctggacactcttcttattttgatcataaatagggtaggacacctcgttcaaaatcttaaatttttataagtatccaaatgagccttaggaagccactcgggaagcacctagtgcccagattgatgtatggtctggtgcattgggctctgcttattagattttgattctatctcgagcatctgactacttattttgtagtaaatgagaccacgacttatgatagatcaaattcacacttttatatttcaccctttcaacaaggtagaatatcaacaaaatcaagaagttttgagtctagctgatttcaccaaaaagtgacatctctgacaactagtgaacatcttcactaatataaaaaatctaactaagtgatgtcaacatatcacttaggcatcaaaacaatataagtctgggatattttttcacttacccaatgtctaatttgatgtcaagatgtcaacatgggcgctggatgtcaacctgggcgctaggatgtcaacctcggcgttgggtgatgaacatccttctgtaaaatgacaataactccctcaacattgatccaattgatgcgattcaacttgcattttaaatctcttccaaatatctttcatgtcatgtctcacacttatatcgcaattcgaaggatttcaagtccaaaacttgttcccaaatttttccaagtgcaattttttctacagattatccgaaaatgatccaacgggcaaaattcaaactctgaaaaattgatgattttaatcaagagtcatttttgaccattagatcatcattaatggacaacatcaacccaaagggaatttttcatattttttgtattattttattaatattttgataggatattttttcctataaaaggagagctcctctagttcatttggaacattcttctaattgtccataaggtcagagcatctctctctactttctctctagaaattagagctcttaacttagccattttttttgtaattctcgccagaaattaaaaatcaaagtagatgtagcttcattatcgtcacgacacagggagtgaacttttataaatttctgtgtctctttgtttccttactcaaacttatatttccactcaccaatctagtgagagagtatttgccaaatttttgcatcaacattgattaagaaataagataaatatagattttaattaagcgatatctctctttaattaataaaatattttattcttctaataaattgaaaataaggtcatcgtattcaactatagtgtatacatcattaactgttgagtgcgttagtgttgcatgaattaaattttttttaatgaataatcatccttattttctaaatatcattaagacaaattttggaagacctaacacactagatgacaaaaaattatagacaaattgcattcgatcacacaactaatttatctgaaagcatagaatactatatactatgcatctaaaaaatatatttggagattaagatagataaacctacactagagagttctaaagtcgtaaagtataatattcacatggttttatagtttatttatcatatctatacatattatctagtatatctacctaattgtgtaaattactttcattaatacattatgtccctaaataaaaaataatgcatacatagctctgcctaataattaattaccactcattaaaatataaatcaaataatttcaaaaacattacatcaactaaaaagtacaaacctcttaaatttgagagtctcacattgatattgtaacttcagaaaaatcacatgttacgtttgtttccaaccaacaaatatgtttctttggttaatttatagaatcaacataaattttgttgatgcaaaaaagggataatttttgcatcgttttgcaatcgccgattatgaaaaattgcatcggtataaaatcgacacaaacaatatacttgtgttttttttgtaccgatgcaaaaaaaaattctaaatttaagatccaccatcctgaatatttagatttaaaaattctaatatacaaaccaataaacctaaatatacaaataaacatttttaatatatatattcttcatcatttcaggctgattatgttgaaccattaaaaagatgaagaattttttatttttttttaggacaaagacgatgattaaaatatgacatgaagaacaagagagagtactccagagagagctagagtacctgtgacagaacaaggagagatcttgaaccgtccttgtgagtagtatcacgagtttggggtggacattgggtctcaggtgatcgtcaaagtctggagtgttgtcgggtttgggttgaccattaaggtggatgtctgggtatggtgttttgacggggtggttgtcatggtttggattggttgtcgaggtcaatgtcagggtgtgggttagtcatccgggggtcacaaagagagagggaaaaagtatcaaaggtgactgaattatattaggttttcttttaatgtgtatgcgctttcttatttgacttttctttttgtaatatcaattttgtcgatttaaaacaaatgctaccttgtgttcataaattgacgcaaatgccaaaaatgctgggttaaactgatgcaaagtagctcagtcccagatcgacaaaaatttttaaattggtctttttgcattggttttgagcattaacttttgcaaaaaaaaaaaaatatttttttagtattaataccatatataagatgaatgagtttttttatttcaagatttagtaaatagtttgtttataattttaagcttacattatcatagcttattagagctagtttggcataatttttgaaaagaaaaactaaaaccaaaaatgtgcaataaaaaagatcatttaattgaataataattacattaaaaaatattattttatatttcattatttctataatgcacccaacttagtatagtactaagataatctaatacaattcaatccaatctaatattgctaccaaaagagccatttaaatcccaacaaagcataaatgagttaattaagttatacaaactataaagactaatcattaaccttattaatacaagaataaatatgatttatccccttgaactatgacctttaaagagttttgctcttaaacttttttctattgcaaaaattctcactaaactataaaaattgcttcaaataaccctatgtagttacattatgccaatatttccttaaataatatattgatgtaatactaacacaatgttaatttggcccaattctagagctgaaacaaaaattaaatgcataaacaatagcctaataacgaactatgagaataagtttatgcattctcagaactaatgtttgtatattttatgtcaataaattgaatttcagttagctaaaaaattgttaaacagactcttgtactgaaagtatacctataaatcatgaccacataagtaaattttttgaaaaaaatgagtagaatttaactgaactagatatttacaacgatttatatagttaaaagagaattgtaatgccttactgcttagccacgctatagtaattttttaattattgtacacacctttgctaatcaaagggtttaccaaaaaataagataaattaaaaaattttgattaaattaaaacttcaacaaatatataaccttacataatttttgggatcccatttaaaagtttataatagtatacaaaatacatttgtcataaaagtatcacctagcgactataaaataaaagccatgtcattccaagaccaaacactctaggcctaattatcccggtatgtacaatcatttacaagctctagaatcattgttgctcaatctatgcctttccttaatttacaaatgcaaacaaatctgagtcgacaaactgagtaagaaaagcataagacatataaacatttagtcgacctccagctaggttcccataaaccttactacaaggctttagatgaattaagaacgttcttaataaaagtacgacatctgtaccacatgcactaagtactcgtcccgtagtagtgttggtaacgatgtatcatactccttaatatcatatactatatcaatacactttgtaccgcaatcgtactagtgttggtagtatataaatgacataatacaacatgaatataacatacatacacatatacatatatattttatactaatcttacctaatttctaaattcaagtatgttgatcaacctgaatggaaattcgctcgctaaatggaggccctatgtcacatttacgcaaaatgggtaaaagatttgctaaaacctcttgggaaacttgaactcaaaactagaagtttctctattgataaatagcatggtaataccttaaatatcgagaaaatacaaaaaatgaagttgttctccaaaaacgacacttttttttttgtgttactgccagcaaaaacggtagaccgtttttgtaaaaacagtctgtgctattttctgctacagaaatctcaaaaatctcatttctaacccaaatcaatatcaatcttcatgaaactctccaaaatacataattaaggtccaataaccataatacaagcagtaacaatagttataacacagaattatagaaattaccattgttgagtcaagtttaagttcttgaactcaaactttctcaactcttcaactagccatcaaaatcaatcaaattagcttcaacaactcaaattaaactcagaaaacaaatcatagaaaactcaggttcaaacagaacctacttcacccaaaagcgcgcttaaaccaactaaatcataaaaaaattgagaatatggagctaggattcttgcatcaagataaatcttccaatcctccttgaattcattgagaatttagtgaaatatagacttggttctatttgttactcttagggccaaaaaatggaaaaagaaggtaagggatgaataaattttcttaatttgataaaaacataaaaacctaatcttatcttttttgttttattctaaaataacaatcaagatataacgttagaaactctaggactaatccacttaaatcactaaaattcaaaataaaacctttaggcaagaattaccctttacccttttcttactccttaagttatctttaaggcttaagggtgaaatagtcaattactataactccatctatttccagtattctaaataataaatatactttccttgttaaaaaaaagattctaaaccaaacctgagtgactctaatggccatatcgttacgtttttattgttgttgagcaaacaccacaaaattattaaattacacataacatataatgcacttagagtttaataaaatctttagatgtgagaaattataatcctaatacctatttcttataaatatgacccatagaataaaataatcacatacagccatgtaatataatttattagtgctaattgtcttcctaatctatattctaagtataaagtcattacaattatctctccgttaaaaggattttgtcctcaaaatcaaatctgaataattttgaataatgagcccctaattggactctcttcctaggtggcttcctccacctaaatgtacttcagagtttaggtcatatttcttaaaatcttaccctttccatcatatttgtatgttgctctaaaatcttacatctcctttcacatgttattacatatttactcagcatcaatacatgacctaacatcgcatatttctggcaatgctggagatcaatttagatggtatgctacttgtctactttaattttagggcttaactcaccctctcttccaaagtgttccgcatccttaataggtggtgcttgtaggattataatctcctacttatgctatacatccataaaacctttttgttaacttggtaagcacatttccataaggacccattcatataattgttcgctagctgttgttgtagtagaattctaataatctgaaaacataagctcttgtataacaagtctgattgtagatattagagcttcataacccaagtaattaatcagatccaacacatccttttttaacatcctaacgagagtacattacttgtaactccctatcccatagggacgccacgcgtgttttttaataaactagtttactactaataagttaattaatttttaaaatctgtgattataataaaaactacacaaaaaaaaattctaaaaacggacatcataacgacactaaaattgtgtttcggggatccctgttgtaaaagatttacaaaaaggctaaatacaataacaagtcaaaatactaaatcaaaatacatggcagatacaacccaaaaacaactcttgataactcggcacgcaggctagtagggtcaacatgtacattgttggagaagactgtcacctcatggctgctttagcttttctttacctttatctacaccacatagcactcattagtcacaaagactcagcaagaaaagtaataaaagataatacatggaataaccaattattaatttcactattatggaatgattgaataataacattcagaagtggataacataactagccatatgcatggaaataaaagcaatcatgtattggattgcctaattaggcaattccatatcataatttggcatcatatatgatgtcggtgcatcaactaatcagatgagcttgtgccacaatctagcaccaatgtatcactttgtctaaccagacgagcctgtgccacaacctggcaccaatatatcacatctcttaaccaggcaagcttgtgccatatccaggcacctatatgtcactgctgcttgtgcctaatcaggatcgctaacaggaagaaatctaataatagttccagtctgtgccatagcttggcacctatatgtcactgccgcccgaacctaattaggatcgtcgacaggaagaaacctaacaatgtttttcagtttatagtcatgactttaaaacggttgcctcacatgcacaacttgaatactcgtgtccacatatcgcattgcctactaaggcaaattcatgccataacctggcattcatagatcgcttcacctaataagatgcgcttgtatatcacattgcctaattaggcaagcccatgccatagtctggcattcatatatcatatcacataatcaggtgcgcttgtatatcacattgcctaatcatgcaagcccattccatagtttggcattcttatgctgcattgcacaatcaggcaaactcatatcatagtctagaattcttattccgcattacacaaccaggaaaaatcatgccatagtctaacattcatatatcacatcacctaatcaagtgagcttgtatattgcattcaccttatcattgcctaatcaaacaatcgataattacaaaacctgtcatgccatgtagtatattatacttttcttacctttgattcaaattcatgtatgtcagccaacccaagtggagaaacctccttgatgatatcggccctatgtcacaacaacggtaaaccaataagtgtatatctcaaaacactgcttaacactcgtgtaagataatctaaagttttttaccaaacatcgtggtacaaatacactaaaataaaacatatattttggctctaaaacatacaccatattatagagctcattacaagcttcaaaatggtatatagaacgcctaaaatagacacccgagtgaaaagttatgacaaatatacagttcttgacttctccgaaattcctagaaacggtaaaccgactgggaaacgataaactggtggcaccaaccaatggaccgatttggcagtaacatagaacaaaaatcccaatttttgcactcaccgaaacaccaccgaaacctatacaaatcattccaaacttcactaggcacatagataccataaatacaacaatccttaccgaaaataatatcaagcccttaaatggaaaataccattaacaaaagttccaaacttaatttctaactcaaaatcacctcaaattcaacaagtaaacattgaaactagtcccataactaccaaagaccagttctataaggtcagaatctttgtaattattctaaatcacaaagtcactatatagaatcaattgtatttaacttaaaatgaaaccaatcctcaccttaagctttccctcttcaatgatttactatctcgctactaccggagcttaaatcactagattttaagtttaaaattgaagaaaattgaataatggaggtgggggtttcgttcgttcgttctttactgttatgtttaaaaaacttaatatatatatattaatagatgacgttattaataataatataatatcaataatactaataaaattttagtaataataattaaaatttcttaaccactaagaaatctttaaccttagggtatttggtcaacttcgagtattttaaaatacctcgatatttctaaaatcaacttatctcaattattctatcaatattactaactaaaattgtcgtgatatttttggtctccaattgggcctctaaggttgtcgaatttgaaaatatttttatttcgcaagtaacttacattatatccacatattttaaataaatctccgcaattaataatttacgcttatttatccacttatagtaaaatttataatttatgctaagtaagttagcaggatcatgatcctgcttattactacctaattaattcataatatataataaaccttaattattcgtaattaggttcctgagatattacaaccatgccctccttataaaaattttgtcctcaaaatttacctgaatatttcgggatattactgtcgtatttacgactctatctctcacgttgtttcttccacctcgcagtttctctacaacactttcttaactagtggaatcgtctcattccatactactttctttttccagttcaaaacctagagaggatatttttcccacataatagatttttctaagcttaacatcatcacaactcaggatatggatcgagtttgatgttggaagttattttaccaggaacttaattctactcacaagtatgttgatttaacaacttaaatatgaacttctaaaacga

SEQ ID NO: 14044 - DNA, 6523 bp, Cannabis sativa
  modified_base (390)..(395): a, c, t, g, unknown or other
attgttatttatttatttttatgaaggaacaatatatgatgattgttatttaaaacgtatttatggtttgtattcaaaataatgaaataatacacacacgcaggaaaatcatgcaagtacacgtgtgtgtctaaacaacaaagatcaaagatccaaactttctgccttttgttttcattttctcagaactttgtttttatcaaattatcagaaaagaaattacatgaaagagttgaatttgatatagctagctaggctgcctgctagtgtatctgatttcacacaaaaccactctcttttattttaatctttaataataaataataaataataattaattatatagtacttgataataatattagtgtaaatagagagagagagagagannnnnngagagagagagagagagagtggtactggtagtgttgatgggtaaccaatagcccaaacagtcttagatactctgtgtgctgagcttcaagaatcttttgatttggtcttttgaagatcttttgttgattctcatggcggcaataacacccccactccaatctcagagaccagatcgtacttcaccttcaggtacctttttaccatcacctctcaaaatcacatctttcttccttcctttctaattcatcaattgtaattatgaaatcattcttattcacttgatgggtctcattactttttgtctttgttttcgattcaaagctcatgaatttgacaagatcgcggtgtctaaaatatgtttgttaatttgtttcaaatgatagtgttctgaattatgtttggatctttgagacttgtctagtttataaattgggctttgtggcagatatagatagccttgtgtgtataatttggacttgatctgcccttccataggcttaggagtagttatcatgaagatctaggatctgggcattttgaggtatttttttttcttctctttttggctttttcatgtttgaatctcttgtaatagttcactgctatattattatctctagatttggttaaattcaatttattgtatgaattttcatgcctgtctttttgtgtggtcatatttgttgttcatgaatcatgatctcagtggcttttagctgacttaatattaaattttatttattttaagtagcgatctgaaaataattatacgaatttctaacactaagctattgcttttccacttcacgtctctctttcttagaattgtttacacaatgagcatgcccttgtgggctgttacattttatggaagagtgttgaagtttactgatatgatattgttgtacttagtagttagtatgaggtgaaactgggagcaattgcaagttgaatgttcttgaaggattgtttccgacatgttttgtagaggctttttaagtaaacatctgctgttattacttttgcaatattagtggattggattgttcaaacaagtatatggttttagaagaaatgagattatgagcacaatatatcattaattagatgaattgagagaatgcgatggagaatgtaagaatgctgatttcctaaacaggatagttttcagaggttagtcatcattgaattttaaattgcaacacttggatcatttgtgggggtgtatacattgagcaagtgtggccagcatatattagactaagccaaccaaggaacaattttgtttagaagcttataacatttacaagtgaggactctcaataaatttgggaggtcactcatggacatctgaccgttgactcttttcctcaaaaataaaataaatattaaattgtcttgcattttaaacttcatgcaatatcaattttgggatctgaaattagaaccatctatccatcgtttagaaatcaatcacttgaaaatttaagatattaggagatgggctaatacttgtttctttttccatttgaaaaaaagaaaaagaaaaaaaaaagaagatgattgattgcttgttatgtccataccaactaagaaatacaacaatgcaacaatgtatctgtctggtgatcaatttttttattttttttattaatactaatgttataatttcatgtcttcgagatcattatttgatcaatcattacagccccactataaaaggattagatagatgttaactatttgttctgaatgaaagccattgagtgttagaatccctgtctctttaattgattgcgattttgattgagattcttttctgcatacaattgtagctctattacaagtctgttgatgtggtatgattacttcatctatatattcatatcattctatttattatgtgtgcataggtgtgcacgtctggatttgtgcgcacatattcataacttcaagttttcctatcctcgaattttgctttggttggtcaattatttgtactgcctgtgtttctaagactctaagtcactaagcctactcatggatgcagaagagaaacctgctgaactagataatctgaaggagcaggtagttttgcaatctttgaagctcatttgttaatttttttttcttgtgtattaggatatctttagacataatgtttgactagaattttatatatttattttagcagcagctctcagcaaagaatgaaggatcaattcctccaaatccttcacaggatgctgccactgtaggtaatctgagggatccagtggtacagtcgggatctttggcttctggcggagatcgaacagtctatccacctaacatttatgctccacaggcccagccattctactatagaggtttgtccttgatttcttcgtctaaaatagaacccaagacacctggcaaataatttatgatttttcgctcatttgcttgttaattgcctttccaattactgtttctcatgcttctttagtgaggttacttttctttatgagtactacactgttttatgatacattgttgaggattactcaccgtttttgtacatttcgaaagatccggtgcagttaaatttctgtgtttactatgaagtaatttgtaattgttccgattgagaattatttgttagtgtaattgaaaaactacactgtttaaggtcctatttggtgtaggcgtaagttcatcatcaactttcattttgcccacatacagacaactttaaatatataaaagttcttatgttttacttaaagatcttgttttaaggaatcgtaaaatttgggtttaaaacatgtttgctttggtttttctttttgagtttacaaacttgtgataaagtctatgacatttgctcttttatatcatatcaaattaaatttgaggctattcattatttatgctttgacatcttatgaattttattacattattcactgtgagtgctcttgttactaacaaaaattaaggtatattgaagtttcttactgtggtggtgcaactctaggttatgaaaatggtgaatgggatgaatatcctcagtacctcaatgctgaaggattggatatggggtctcctgtgagtattagtgttgttttttctttatttgtttttacttttgtgtttttttaatactacttatctgttctcctttggtaatcttaactagggtgtgtacaacgaaaatccttctcttgtgttccattctggatatggttacaatccacaaatgccatatggaccttactccccagttacaacacctttgccttctgtaggtggagatgcacagatgtactccccacagcaatttcagtattcagggccaccttattatcagcagttaggcccatctagcatgccgtacatgagttcacgaactccaggttcacagccagagctcactacattgctaggtgctgaccagcaaggagatagcatgctttttggaccaaggcctggttattctgctgtaggatcttttggcagaggcagctttcctggaaatcctggcagtcctggctttcatgatatgcagcaaggttttgatggattgagatctggaggaatttggtcagattggtcaaaatcctcagacaggcagaggtcttttactcccttgtcaccggcagcttctccccagcccattggtccaattgggtcatttgggcagaatgctggaatggtttgctctctttccctttcactagtctgatgccttttgttctttaaagtttggggaatgattttcatgtctaactactatcttcgactctcaagtcattttaccaaacatcatgttatgttatatgattattcaccagtatgcataggggttttttagtcatattttgtatcttatcatgtaacagttatgcctatcttcctgatatgacctgcatggaaataaatcttcacatttaggatttgggtatggccagcgtaaaacttcataaacgttgctgactagttaatgttttcaggcatcccaacatcaaagatctccttatggatttggatctggttcaaactcttacagtagaggctacttgcccagcggcattagtcagggctctagtgcatcctttgccagtttgggaacaaacagtaggggatggctctcaattgacagtaccaaacggcgtatgaggggcagcgtttcactgtgcagctgtaatggaactcttgatattcttaatgaacagaaccgaggaccaagggcctcaaaaccaaagagtcacattattatagatggtacctctgccgacaataacaaacacaacacgacaactgttaaggctcgtgatgaattatacaatcgtcttgactttttaacagattacaaggaagctaaattttatatcatcaaatcatacagtgaagacaatgttcacaagagtatcaaatatggtgtgtgggcaagcacaccaaatgggaatagaaagttagatgctgcataccgtgaagctaaggagaagcaagaaaactgcccagtctttctcttcttttcggtacatatcgaatctgtttgaaggaaactcttaaatttatactctatactcttgtttttgtttggagaaaaatagcattatatccatgatgaatctgtgcctgaaatggtaactgctaattagacaaggcaacaaaattttgttttgcttcttcctgtgttcatgaaatctagttctgaaaaaagactcatgattgacagccaaaagaccaccagttattttaaatttctagttttataaaattttctctaactttcatctatctacaaaggaggggaaaaaataccatgaaatttatagtaccattgggacattaattctgttgcaactctgcataattttacacgtgtggactatgcaattaaatcattctgtttgcatctttgtacaatctttatatatatttcctaaatattgattctgatcttgttcaaacgccactagaataaattgttatttgatgtaattatatctgttccttcgcattttttggtgagaaattgtggcctttcttccctcattttgtctgacctattatttttttttttttttaacatgaaggtgaatgctagtgctcagttctgtggagtagctgaaatggttgggcctgttgattttgacaagagtgtagattactggcagcaagataaatggagtggccagtttcctgtgaagtggcatctcattaaagatgtacccaatagccagtttcgtcatattgtgcttgagaataatgacaacaaacctgtcaccaacagtagagacactcaagaggtaaaaatcttataattacattttttttattctactttattaaatctctacttgatcgaatatgatatcattcacatcgtaaaacaataaggaagcataaaagttccttactaaaggctttgatctagctggtgtattgaactggctgattttgtttgttggtacttggtagaattctatcttgtacaactaatttctgttgtggtatttaatttaatttgaattttgtaggtaaagttggagcatggtattgagatgttgaagatcttcaaaaactatgaaactgatatgtccattcttgatgatttcgacttctacgaagacaggcagaaagcaatgcaagaacgaaaggctcgtcagcaagccagtgtagttggtgttggtgttgcaaacgaaaatgagcatcgaaattctgttgcaatatctggtggttttataaagcaaatgtctaagagttttgcccaagttgtacggctagacgagggtagtaaagaaccttccctggttgaaagagcaacgcctgccaatgatgtttcggtgggcaaaattgtaaaactcgaagatgctattacagcagccgtatctcctgctcagagcagttaatattgtgatctggtttgttgtgccatatgtgacacaaaacatcaaatttactatggttttcattattttgtgataaaatgtaggctcttatgtctacttaatttattattgtattgtatgttcatcaaatatgggtattttataagttctcgaagcctgacgagcttcttgtataataatatgcttcacaagagctgcatttcaattgtagccattagtttctcctt

SEQ ID NO: 14045 - DNA, 15856 bp, Cannabis sativa
aatttttcacaacacgacgcattttattcccaacttctctaataggagcagcaagcagtcgatttgacaaattcaccaaccattccataactgtctgtgagcaattatcaaaggactttaaaaaacaatttcgagctgcaagggatcgaagaccagaagcatctaaactaaccaatgttaagcaacaaccagggtccctaaaagcatacttaagccgttttagtacggctgcagccaaagtcaaaaatttgaatgatagtattcaattaacaactcttcaagctgggataacaactgacttgtcatttgcaggaggtgaactatgggatgatttgcaaggtcgccctgtaagaaatattaatgagtttaatgaaagagcaaaaaaaattttgcgaaaggaagaagtgcaaaatgaaatgaagttgctaaagtctgactcgggagacaaacatagcacaagtaccgtaacagtgagcattgtgacgactaaagccagaaattcaaaccccaatggcctaaatgccaagagaaagaatgactcgagagactcatcaaaagataagaaaacacaaaagaagcacgagaaatatattcctatatacttggtgtatacgaaatataatgaaactcgtgaaaatatctatcccgcgaatgaaaatcaaatcgcattttggagacccgatctaatgagacatgcaagaaataagcgagatcctaacaagtattgtcatttctatatagacattgaacataccactaaagaatgtcgtcaactaatagacgagattgaaaatctcatctcgcgagattacctaaggcaatatgtaagacctcaaggaaatgaacaaaatccatccaacaacctgaataaccaaagattacaacctaccccagttgagggcgaggacatcttagtcattcttggagggaaacatctcacagaaaacagcaataatgctaaaaaaagatatataaatgaagtggagaacgagaaatcagctttcgctccaaaacccctaaaatgagccaactctgatgaacctcccatcatctttactgatgaagacgtatcacatgtgcattttcaccacacagatcctttggtaataacagttcagctcactaataagaggataaagagggttctcgtagataacgagagttctataaatattctctacacaaaaactttaaagaaaatgtgcttagaagaagcaaggttgaaaccatgtatagttaacctatgcggtttcacgagcgatagtgtcgcaagtttaggcacaattgaactcccgcttaccatgggagaaccaccattatccactacctagatgcaagagtttctagttgttgacatcctttctgtttacaacattctgatgggtcgcccaacattaaaaggaatgggagcaataagctcaatcaagcatttatccctaaaattccccactcatttaggggtagtgactgtgaaatgcgaccaattattagctcagtaatgctatagcgtgaaattgaagaatagaagggcaagccgtcaattgatggtaatcttgacagaagaaaacgagaaaaagatggaagatttagatctgagaatccatgatgaaaataaccacctcaaacctatcaaagaattagaagagatgaatttagatccaaacaatcctactaagtgtgttaacattgggaaggatttggaggaagaattaaaatagcaactaatcacttttttgaaggaaaaccaagatcaatttgcttggagtcattcgaatgcggtcgagatcaactcaaatgtgataagcattttacccctcgtggatatctagtccagttcttgtcccaaaaccaaatgggacatggagaacctgcatagacttctttgacttaaataaggcatgccctaaagactgttttccatgaccaaggatcgaccaattggtagatgcgatagcagcacatgaactaatgattatcatgaatgcatattcaggttataatcagattaaaatgcatctcctagatcaggagcatacaagtttcgtcacaaatatgggactttattggtataaagtcatgtcatttgggttaaagaatgctggagcaacataccaatatctcgtgaatgatatattcaagaactagatagagcgaaatatggaggtctatgtataaacgatatgttggtaaagtttgttaaaagcgagaaccatacaaaggacatcgcagagtactttgttggtttaattttttttctagaactggttatatttagtaatctggttaaaaataatttatctagtgttttttttatggttgattacatcagatttagcttatattatttataacatgtttttcacaattctttttatatgaatacataattaatataagtatgtatataagaacgtatttttgtttttgtatttgtttcatttgtttatttaacaatttttttatttttagaaatctctatatgttcgtattcgtttactaaaatcgaaatttatttgtttaattgtattttcatatatgatagtttaataaatcattatatgataatatataaatttacttgtttaatgtgtgcacgtgattgtaatatttggagaaaattgttgttaaaaatttattgttctgtataattagtttttattccgatttgtctttaagctttattttcttgtctaagcattcatgattgcatttttttttttaatttttgttgctgataaggacgatcaggaagaattattgaggtcactgtagctaaagaagataatcaacaattgtcgttttcaccctgacatcatctgtagcagtaaacaaaggtgaaaaacaagagaagaattattttctggttttttgtgatctattttcttagagataatcacaaatgaaggagagatcgttgataagagtgattcgcaggagaagatcgtctctttgaggagtgactcgtggagagactattgaagagagattacattctgttatgtttgggaaattatgggttttttaaaagtaaatttcttcatatatgatttggttttccacattttgatcattgaatattttgtatttccatattttttttctaattacctttttttgccattaaaaagttaactataatttgaattctcatatttattaaatttttccatctaattaaatgagtccaataaacatcttattctgatggactttgtaatgtaatacctaatagtaaacctaattagagtttataacataagagtttggtccccaaggctaatctcaaatcaattaagaacgcagagagaagattagtctatggaagatcatatacccacaatctcatctcatatccacaggtttagtctcaaatagtgtctcatgaacgagaattaaagagtaaagatgcaagaagattctttatgcttcggctattggaggtcttgtgtattcttaggtatgcacgcatctagctttgacgtacatagtgactatgttgagcaaatacttaagtgatcccagtatgaatcattggaaggtagtcaaatgagtcatgaggtacttataaagaacaaatgattatatgttcacttgtcagaagtctaaaaatttagagatcatttaggtattctgactctaatgttgtgtgttgttgagaaactaagaggtccatttctggctatatctacttattgtctggaggagctatatcatgaaaagtgctaagcagatgctcatagctcatcatatcatggcaacagaattcattgcttgttagaggcaaccaataatgtgatataactgcgaaatttcatcacttagctacaagttgtgtaaggaattgaaagaccgttaaaagtatattgtgacaatctttcagaagttctatatattcaaatagcaatagaagtttattaaagtctaaacacatagacattaataagtttctagttgtaaaagatagaatttagaataagatagtgtctattgagtatataggaacaaacttattattgctagcaagctcattaactaaaactttgacacccaaggtctttcatgagcatatagcttacgagggtgttgttttatttgaaaatgtgcagttttagtgggaattttttttttagtattagttactttgttgattgacattattacactactttaagtaaggttcaactttttacaaaacaaagttgatggttttattatctttaatgctctgaatatgttatctttcaattgtagtttgaaagactaagaattgatctcaataagaaataaaggaccaattggaaatacgcatgactaagatcacatagcatgtaatttttagttacacattcatacttaatctatgtaattgaatatatttgatatggtgatcattgatgagtccagttacaataaatgtaacaaaggccgctctggtctaatattggtctaggagatgaaccaaattgtttaaaggagatgttttgagaataattagcaagtttgtgcgcatacaaggttattaaatataattgtcatgagaattaatgtgtagcccaagtaggagattgttgggttatttttaataatccaatatgtaaacttacaaattaagacaatttatttgaactaatattataaattaagataaataagtgatctaattaaataagtctaataaacatcttattcagtatgagctttgtaatgtgtaatacccaatagtaaatctaattagagtttatgaggctctaattaatttgctatgtaaagaacacaagagtttggtctccaaagctaatctcaaccacttttatcctctattcccatcaattgaatgagaacccatagagagaagattaatgtgtggaagactatatacccacaatctcatctaacatccaatataataaaatcaaatgtcttccatcttattatttcataaaataatcttaataatttgacataagtttaagatcatatgaattttatgaattttttaaatctaatatcttacatcttgctcacagcatttgtgaaattatatagataaaaatattgcttgaagagctgaagtcatcacagtcatctccaatgaagtgttatcgtgacaagtcagcgtttattattgcagtccttccaacaggattatgttcacccttaaaaaaaactattaaaaaaagtaaagattatgcatttgaaacatcaattccgacaaatatttttttggattgtttcagtaccaatggtgttcaataacactccttaattgaaaaataaaagtttaaaactatttgagacagctgaaccttttcttttcctatttgcaaaagtagcaaacatggacattgtaatcttgcatattgcaccaacagtcatcaatcaaataaattatttgaaaatgaattgttacattttaagtgttgaaaataaacactgcttttcttagcttaaaaactccttatccttaacctttaaattaacgttgacaagaacttaacatgtttattagagagtagggacatgaatcattttggaaaaaaataaaaaaaggagcaaaaagtgaccgtagagatcaacttacagaagtcaaccttgtgtcctttggcgtaacttggagatcgttagatctgcacctccaaagccatccattacagctttcgccgaaggaaactcagctctagacgtcaaactgtaaaaaaggaaaacaattgagatagtaagctaaactaatcactcagtacacaacgaaaggcaaaataatcaacaaaaatggtttcaataaagcagaaggcaacatgtctgtaagagtcatatcccaaattttacttgtaaccattgttttatcttatcggcatatgtattgatattgtcaagtaactaaggccctgttaacaaatattcatcaccaatacatacaattttcttctaaagcaaaacaggacacatcttatttgtgcatccaaccactccatctgtgatcatttctgaaattatgtattttatatgtaagttttgttcccttgatgataatgtatctctttggaaacagaaatgaatgattaaatatcacctaatagctgaataatcaactttccggagcattagaattaggttaaatatacttgtgatacagagaagaaattggttacaagctgctagaaaaggaaagcatgttcccataatctttgcctcaattatgatggaggacagcaaatcgatctatttctcacgggttagtttctaaacaactaattttcgtcatttgaaactaaattttaagagcaaaacactgcaccgaaactaatgatgcatgaatacataatttgtgtggttaattagtcatgtaattctggggttgaggaaaagtcaattagtaacctgctccgaagcacaaagcatggcatgcctactcgctcagctgcagctactccagattgacttcctgccacgaggatacaattgtaaacaggtacaccggcactctctgcccctgcacgcagtgcagctatgatcttctctaagctgaatgaccatcaacttgttaggaaaacaataattataacaacaacagagcatgaagatgtaaagaagctactaatttttatttatgcattaaatgttataaaacatattctggcattattcagatgtcaaagcctaagaccatgggactacacaaataatttaaatagtacacaaaaaaaaaaccctaagcagaggttttttttttcaaagataagcagagttaagtttctttaaattcattctggctatttctatcctaattcttatataaaggcacaaatagagaaagtaatggaagacacaaaggccaacaagagcattcgaaaaaaataacctttcagagggactggtatcaatctcaacactaacttttagtgtggatgcaaccttctctgctatcctttgtttctccgcagaaactggcgcaaacagaaaaataaaggtcttcacaaccaaaacactatgcacaaaagtctcactaaacaaatacagattaaattcaggaagaccttacctgctttcttggcctccttggctatttcctcatctaaaccagaagaaaattgtttatgatgtacaagtcgaccatacatgctttgttctacctcctcattgccaataatctttatcttcgaaactctttcgttgccaagcttttcagtaatagatctaaaattaccaaacatatgaaagaaaattttagataccagtgaaagattctgaaatcaaagtccatcaaacaagaggaaatatgaactaattagagcaaaatcaatatttgtatgcctaggctaagccactcctaaacataacttctaattcagagggtgatagttcaaagtgaaaatatatgatttacccaacccaaaaaatactaacttttaaaaagtaaaataaataataatgaaactcccaacaaaatcatcctcgaaagaatctcaagggttatctattcctctccaacagaaccaatcaaatccactggaagatcaacaacggagtacctattaaccatagatgattagatctttaacaaggaaggcctatgatctattttctcttcatcgctctcgtataatacacagcaagcactatataagagcttaaacattgctatttctcattaatttattcattctctttgacaaaattcagtttgacactaaaattattgcatattaatgggagactgatataccaattaccacagtaagaataacactgaaataaaagaaaagagagtgattattattgataattctaggaaattcgagagctctataggttgtttggcttcataacttaaaaattattttcagtttttaaaacaaaaaataacttttaaaaactaataggggtcgtttggccaagttttttaaaaacagattacatcaaaatgtaattttctattttcaaaaacaattattttttggtctaacatattatattttacatttttgcttacatacccggaccctcaatacggactgggaaccgaactccgaaaccgaacccgacccccgacatggtcggacccggaccccgacatggactcggaccccacacttggatctggacccgacccgaacttggacctggactcggaccccggcccggaccccggacccagaccccgacccaaaccccggacccagaccctggcccggaccccgaacctagccccgagtccgagttcagggttagggtccgaggttggggtctggctctagggtccgaggtcctggtccgattcggagtccaggtcaggggtccggtctgaggtaggatgagttcatgtcatggtatggtgtagaatatttaattttttttagtaaaaaaaacctaaaaatagttttaaaaaacttgagtcaaataccattaaatttttaaaatgaccaaaaactattttctattgtcacttaataaaacagaattctgaaaactgaaaatacagtcaaacaacctcttagtttctccccaaaggatcaagcctcaatacagaataatctcaaaaagtttaatctcggatattccaaaactaaacagataacaaaagatattcccatttaattcaaactttccatacatagcccccctcactactactacctacgcctagcataggttataccaaattgggtatttatcagaagctattgctgaaactttaaaagaaaattcagtaatctgtagcaaagacaatgatgtgctagagtctaactgcattttgcttccatgtatccagcacttaaggcatgtaccaaacttacctagcaacgtcatcagcatttttacagtaagcggttagtatgaccacgggtacgccttcattatatgcattgtcaataaaactgcaaattcaaatgaaaaagtaatagtttcaaatgcattattaataaatatttttgtgataattaatacttttgaggttcttacataacatgccaaggtttaattaacactgctaacaattttaacatgaaaatgcagggcattcttgggctactttgttcactgacacttttctttgaatatgaaataagaaaagagttgaaagttctacacatgagcatggctaactgatcttctatattagacctaactctccaatagagaataaatgtaaaattttcacatggcctgcatgcatatgcaaagctacacatttggtatctgattcaagaatgtaatagtttaattttacttcaataattgctgatcaagcataagtattagcagctgaaggaatacaaaatgcaaatgaattatgtccagtcacttattgccttcaaacatgtgaaatgattgcatatcggatggctgtatggctatttaatgctaaagaattcaaagatatccctttctctgacttatgtagtgattgggaatgttccatcttactttagttgtatcagttttgcctgttttgtctagtcttttatccactgtttgctcataatcttaattcattactacaagcattcattctgattttataaaaataaacagaaaaaaaaaactaccaaatcatgatttgctaagaattaactcttgaaagaatttcttatcaatatcagaccaattagtgtcgaatatcaaatgcttgaaactgctctctccagtctttcttaagctttgagtaaaaacggtcatcaaacaaacacattgtctgaacacaatggaatgatgattagagaagtctaaaattgcacaatttcctgtgaagcttttttttttccatttttttcaaataaaatttcttttaagcttttttttcattttttttcaaataaaatttcatgtgaagcttttgaaatagaagtttctacagaaaaaattataatcataaaaactgtacagagctaaagaaatgatagcacatttgaagagaatgtatattagatggtcaaatccatatctaatcaggataaggcaactcactcttctactccaggccttaaaggtaaactgtttgacaccaaaaattcattcaatgcattaccctggcaatgaatgagcaactatcagtagatttaaggtaaattatcatgcaacgattccttagtattaattaatcaattttttttaaaaaaaaaaaaagaaagaaagaaaaactgataagagaagaatatagaacaaaatgttcacttcttgaatcacaacaaagccaaccaactgtacaaaaatcaaagacaatgagaaacgtcgaaaatatttatcctaaaaactaataagagaaactgcatttcccttctgtccaagaaaaccttctcctagtccaacaaaagattcttctattcctttcgataatagggtttaaacagcagggagtagaatatgccaaaaaaagtaagatttaaacaacaaaaccacaagttttcttcatagcatgagagagagagaaagagagaaaatctcataacataatttaactttccctttcaacaaaatcatggaaaacccaaaaattcttgtttaaatattacttcgtatgtaataggagaacctactgtactagttttcatatgtttttttctggttgtttgtaacttaagagactatgttaatgtttttagctttgagtcagcatagtttttgtttcattaatagcaaattctcccttgatctcatgttaacaaggcaagcaaggactctcaataaacttgggaggagttcagtccaagacatttgacctatgcctcttttttaaaacaaaaaaaaaagtataaatctaattgtagtagttgtagaagagtttaatttaaaaaaaagtaggacaatagaaagaaaaactataacacacaaaagataaacaaatacacttcctgagttatcaagtttcatttgttgaattttttaaaagagctaatggtgttagtttttcttttgtggaggttacttcattaaaactatgcctatctaatttcaatcaaggtacttcaagtttttactccctacaatttcatcttaaaaatttcaaagaatgattttattgaaagacaatggatgtggtatccagaaagctaatagaagaacagattgaagagaggggaaataaaacaagaaattaaaaaaaataattaaaaaaaaaaagaaaaaagataagagaaaaggcagcaacatgattttgtaaatataaaaacacttaaacttatttttttaatgtatattatatatataagttacaaaacctttattcattggaaaaataatctacaaacaagagactaaaatctagacagagcaagacagttcccagccggcagtaaaacataattgaattagctagaagcgatacagaactaataaattccaaattaactaaaaacttaacacaagaattttcttttcttttttatattatacatttgaggaacttgaaccctttgaatacgagaccactcacacacactcatacaactaaccacctagctgaagtagaacctaacgctaagaatttaaacaatacataaagtctaattagtttggtttgtcttgtgtctgcctcctcaatgcactttttttggggcagaagaggtcaagagaacaaatttagggatggatttatgttgcattttatgatttgatagaaataatagtttttcttcatcagatttaaaaggttttaaaaagttttatctgctatagtcaatcattggcaggctctttaggttcttgaaactacatatttaaggaattatcattttcagatatagtcagtgtactaccaggttgtgagctctaagatgatagcatgtccttctataactttttaccttcatttacatccataataccattcctgtacttagtacacgcaaaaagtaaataaattcaagtactaaaacaaagttaaatcttaactactaaaatgcaatataaagtctagttatctaatatgtattctgcatcaaaaactcaagttttgtaatcaaatatgatgatttaaacatattccctaatacaaatgcatgaccatagtatactctatgctagaaaggtaatatggtcaatcgttggtaagggaacaagaatattcatttttgtgaaatttttactttccaacataaacataataattcctcaaactatcctgctgaagaataattactggtaagccattcattcaattattacatgtaaaactaaccaccttttctcgcagaacacttttgataaatgaccccttttcacttgtgggcaatgatgtaggccaaccaatctggaaatgtaattcaagcattaaatcacaaaatggaacaagtccagagacttgcattaagctatccaatacttataagaaaacaaaactgacccgattgaaaaacaaaatcaacatcttttcctcatcaccaacgctcttcctgatcatttattataaagaatatgtattgacttcgtcagaattcatgatctttacaaaaaaataacttcaacaatgggaagttgtacttgtggatctactcatgcataggacaaggaaaagaataattctttttactaattgttttaagcaggttatactgaaatttattcccaccttaaaaggtctaaatagacaggctcgctccaatttgcacagtccaacccaagcttccgaaatgctgccgtaattagataaaatagttaggaaaaaaacatacatgacccttaaaatacttcttgtctaacactttatgtgagaaatacatagattagcacatgcaatacctgtgttaaaggcttggcgatttcccacacgatgtgcatccacaaggaccctgaaagtaggaaaatgaattacaggacaacacaaccccatctagcagaaaatatagatataaaaaaaaacctaaatgacagcataataatagagaaagagagagagagtagccaggcttttaagctccatttaatcattaaaaaataaaggataatatgttgcccatttaacacattatattcccatttcttacatcattttgaatatctagaaagtggacatctactacaattatgttaacactggttatacaaaaataaagtatgtagaaaaaatattaaggtccatagattacaagctagtgccccttgatattcctaagtttgaaacttaaaatttaagcaaaaccatgatatttgtttattttagtagacaaaaattctccccaaaaaactaatgatagaatgcaaaactacaaaaaaattacaaaacacgccaagttctcttgtgggctacaatctaaaaattgaattagagaaacacaattcatttcaaagaaacaaacagaagattagttcttcaatccagtgtataagactctactgtgccctgcaaattagcaacagtagttctgttatgcaacttactatttcaaattttatgcaaaaccatggaaatagggccctgactactctgagcaagaatagaaaaaaaagaatatatagaatttgtcatcccaaactatgacccttgtaaagttttgtccataaacctttttttgttgcaaaagttttccttgaattatgaaaacaattgcttattacactctgctaatttcattaaacaatttattgatatagcgtgacgttaatccaatgcacttcaagaatgcacacaaaataaatacataaatagcagtctagtgatgaataaagggaatatttctatgcattcttagagctaataaagggaatatttctatgcattcttagagctaatatttgtatgcataatatcaataaacaggctttttgggtagttaaagtgttaaatagaccttccaactatacttgtgacccatgactgtgaaccatggtcacataagcaaataagcaaattgtattaaaaaaatataaaggaatacttgcaataatttttatagtttggattttaaaaaaaaaaaaaaaaaaattgcaacaaaaaaactaggggagcaaaactctaacaagagtatagtttaacaaaaaaaagctattaattaaaatataagatacaacaacaaacttcgtatctgtttgtttcaatgaaaatttatggaagctaagggaaaacatgcaactttatcacataattacaaaaatggtcttctaaaatcagagtgtaaaagaacacttcaatcaaatgtcatcactggaactaagaaatcacatattcaatgcaagcttcataatcagtacaaagtaaattatataaatgtatatgcgatacccttcaaactcgagaagaacagcaaattcctgagacgggttctggtcgtcgttgaggtagtcctggcggggaagtgaggagaaagccgtgaaataattgaggtccaaacattttccaggaaagtgtgattttcccggaaaagtaaagcgaaatggaggaagcaaagttagagggtttgtgggtaaagaagagaagtgtgtagtgtaaagggttgaagaattggttggaatagcgaagcggtgagaagttttgaaaagtgaacacgaagaggaaggcgaaggactctccatggcagattccgtgcgaagcttttatttttattattattattattatggcaaattatgaagtagtacctcattgaatttgagggatgagaaacctcaagagatgattacttggggaatgatctctcttgacatccaatgggtaaatagtagaaggtaactagtgattgactggttcaattttcatacttgttttgtccattttctattataataatatatttatgaaaaatttaggagtttttttatttttacactgtaagatagtttttttttacgaaattttacgtagaaatcctattgcaactagcgttgcaactactttagaaactctaaatttaaaaaaaaaaaaattaaaaaatgaaaatatatggagtaattttccaaaaatttacatgaaaaatacaaaaggtaacaagtatatttttatattttttattgttttatttatcaaaatattacttacacacacattttgtatggaatgatgaagtcactcgttcatcttgtcactctacccattttccctttctttttcttaccattttctttattgttgtcagttttcaattcaatttaggcagaaaattgaagccacgaaacagaactttttccagactcttcttcttctccctctcaacatgcacaatatgaacaagctttctccttcctctccactgcgttcacattctgctccttcacgttcccactctgtggaacctttgccaagccccagatctctcgatctaggtggctccgatccatcttccaatgatacccaaggcagctcgacgcgcccaagctgtgttagcagctccaaaacgtcccgcctcaaccaccccggtcgtgtcaaccattactccggccacagtaccaaacgctcgattcgtactcgcaataactctctcacaggtatttacttctttgatcctctttccctattcactgtcaaatcccatcagagaaatgggtttttcctagggtactttagatataaatttgggtttcctattaaattaattgatggaacccgatgccagataagggatttagatgtgaaaatcgtttttatattaattcccagaaatggttttattctttctgtcaaaatttttcaaagtttagcattaattcttgcctgcaatcgtgatctgcctggtaccatgcgatatctccttgtgcagcagctctgttctttagttaatgctccagatgggatagttaccaaatttggtcataactatcccaaaacttaccccctatataagtgcagaactcttctgcgatttggcatatatccctaccatcactaaatattattctctgcaagaattttcctataatagtttctata

SEQ ID NO: 14046 - DNA, 9133 bp, Cannabis sativa
  modified_base (7064)..(7083): a, c, t, g, unknown or other
ttttaaaataatataaataagactatgagtttaatttttgataactttttttttttaatataatcaacttgaaaacaatttctaatacgagcatatgtaagaaatttaaccagttttgtcataatatttttatgtcaaattattataagttatttttacaaaaaaaaaatcaattcatagtcttatttataatattttaaaaaatacaaaatttattttattatttaacaaaacaaatgatctataattttcatgctatttactcataaattaagtataagtttggtcataatggatgactactttcaatttagttattgcggcggtggggcaatttggtaatttaagtgatattgtctacaaagtttggtatggacggtagagctttagtcctttgtgttgtgtttgtatgcgtggttcaacgaaaaaacgagttgagttacctgtcttctttcccgcgcttaccaaggtcggtgcttccatgtcatcactcgtaaatattgcccacctcaaggatatttttgtcatttcaaaccaccatcaccactgcccgtgcttctgaacgatacaaacaaacatcaactttttcaagcttacgctaatcatatttttaaacaccggcgcatgttagtaagagttagtgttggaaaataattactacagaaaataaaaaaagaaatttattgaattaaaattttaagttgagttgcggattaaatggtttttttaagaggtttgcaacattacctaaaattttacaagcactataagcctcatcgtcctaatataaaatagttttattgcaggataaaaaattgtcaaaatactacactcagtatatcttataactaattaattaaacattttttaaataattaattaaacatattttaaataattaaataaataatctttttttaaaaaaaaaataaatcacacccgcaagctcagtacaaccgcgtgctgggtggttctgtgagtgaatgcgcacaaaattagataccgctaagactttaacctatgtttcaaatttacacattatatacacttttaataaagtatttataggactccatttactcacacaattcagttcttattttgaaaaatttcactcacgtgggcgtaaaaagtaaaggcttttcatttacaaagaatatgttatgtacattgcgcaccccgcgtcaataaaactgaaacaaaagaaagtgtgcaagcatgtatatacaaaatttgactaaagcgtcgccgtttttaggtgaaaaaagaaagttcaaaatactgtcgtttaaggtcggactgaaaaaggtatagctggggagtgctattaaactctggcaagattctctgatcgggcatgtttgccaagcattttactagctgtagctctgaaaggacacttggagctcacaaaaccgtcgatcaaatgaagatacgttttgagatcgtgacaagtggcaaaattaaacccattgacatacggggagtccctgctactaagccttaactctcttcccacttcggcgtacacccaactgggactgctatcctcaacttgcctccgaatccagctaggcaggcctgccacgtggaattcatccggtctcgacgcgtggcaatcttcgaaaacgaaaccgggaactttagtgatcacatcatcagagttcactattctcaacaccttggttccttgcttctccaaacgacaccggaagctccggttgccgacgcggggcccaccgaaggaaattacggtgacgagcggagcccgattgaagtgggttttaatgtcgtaagctgccagcgtggcaagcgctgcgccgaggctgtggccggtgatggtgaggctcagcggctcgtcaccgtaagattgtaggagccggccaatttcgttccgtaccatttgctgcaaactcgggttgagatccgtaccagatgtgtacagactcaagaacccgctttcaaccatgggcccacacccgtcaggcccatcacaatcggacccactggtttggcacgggagatgtgacagcgtggcacgtaaattctcaagccattcgagacacgtggcagttccacgaaaagagatcacaacgtcacgacgtccgagccgagcgatctcttctttgtcctgacaaactgccacgtaaccaatccagctggaccgtgtggcaacccaactgggcgcccgatccagccatcggggaagcttaatgccagaagtagctctcaagtttcgggtgacccgatacccggttccgggaaggccggagttttcgagaaaagatcgtttggggaatttgcatgtggcataagaaggggaagaagggtcaaagtcaaaggacttgtaagcagcatcggcgaaaccaccataacggagtatttcccggcgtaaattgtcatcaagcgggtcgagcaaaccgtcccagtttctgacaccttggtactcctgccatttctttctgatgagtttggcgccattgttctgttcattgcggtggtgatgatgatgatgattgttttcttccatactcaatccggggagcactctgactctcttggcctttggctgaggagtagtactgagagtgcagcaccggaacgatgaggatgaggaggaagatgatccatgtgtggaactggttttgcatggcccaattaccactccgatggagttcaatttcatctttgtttatatatatatatattaaactctctctctatgtaggttcgttatatgtataaaatgatcgagagagtcaaaatgtttttgtagtggaatatgaagagctaggggtgtttttatacttgcgaaaaggtgtatagacagagagagagaaagagagcaataactttttattttatttatttattaaaaatacaataacaactttatattaaaatataataatgtgtttcataccgtatataaagagagagatagtatatagtagtagtagaagtgagtaggtaatatatacggtttggtggggacaaaagattcataactgaaaaactgcatgcatcatatatatatatattatatataattggttgcacttgtttttgatcaacggctcagattgtgcgggttactggccccacacgtatcaaatgatccaccatttccaatcatattggatactttgacttaatttacaataaataaaacttattattcaatatatacattcactttccgaccctttccaatttccatacccattcgatcacgatacattagctagctgactagctcggctcataattcactcgctcggctccgctacatatatatggctctcaaaaattataataaagaataataataataataacaaattataaataataataataataacaagttataaataataataataataataacaaggacaatatggttgtaaattataataataataataacaaggataataactctatgctgtttcgcgttaagagggaatgtttttaaacctactgtagccacgctacttgctggggtaatattaaataaaattaatattatattatatttatttatatataaaatttagtaggataagcactacagccctaccaaatagcataacttatattacgattgattgaattatttgtgtaaaggctttaggttttgtcaaaattattaagcttatcaagatttattaaaaatttcatttttttaaaaataaattaattttaaatttttattattaaaatttttattttttatagcaattttatattattctttacctgttttattaataataaccacactatacactatgactattttttttttttttctaaatgaataaactttaatttatttataatttttttcgtaaaaaataaatcaatagtcataaaaatgatcacaataaaataagtacaattataaagaaatattatgatattatttgattttgttttatatataaaatttcttattaaagtcattaagtattagttaatagttctaaagttttagacttaaaattaattgaatgtaatttgttaataattagtagtgaatattaatgtttaaatttattgaatgatgttttttttaaaaaaatatattttatatattttttaatgtatatcatccatattgtatgtaaaaaaacaatatatattacccttaaaatataggccttaaattttgtgaggctataggtgattgcttaaattgatttatagttaaagccgatgtatatatagactatagttatatatcagtgtacgtaagtagtgcctagtactagctaccagaaggtggcctgttgtaaattactagctatattccataatagagcaatgctacatatcgttacaaattgttatgtactaacatcttgaatgatgtgtcactatattaaaaaaataacctaaaaacgtcaaaataaatttatataacaaaaaaattaatttacgacataccatatcattcatgactaattttcatgatgtataatatttcttttttttcataatacttattaaattaaagagcatcgtattagtatcttagtactataatgaggtggtgtcttataataagctaaaaatattctataataattattaaattaaattatgtaaaactcgaaattaaattctaccaatgatacaccaattcaaaggttaatttctctaaattaaattatataaaacttgctacttaattattaataattaagtaatattaaatactactaatgtcttttaatattttttgtaactatagcatatttaattaattttgtaataatttaaagcaccgaaaagagtacaagcattcattctgtgtaattttttatattcatattttttttttttaaaaaaaaaaaaactattttaaactttattttttgtaaattatgtatttatactttttaaaaatttataatatatgtcaaccataatataaatcgtcatattaaaaaagaaaatagtaaaaatagtatttttagctaatatattataattaattagaatccctcacctcacatgctgctctcgtgattgaattctcctcgtgcgtttttctttgcttagtagtactttatgaagtacactgttatgatttttctcttttttgatcaagtttctcatatgactatttctctttggtgttttcatttatataaatatatatatatatatataatataaaataattagctgagagcacatcaagcaattagaaaaacatatagcacatgtttcatgcatgggatagtttatttatctttttgttataaagaacatttccattcatgttatataagaaaagttatatttctctttcttaatttgttcactagtacttgatataattttggttgaattgtttttcactcacattttgtttttatatatataattatttgtatatatattgaaaaagtaatttaatcaccatagattaatgaaatggtgatcataaaggaaaagtttaagagaaataatatctaaacttaaatgctatatatttttttctttgaaggaaaacttattcaataatttttttgtaaaggaaaaaaaattaatgcaatacatatgtatacataacaacaactataattgatgagtaataatatcctaggtatatagtaacaatctccaagtaattaattaaatatgtatgtatttatataactactattaattaatatcaataccttgcttcaaataatatattaaataaacttgggaatataattaaaaagaaaataatgaaaaccaccaataataaagatactagctagtagtagaacataaaaataacaattaatttcaaaagaagaaaaaaactattgaaatagtaacggttaattaatttgacaaaacgccatttaatgggacaataattagaaaagtcatatgtttattgaaacaactaaactatatatacataatattgagctaataaagaaataatgaaaaaaaaattctaaatattcagcattgctattaagtatataacgggtgtttaacactttatagatgtgttgtcttataaataatttaaaaattattacattaaattacatgtgactcattatttaattagactaatagtaatattaacacgtaaaaaagagctaactaaacactttttaacctttctcttaaatattagatattagttgtactactacaattaagtgatacttataaataaatactctgatattatataacaattattctattaaaatatatgtataactcgattgagtggaattttaaacatcattaataatttattagtgcattttttggactacatttattgagaaataattatttgtcaatacgagttattacgagttgaaggagtcttgggggctgctttgctatgtgctattcatattgctatcgtagaaaacactttatttgaagatggtgatggtgcaaatatattccgtacttttaatccaactcaagctgaagaaacttattcaatggtcacctttgggggttattacactaatatctcgtattgacaaataattatttctcatattaaagcttatatatatcatggttagggttatttattggactacatctaatatttttaggcatattcagatccgatttaatattatatattggatgattgattttaccattcgatctgatccaattaatttcagtcatccaatcgatctaacatccaaaagcatctattggatgttggattagatcgattctatccgttggatgtatttcatatatatatatttattggttttatttagggtttatctaatattttagacatagtattttttagattggatcaaatccatttaatattttggttcagtattggattagattgggtccatccagtctaaaaataaataaatttttaatgttaatttttatatatacatatataatttaggtgcttttttatttttacacttcaaaactgttttttttctttttgtatttttacgaaattctacatagaactagcgctgcaacttaaattgtaacaaaaaattgaatactcctattgcaactagcgctgnnnnnnnnnnnnnnnnnnnnaccgtaaatttgaaaaaaaaaagtaaaaaaaaaataagagtaattctcctataatttatgtataataatataaaatctaattactcatctaaattaaataaaaataccaactagttcaattggatgttggatgtattagatttttggacatcccatctaacatcagatctgatctaattggatattcaaaaatagtgtacaatctgatccgatcacaattgaatacttaatgtttgatagtcgattgtaattagatcgatcaaatatcattagattaaattgatttatttgcaccctagactgtctatattatattttatatgcgttaatacgtatattatatataacttttattataaaaatgcgtcgatttttttttttctctttttaaattttgtagatgtgtggtggtggattcttcactttggaaagactgggccagaggtaaggcactatgtttcatattagatccatcatttcatacttttttcacttcatatatatttctttactactcttttattttaaagcccgataaggtgattaatcattaaacttttttcttcccacagaagaaaaggacaagaagaatgatttcttatattattttaaaaaaacattattattattatttaccctttaaatactaacactttttacacacaaagaaaaactcaaaatacacactcacaattaatacgtggtagagattatgcaatattttttgagggtgaaatctaattaaaatattaaataaataattgaaaaatctgtataaatatgtttacttctgtggtcaattactaaataaatatgtttatatttatatataattcacggaaacttgtgtgtatttattctacattttatgttgagtaatttgtagtatttatattaagtatcaaattagtaaaattttgataattggatatattatatttactctaattttatataaaaaaaattataatatatattttttctaaacaacaaaaaggtccactcatgtagatgcctggaattattgaactcttttttcaaaattatttaataaataaatatataaagagaagtatattctatatgtacataaagtacttctatccagttatttcctagtagtatatgtctcccataaatagcaaagacactatggctgaaaggacattattttggttgatagttgatgaggtcaataaaaaataaatattcttattataatatattacaactgtaaaaccaactcataatatgccatatttgcaaaaggcagtcatcattctatggagttcaataaaattctaaacatatatatatattgaatgattattttaaatattgaagtatctacaaaatacagctatttcagtgataattttttagtcataatataaattttttataactaaatatgatttttagtcacaacaaaatattaactgtgactaaaacatagcatttagttataagttatcattaatttagttttagtcacaacaagtattgtgaataaaaagatatttattgtgactaatacctttggccacgaacattttagtcacaacataaaaatagtattttataattagtcacaatttttttacttttagttatagattttgttgtgactaaaagtaaaaatttttatagcaagtaataatttatacactatcatagtgagtgatatacatatttacataataactacaattttttaatgtttaagatatcaaaataggatttgaaatttctagtaccatatgcacacgtacaatttttattttcttgaaatcaaatgaaatcttttaattcaaactaattatgggttgtcaatattgaaaaaagttacaccttttacaattggttattagtgacaagttgtcaagtaaagtttttttttttgtatatacaccaaaaatataaaatgtcaattgggctgggtcgggcttggcccagctcaatatctgcttggcccgatctggccgggcccaaccactcccttgagtctgacgcatcaggcccgactcgagataaacgggtcgggtctgac

SEQ ID NO: 14047 - DNA, 3042 bp, Cannabis sativa
aaaactgacaatactgacgtgggagaagcgagtggccatgttgctagacaatacagaaatactggtgatgaaacatatggtagtgtctcatcccacattgaggatttaagtgggttcagccataaagacagactaagagctctaaggagagagaaagcaaaacgagagagagcaaggaaaagagagagcagaattgagaaagaagatttgtggatttcctaatgaggacatgttggttcttccgccaacaatcctagtttaagcaatgtattattggaagtgatgtagatgaatatagtctacctgcagattgtgagcttactctcctgtgttcattgtatctatgaattgagtcacatgctcatgatcaagaactgagacctcatagtgtgagaccgatcaaactatgatgaattagtccagtaatatagaaggaattctatgcaaactagttgtaactcaaacgaagattgtggggcagcgacattatagcagaaaaaggattcttgaaagccatatttgactggttagagcaccaggatgccagaaacatctcttcctaatcaacaaaaaaggagtaactgaaccaattattttataccatggctgaagccatcccaacaagtctttgggaaagaaagagaatcataagaaaggaaaggaattattggaaaatgaagccgtccatgctataaatgaaccaagtatctcatgccttatttcaagcagattttgctttagaaattcatgtctctaaagtattaagtgacaaattcattcgaagagtgtttgaccctttcctacataagtttggtgtaccattttcttgtctgcatcacaccagatatttcttatactttgttccaccacaagcaagatctaaggtagtttttcgctatgctcactcaccttgtcattgcatttaatagaatactacttgtttgaatcagtaacagtcatgcttgtcttttcctgcttcagttagtgtaatgtactaattaattttagatattggtccttttatgttgctcccataaaagggaaaggaaattagttaaaatgtttctgttttatgtctttgagttagcactaagaatccattgacaacatattgagccattgacaccggagagaacttccttcttgtagttaagggatgttatcataagctgaaaattttattggtgatttctttttttttttttacaacttttcactttcatttaaaaatttatatatctagatgttataaagagaaactctatacattttaagttatcctaatacattcattcatggggatttatgataaatatgggaaaaaaaattaatgtttactttgatatgccataaaaaaaaaaaaaaaaaaaggtatgagactaataagcaatcagagtttaaatatataagaaactaaacaaaaaaccataaataatgttgataagatttctaagaataaatatgactagaaaaatcgtcggggcagacatcatcgctagaaaaagtttctagagcaaacacaaccgtcagaaaagttgtcggagtagacatttttgacgaagaagtagtcatcgccgaaaaagtcaccagaattattatcgtcactgaaaaagttaccgaagttgtcatcgtcgtcgggaaagttgtcggaataacacacaaaaaccagttacatgaaataaatgaatcaaaaattagttccttaaaataactaaatcaaaaatcagttttgaaataactaaattaaaaattggctccttgaattaatcaaatcgaaatctgtttctgaataaagaattcaaaaatcactttttgaaatgactaaataaaaaactagcacaaataaaatacaacagagtctttgcaacttacttgctattaatagtttggatcaatcttcaaatatgctcactagaaaagaataaaataatataaaaaataggagccaattaaaattaagaaaaaacacaatatacaaatgagaaggaatcaattctaaaaatactgagacatatcatattaaatagaactggttccataacaaaatgagtaaaagtaaataatacacaataattcaaaaactgattataattaaatatacatatatataatttaaagcataccacagaacaaaaactagtgtgctttttagaagatccttttaaaatagaactttttccctttaactaatttaaaatccagctgagaaacaacacaaataaaaaacaacacggccttcgcaacttacttgcaaacacatggtttagatcaatcttcaatatgttaaaaaaaataatataaaaaattatgaagaatttgttaaaattaataataataataataaaactatatttaaattggagggaatcagttccaaaaatattgtgacataaattataacataaccaaatgagtaaaaataaataacacataataactcacagaccgttctaattaagaaagaagagagagtcagttccaaaatataaacaaaactagttgtacaaaaaaaaatgcataaaaacatacaacacacaataactcagaaatcagttttaatttcaaacgataaaaaaaacataaaataagttggtgtgagttttgaacatcaagtcctattaaattatcaattatatagcaatgcagtacaaaaatacactagataataagctaaacccatgataagttgacataatccaatgagaaaaagatgagagatttccttataagtgttgaaaggatggccgatggagacaatggaaacagtgatgattaagctgacgacatactccttgtaagtgggagtgtgatagtcagaagtctcgtgatccttaagggaaaatactgagtaagctgtgaaatcccacatcacctggggaaggtcaagtgtgacgattctgagactacacagctgaaaagtgctcaaatggatgatttgtactgcctatatcaacaaggtgcatcttcttttctggtagttgttacgaaaattgtaaaacagtacgcaagtgcacgtaatcaagtagtaaactcacgcaagtg

SEQ ID NO: 14048 - DNA, 6901 bp, Cannabis sativa
  modified_base (5053)..(5057): a, c, t, g, unknown or other
gagagagagagagagagaagacaacacctttaaatttagcagaggagaagtttcaaggagactaataggttgatccaaagcactgtatgcagcttcagaaatggcacaagcagataaggaaccaacaggtttaccacctatgccatcacaaacagttgaagaagtgtgaccttcatcagtattgtacgagaactgcacaatctgattgccactaccagttcttaccgttccatcatatgcagtgtgcatatcacgcatgaaaaacataagccttcgggtcaaagtcccaggaagttcagcgttatcactaaacgtactatcacgatttgtgattgaatgaacaaaacattctaatggattcaagccagtaaggaaagagttttccaccacagcatacgggatgtaagacccagaatacttgggaccatcatcaacagcattcttgcttaaaccagactccttatgattattccaaccattacaagagagggtgtgaggaatactaaatgataatggcacaagtgagtgttgtaccccaagacacatgctctgctgaactaacttcggcaaattccctttgcttccagctttaaacatagccagcaaggaattgtccttatttgcatatttaaaggcaagactctgaatgtcacgaaatacttgcttgaaagcatctatcgaaacttgactgagtgcagcagacgtttgcttctcataacacaaacgttctacttgaacagacatggatctaggaatctcctcatcagaatctgtaagcgctttatgaaaggagttcagcacctgtttaaacatacaggtctgctctgcttcttgtaagccataaaatatttcgtgcatcaagtttcttcttgagtacaaatcagaagtgaggttcaaatccaagagtgaaacactcagacccctcatcgacaaccactcacacagaacttcctgggcagcaaatagagtatcgagtaccttacttggagcatattttatcaagttttggaaaaggttgctatttgtatcgcgcaaccatgaagatccttccgaagctataatctccccatttgctatattcacaccatttgaatcacaaaaataatcaaaacctgaaggcaagattgcactaaataattgttttcccgtccaaacaggacaattaagtaaaggagctttgagtatcgcaggaaacaattggtgattcaaacaaaacatttccaattgttgtatttgataacgagtcaataagacaccatcttccatcaccaaatgagcagcaactaagctgtcttgattgagggaaagcaagtttttaccactttgtccattgatcagttgtctatctaaaccaacaagctctttaagctcaactttagtctcaacggactgtggaacatagccatgaaggcaatcaccatcaaaatcaccacgaaagggagaacaacaaagtggatttagcgataaaactgagtttgttggaaggaccttggttgataaagctatgagggagtgttgatgaatggatggaggcctgttaatcaacacaatatctccatcacgtagaggcctgtatatagtgtctcctatccgtaattcatccatagggcgtaccttcacaagatggccattcctacgaacgcgaatccctcctttctctataaaacatacattccaacacgcatctgatctttctaagttccatctattcaaattctcagaaatgtacattttgtcagcaacattagaaggtatgccgatttcattaagtttgatatttggatcaccaacaacaaccatgcgaaaacaatgatcactgcgtttccccaaaacaacatctttgacccatctcaaacccgatgtttttgaaggagaatctttaatcttttgctgagcaagaaccacatctttactcaaagagttgtcagagtttaactgcaagtaaaatgcataatcactttagaaattttcataaaggcatgccttagaacttaaaaagaagcattatttcacaacgacttgcacaactaaggaaataaagctagctaacttgccttagcaattttcatgcaatccaaaacacgagcagccaactcatttgccactcctctgaaatcaaccaatttacggtatgttctggtccgttcatcctacaaccaaggtacatgcaaggacataagagagaaagaacaaaaatgagtaggtgatctactaaccaaatcaaccaaaacacaaatggggaaataattcttacaaaagtcaatcgctgcccattggaaaatgcatgtgtaaattcagtcacgcgatgacaatttggtgttacaaggaaactgttcaaaaagagtgaatctagccttggaacaaacttttttatgaatgtaggatcgacatccttcagcaaatgatagacctacaagcatagtaaattaaaaaaaagataagaaaaggctaatatttttattaaaaccgactaaacaaaactgcacttctctaagaatgcagtttaaaacagagtaagagtacccaaatactaccaacctgtgcatgtgacaaaactcttcggtgtgatttattgctactttcatctacttgttcatcaggtatcaagaaattccaataatcatctggcatctctcttagtttcttttggaattttgcattgttttcatttacaacctctactataatcgcacttcttctaaaaagatcagttgaagaaactttgaatttcattggatgatacctcccttcggaacttctctgtttatttagtacaaaggtatttcaaattacaatactgcataaaaaaaagggaaattagaataaaagaccgaacaaacttacagtacaatatttgcaacccgtaggctgatgatcatcatttacagagttggcaccctggcatatgcattaaaatatattaaaaaaggagtaaaaaaaaacaagaaaataaatcaagctttttaatgtcacattttattagcatcattttaaaataaaactagaaggaattttttttctttcttaagatgcatttatcgtcagactagttacccagacatgttaacattatatttccatctttgatcataaaatcatgttgtccattaaggaaaaaataaaacctactttgagtcaaaaggttccatatgttaatgaaagtgagtgtgattatagaatctcaagtatatttctataatataaactatatagcgttacattagtactcatctaatatattttttagtcaagcaataatgtagatatattagtattttcttccaaaatttcgaaagccaagaaaagtatagttcaatcattattttacatgaatagaaaagctttatttcaaaagaaatttacaaaaatataaaatatataacatacatgtgcaacacttcaattagttctcactaattaaccttggcacatcaagcataaggactgtgatacctgaccttgactcgttgagatggcttgattcttttacatgacggacaaacattgtttagtatctctgcaacttctgatagaaaatatggttgtagtattgtgaaaggaaacttgatatggccaaaatgacctggaaaacaaaaggcatcttagagcaatctccaattacagcaacactaaacgatcttattatctaattatgagccatgactttgatgtaacatgtccattctcaccttcacagctcttattttcttgatagggaacaccttcacggcgccttaagttttgagcaccacatgtggtgcattcaagagatagatttgggagtcccattctcgaatcggtaacctcgttgacattctcaatcgatatttcagatatcttttcctgtaaaagaattaaaataccatgaagtttaatctacaaaaagttgaattttggtgctttcgaactactaagtacaaagccactcaatgtacagttttgaactaataattttgcatgtattaatatgcacagcatcaaaatgtataaataagatataaatagcaaaaggatacgatattaaggaggcattttgagaaacaacaaagctaagaactaaaacaaatgatatattttgagaagaagctaatgtatcaagaaggcgaaattccaaatggtgtgttcttcatttttgtcggagaattgatacatccaaaattgaacaaataataataccaacaacagcataatgataatgacacaaaatgtaagcaaagaagcaagttttttttttttgtatgtatgtatcaatgcacgaaaacacatccaaactctatatttactaggtacaaacactacactttgtcgcaaactcaaaactgtgttttacaaaagttgcaaaaatcgaactttaattaccaaaacactcaaacccaacttctactagctagtttctctaacaaccaattgacttgatcaatagacatgtttgtaagaaaaacctatattcccttcacacacactcatattcagtagcttcatatgaatatatcagtccaaatatcatatgcaaacagcaaatagaccaataaacaataggtataaaagttcttactgtaacttcacgagttgaaacagtaaaagttatggcagttaggataccacaaggcacttcttcatcttcatgcaactccttccccatgaggccagatgacctcatacctgcagcaaaatatcaagccacctactttaaattagccaaaatattaataataataataataataatctaggcactaaagcaataataacccgtttgaaagaacttagtagaagcaatagtaaaagcactataacctgcaaaatcaaggccaacccagaaaaccaacccctctccttgttgcagtaattatcaaaagaacaaacactctcaaccacatagcaaaagtttaacatcacatgtctaatttctttactttttaatagagttgcagggcaacttttcaaaagctaacaaacccataactattcaaaccaatcaaccaaacaagtacactgactattatcttacataaaccgatgggctaaaattatttaagagagagagagagannnnnagagagagagagagagaaataaataaccagccaacaatcatattgcctttgagacccaacaattatagtacagatattagtgaaaaaccaacaagaacacaaaagttgcaaccacattgtacaaaactctaatttttcactcagaaaagccaatgatcaatcgtgaacatgcagagagaaaccaaaacacaaacctccatgcacattacaaaagccttcaatatcaaaaacccatcaaccccaaacgcatagcacagaaaaacacccacaaaaaaaaaaagaacgatcaaaccagtactcaaatacaaaagttaaaactgacccagataaacaaaacaacagaacattaatcatccgtaacacaatcatacataaatgcccccaaatccaaccaaaagaaaacactcacttttgtttgatggaggagaaaagaaagaactttttcaacagaatcttgtagagttatcaagtgaaacagtgagagataacccacctatctctctctctctctctcgtttctttaatgtatacttatatcgaagaccagagtcttgattattgtcgttttagagttaagtttcggtaagtgaatgaaacgacatcgataacggtgtcgtttagatgagtcggtaacagagtcagagagaaacacaaacaaactagtttaacgccgccggtctttcgagcttaaagtgaaagacaaacactgatttctaagaaccggaagaagaccgaggtcgataaagctttgcctttttaagttgtgtcagatataatataatataatataaactacataccaaaaatatttcttcataattaccaaaatgaccttttattataggacatttcgattttcgaataggattcttttttattttttgttttttttataaaaaataataataatctattcgattagaagtggggataatagtttgaggtgatagtaagtaatagaggataaattatttatttttatcttaggtgtaataaatagatcattgaatgtcaattttcattgaggatgatgcattaaggaagagaaaattgctgaccatcacattcagaggtttccattgtgagaacttgtaatgtactaacactccatataatcaaggaatgaagtgtttttacttagtaaaaaaaagaatgtcaattttcattcattgacaaaatttgtttgtgaaaatattgagtttttattactagatgaattcaacttttttttttttatctattagtgatgacaatagtaagtatgatggaaaaaaaaatacaaaatttgagacaagtgataaaattttcttgctaagaaaggaggggaaataattctattttaagaaagttaaccgtcaataacggtacgattaggggcgggaatgagaatattcttgtcttttagtttataagatactaccgaaaataacgataaaaaataacggtaagaatgagagcgtcaacaaaaattctcgtctttcaatttgttataagatttatcaaataataacagtaaaactaactgttacttaatttaacactttacatagaaattactaaaaaaagattattaagatcaaattttacaattaaaaaaacatcatactatatgtttagcaaaaaaaaaaaaaaatcacactatatgtagaaacaaattattctgtgtataatactgaatgattatgataggtgctatttttcaatttagaaaatattaatttcaaattttataggaataattacattagacaccatttttttataaaatatttatatttttacgttcaaataatgtgttttttacatttttacggttttttaaaaataacacgaaaagaacataa

SEQ ID NO: 14049 - DNA, 6786 bp, Cannabis sativa
caacaagatttgtattttctccatatttactaaaaattatattaaatttgacacaaaatatagtatggactaaatttacactacatcatagcacaaatataaaaacaaccaaaaaataacaaaaataatattatgaaaaatgtaaaatagaaaaaaaaaaaggttcttctgtaatgcactccttatctattttgccataaaaaaaactagtatagttttttcatagtcatatatgttatagttatttaaaatgtcatgtaaaattttgagaggttcagaataatttacaatatataatagtctatttcacacgcgtataaaataaaagtgtcacgtgtgaaatagattgcttaaactatgttttcgacatgttaaatatttttaaatttaaataactacaacatacataattataaaaaaattagactaaaaaattttcttagggttcgtttggtatgccgcattacatcgtattgtattgtatagtattatattaaactgtattttatgcaatatttttatataaaattatatgtggtattaacttttataggcacctaaatatataacattttagtataaattaaagtttaacataatattatataaaaatatgataaataattcaatttaatataatacaatacaatacaatacgagttaatacgatgttctaaacgaactcttaaatgttaaaatagataaaagtgtatcaatacacctacatttcaaaagtgcatcgtagttattttcgtgtaattttattattattttcagtacacgcaccttacgacattacaatttgattttttattattatttagatattaaaatcttgttaattttatataatttttttattatttttgtgttatttttttataagagtataaaaatgttaaaaaaaatctttaaatatgaaaaaattacaaaagatagtaattattgtaattatctctaaaataaactcttctcttgaagatgaaatttatgatggattgattgggttgggccattcaaaatctgagagcccaagatacgattacgaagcccaaacaaatcaaggagtgaaggtgcatcgtagttagagtgtaccgccactgtagctaatagtttctaacctttctcatgcttaaccctaacattgaaataggcctttcgagctttttctccaagaatttcttccccaaaattctccattgggaagaagctcagattttagggttttatattcaatccattcttacatcgcatattatccataatcactgcgcaaaggtacgttatttcaacattctttccttaaagattttgctttattttcatatttcttggggattcgtttttattttacttgaacgtaattttggatatggttgtttaatttagaaaatgcattgtttttgatattgaaattaatgtgtttattttgattgagaaattgttatgtaatttatgataatcttgtgttttgagttgtggagttgttagttatttctataggtatttggaattgggttactgtttttgattgttgggtttgttagttaagttttcagtgtgttattatggttaattttgttgttgaagtacagattggtcttatttctttagttgttctaggttttcaatcggtaaaatcttgagcatggcaactgcagagcctgcatcggtttctactggtccgcgatatgcacccgatgatcctacacttccgaaaccttggaagggtttgatagatggaagtacaggtttactttactactggaaccctgaaactaatgtaactcaatatgagaaacctgctagcgcagctccaccattgccagctgggccaccaccgacggcagctcctacgcctaagttggctccaattccggtggctcattcggtttcgcagcagaataatggcttatctcagtatgggcagcaaatgatgcaaggaactcagcaacagccgcagcaagggaaccaacatggacatttaatgccacaacaacagcatggtcaagtgcaacaacatgggcaaatgatgcagcatccgtctcaacaaatgcagcatcaaatgtatcagcagattccccaaacttcaggccatcaaatgtcccagccaatggggcaacaaccaccacagagtcaaggctcccaaatggctggaccaccacaaacacagcaatatccacatcagccaccgttgcagtatatgggttataatcaacaaggcatccctcctcaagggcaccagagtacgcagcagcaacaaactcagcatggccctcaagtgcagacatttgcaaatcaacaagagtataactcaggatactcaaaaagggaagaagatgattttcaaaacagaaatcaaattgggttttccccttcccagtttcagcaaccaagtggctcaggtgctcagaattttccttcaggagctaattcaactcagatgctacagatgggtcctcattcaggtcaggctcaacagtttggtggcactttgcacaatatgcaacaacctgctgcaatgggtcagttgcagccagctggtactgattcggtttataacccacatggcagtaggctacagaatgagagagacccatcagcaatgcatggtccgcaggctaatatgcctcctgttggattaagaatggggcatgagaacaatatgcagggtagaggtggaaacgactacgtgtttagtggtaacaaggaaccaccaaatgttggacctcagcaacccaagcttgcttccattccagggcccagatttcagcaggtatcttttcatcgtacttggtttttatttattggtttgactttcctagaagctaatgatgtttgcttgtttcttgcaggacatgaggaacagcggagctccatatccaaatgttgctccaaaccaggttcctcccattaataatggggcaggacatccgatgcataatcatgcaacaggtggtccaccattgccaagtaatgctacgatgaagcctcctttctttggaaatactgaagttacgaacttttcgcccgcagaaatttatcgtcagcaacatgaagttactgcatcggtatgtatttgtgctagcttaggtgttaaatagtgttctcctacgatgtaagaagttgatttttctttagtggtgtttaaataggataaaccaagtgtagatcctggcattttctaactatatttttgcttgctttggtatcctagccatcatctcatttgttgtgagatgtttagtggtgattgaatttattatggaatgagagcaagataaagtctgtatttttgccttcttggaagtttaaattgtacgagttattatcatatataactactcataacttgaatgtttatattggaatttttagggagacaatgttcctgcaccatttgcaacatttgaggctactggctttcctccggagatattgagagatgtaagtttgttttgtaccatggtttgatgttatgattcttcaaatcctatcaaggaaaatcgcataagctagaatgagatcccagtcccttccttttacatatactgttgttattttacgtttcatctgaacttattagttctcacttgtcgcaggtgcgatatctgctccggagggggagcatatgtcgtacgctgcaatgctgttggcacacttacacgtgcaacaacaactattctgattttttggaggctgcaaaatgaactgttggagcctttcttgtgcatcttctagaagggtagttggccctttgtccaaatcacacctgatgtgactgggatattgcttctaggctcaacctcttatgtctttatttccctcttttgttgcctcgagttgcttctgtaagcaaccaatacctatgggcttttcattttggatttttcttgtcttgtagtttatttgttttgttttgtttgtctctgtttttgtttctttctatgtttgtctctgttttagttctttcttccgttccttccaaatatttagcaaatttgtaggtcatcattctagaattgtgttatttttcagatttattctgcgggattttcgactcccaccccaattcaggcacaaacatggccaatcgctcttcaaagcagggacattgttgcaattgctaaaactggttctggaaaaacattgggatatttaatgcctgcttttatgcttctgagacaacggcataacaatgcccaaaatggcccgacagtgttggttctggctccaacacgggagcttgcaacacaaatacaggatgaggtcatcaaatttggtcgatcctcaagagtttcttgcacggtgtgtacatgttaccttattatttgcgacatcagctgactttcccatcttgtttatattttttattgtgttttgatctcgtgattcagtgcctatatggtggagctcccaagggtcctcagctaaaggaattagatcgtggtgcagatatagtcgttgcaactcctggtcgtcttaatgatatactggaaatgaagaagattgattttgggcagatctcacttcttgtgcttgacgaggccgatcgaatgcttgacatgggttttgaacctcaaattcgaaaaattgtaaatgaaattcccccacgcagacaaactctcatgtacacagcaacatggcctaaagaagtaagaaaaatagcgggtgatcttcttgtcaatcctgtccaggttaacataggacgtgttgatgagctcgctgcaaacaaagctatcacacaggtgagaatttgaataaaatatagattttttttactgcattgccaaattgcaataaagaggacttttcggtgattttggtacgtaatttgcaacttcacaaaatgatttttctttctttcttcacctttccaatctcacagtatgtggaagttgtgccacaaatggagaaacaacgacgtttagagcaaatccttagatctcaggaacgaggttctaagattattgttttctgttcaacaaagaggttgtgtgatcagcttgctcgtactattggacgaaatttcggtgctgctgcaattcatggagacaagtctcaaggtgagagagactgggttttaagtcagttcaagagtggaaaatcaccaatattagtggccacagatgttgctgccagggggcttgacatcaaggatataaggtgagcttgcggctttcagattcttttttcttacaatacgaacctgttcaacatttattaatgtattgtttcaaaggtatatagtatcattatcaatttattttgtttgttgttgtgttacagggtggttgttaactatgatttcccaactggggttgaggactatgttcaccgcattggaagaaccgggagagccggcgcaactggaatggcttacacttttttctccgagcatgactggaaatatgcagcagatttgattaaagttctggagggagctaaccaacacgtacccccagaagtgagggagatcgccatgcgcggtgggcctggctttggcaaagacaggcgttttgattctggtggaggtggtcgtggtggcatgagagatggtggtggctttggaggtcgtggaggaggcatgagggatggcaacttcggtaataaccatggtggtatgagggatagtggtttcggtggccgtggtggccctagagatggccctatgagcggctttgggggtaggggtgatttctttggtggccgtggcaacaggggacggggatttggaagcccgggcggtggtggtaatgttggttttggtaggaatgaacgtggtgggaacgatcgatacaataatatggatgtgcgaggacgtggtggccgtggacgaggacggttcgataatagaagagatgttgctgctggtggtaggagcagcagaggcagaagttacagccgtagccccgaaagagttagaacatggggttatagcagaagcccaagccgtagccgcagtcgcagttatagcaggagtagaagtagaagctacagcagaagccgcagtcgtagcagaagccgatctcgcggccgtggtcgaagtaagagccgcagcccaagacgaagcagaagccgaagccgcagccgtaatcgtggccatagcccaagctacgacaaatacgaaaatactcgggaacgtccctccgatcaaaaggatcccgcacctccagtggcggacctcacgactcctaccgagacaaaaacttcatctatgtctcctggtacacaaggcactgcatttccagaagaaaccgaggccgagaagaataccgagccggagaagccaacggtaggagaaaacccggaaccacaagaggtacaacaaccacaaccatctccatcaattgatcactaaacagttttaagaactaatgagatatctgatgatgaccaattgtttataagaactaagttggggatgatttttggtgggcagcaatgggagtaaagatcttttcatgttttcaagttccaaccattaattctttttgtcttttttcataagtagttgggagattgtaatgtttttttttttttttgttttgggaatttgggatagggaaaatggtaaaacctcccacctaaaacttgttatatgtgattacattttgtgacatttttcattgattatattatgaggtgaaacaatgatttgtcattttatgaaccaaagagatacagaattgaaatcaacaatggccaaaccatttcatttcactattgaaacaacatttttaacaaatgtttggatccaaaattcgaaccataaacaaaaataaa

SEQ ID NO: 14050 - DNA, 10414 bp, Cannabis sativa
atttgttttctgatattcccatgaaatttgtataacctaacttgagggttttcatttcatatattattatattcctaatcatctccacaggaaaattatacttgtacctaaatttgtaagagtaaaactagtttgatcgtttatttaaatgaaacaaagatacttaatatagtaatgagaaatgacattgacatgtcttaaaatttctcagtattattagaagaagaggaacgtgtgtacttacgacaagtggaatgaagcatctctataaaatagtactagctttgtaactcaaacttccacaatcttggacaactcttcacgtgtcccaaatagtgtttggaagcatgtaatttaattttggcattttgtgtctattggtttttggctaagatatagtttgtaaaagccatataatgagacaaatagtcaataaatgcctcagctctggcatcactggttacttacttgtgaatggtaactcagtctagttaaacaccggtttaacttcaaaaacaaaaatggtaataatatgaaactctcttcaagatttgaaattgtataattaaaaagaaaagtgaagtaaaacaaccccacttcttacaatatagtagtagtagtagcagtatttagccaaccttaattaaccgtctaagatgagatttagtcctacaaattacaaatccagatcagtcattaatagtagttaagaggtcctccattgcagttcaatttgtatctttccattcttggaatcaatgagatggtacttctcattaattcttctgttgctaaccacatcagctagttttatatccacataccccagaacttcctgtttgaaaaaaagaaagaaaagtatagaaactaataagagggcttcacattatcataaaatacagatagaacaaattgtatttatttaccttgggatggagcaaacccattcttgaagaaacactaacaacttcaacatgaagcttatcattggtaggaggttcatccagtggaaactgaaactcttcatcccatcttggatcccggttcttcttcacatactacattataattattattattattattattgttataaaacatgaaactcagttcaaaacaatacttagttccacatttgagctttcataaatatatgacaagtaacaagtaacaacatacataccttagtttttctttcctctcctctgaaaagcaatctggcatatggattggtgtggtactttccttcaacatcttcagcttcatgaactataattacaagtaaaccaccacctgcaggtgttccttcaggtgccttttgtacatcatttgaatcttcaacattatcaggcatttcatcttccttgaaaggtttgtatgtcatctccaaaacaatctgcccacgaaacttgtcgttctgagcatcatcttcgttcatgtttttaagtagatccaatgtgagaaccttagactcatccggcgtgaggtctttcaatggaacggtattcaaacccatcttatcatgcttcccaaccttagaattaaaaacacaaaaaacatcacttgaaaaacaaccagtattgctagcattccacatatccaaacaatgcaaacaagaaaaaactcaaacaaataatttacctgttcccagtcataaaccattatctctaatgcttgagtttgggggtctttgataaccatgttaaattcctcgttccattcgggactcaaagatttgtgcttcaccgtagttttctttccaggaagcacatcctcagttaacttaagtttaacataaggatctgctccccccaaaaagtctttctttttaagtttcaaggctctcacaacttttacattcagaattccaacaggtctccttgcagctctgccaaaattaagcaatgccatcaaattataggaataggtctaaggtatggatgaaattttatgatttaatcagggggtgaaaaagaaaaaaaaaatctaacttcgttggatccataatttgcacttctagagctttgggccatagatacatttttgcaacttgatctttaatcatctcctgagaaaaaccaaaaaaataatagaagaaaacagtgtcaaaaagcaaaatgaagcacctctgaataataaactaagcacaaagcaatgaaaaagagaagtaaaaaactgcaaggaatattcatttagttattatattaggagaaatatgtattctcagataattatgtttgtctatattagatggatgcatgttcaactaagtctaagcctctacctggacaaacccatagaggccaggaatggacatagcatctgcaccaagtacttttaatccaaagtcaacatgtggctgcaaaaaacattggaaacaatattgaatgaaggattccaagagaaataagaagacaagacaggaaaaagagtggcattctattaaaaaaaagtgccatcaaattgtagaacttgataagaaaatttaccaagaagaaacagcaccattcttataactctaccaagtaaacaaatgcccttttgccccaaaattaccttaacagaggaccggagatttttgacaaacatgacacgattacacgattcaaaaatgacacacaatttataggtttgggttaaatgtttaataattgtgtcgtgtttgagtttatgttttcaacatgttaaattaatcgtattgtatttgttgtttaccttaatagtattgtgtcataattgtgttgccatgataacacataagcttcttaaagttttacatacttatgtttaatcgtgtcaatttaacatattaatcgtatcataattgtgttatcgtgtgacatgctaagataattgcatcgtattcaagtttaatatttggacacgttcaataattgtgttatgttagtgtttactttcatcatgttgtgtcataatcatgtcaatacgacacaataatacgaatcgccaattctaccttaacattagcagtaaagatatatagatccgtaccttctccataagggaaacaagtattttcgcaaaacaaggaaattgtggaaccaaaggcttcagggtaacacgtggaagagcaaatacttgcagatcaacaacctagagcattgagaagaatcggtaattcagtactctaaaatgttgaatccagagctacatatggttgatcatagttaataagagaatttttttcaattccaaacaaatacctgaactgtggctctcaaaccaaatgctttaacagcaaccatgatgttaggatttccagcccatcttaatgctggttccattatcaactccttttcatcagttacatacactttcattcctgatatataaggagaccaagaatgagcagtgccacaatcagcaatataaaattaaaaacactggaaagtacagaaatcttattgtgtaagtgtaactgtgtctaccaaaaaacaccacaaacaacaaaagatatataatgaaccagcagggcccaaaataggctccaaagtatgccacatacagctccacttgactctagcttaagtagttaggtgtgtaccttagcaggtaatttcaaagaaattggttaactacaaattgaagaaagcatcattactcatatatggaagaaatcttttaaatgctgtttttgacaacatttagtttgaaacaccaagtgtaaactccatctattagtatgttgctatcagaactttgataaataaatgcaaatgaaccaagaaccaatggaggtctgatacaaccacttgggtagaactacttccaaaagctagtctaagagaggagggtggtgcccaagtagttatataccactagccaatcccattctcatacttggtctacatgggatcctaacaatacaccctcttttggagccaacattcacggcagtccactctacggtggcctaatttgggcctaatccacaggttgccccttttgtgacgtcaatcctacttgagagtgcatggttcttataccacttgatacaaccataactatttgggcaccttccttctcgaggctaacttttgggagtgagttccacccaagtggttgtatcaaggtcacccattatctattcacaactcagctaatgaacttctagtgataaactatcttttggttcattggtgtctatgagtcagtgctagaagtgtggaatctaaccttgaaatgtaggtggtagggagcccaaggtaagtgcctcgaattcaacagaatcaattttgtattttggaatctgttcttcaataatgggcttggctatagtctgtgcggttttgcagatggcctgaaacacataatatagggagaaaacaacaaaaagaataaaaggtctatcaatactccaaaacaacaatgaaacctatacttcatataccttgtccagataaggccacatgatttcaataaacctgttcagccagtcaaccttcacataaacaagcaaattagaaccttaacatatgagagtgggaacttaagcattttcgtatatcatcaaacatactcgatcataatcaggcattttgacccaaagtggtatcaatgaaagtaacccttgaaaagttttggaatcttgctcccccagaggctgaataacaggatcctggacacatatataacaataaacataagcaaaaatctaacaaacctacaaccaatagtagacagcataagttctacgaatttgtaaaatttgatcaagtaaatgatattaaggggaagagacaatagtaaaccatgaagtgaactttatgttaagctataatagaacctatgaattcaatttgattaatcaatagtaccatccaaaatgaccgtaaaaaatagcaagaaatggacaaatatcctaaagggtcttcttgaacaagcttaataaacactcttagcttcttgtttccattattgacactgccactgcgacacatcaccaaattcgaaaagtattctagtacaagtacataaatggcctaattgaaacaaactaaaaaagaaactatgaactcaagatgataacctaaagtaccaaccaaatgactgtaaatacaagcaatggacaaacaacctaaagggtcttcttcttcaacaagcttaacaaacataagcaactattctagtacgagcatatatacaactgcataatccagaaaattacgttcattaataaacacacacacacacacacacacacaaacacacaagtggagaacagaatactaaaaaaaaaagtgtgacaacaaaccttgacatcagttggctgaaagtatatgaacaagtagtagccgatcacaagcccaattgaagttcccactccaaaaccaaaaatgcccattatagcactcaaaatacccatctcagatcttcagtcttttcaaagggaaaaaaagcacagaagaaaaatatatcaaaccagttgtaagaaaacccagaaaactcacaatcaacgaaacaaataagaggagagaaaacccacaaatatttgtgtataaagttttaatctttcccttagcagaaggataaaagttgcattaaatgaagcaattaaaatcttggtggccaaggattttgtgatgaacgagaaaagagaaacgatcacagaacagaacagaacaacggatgcgaaaggaaagtttagaatgttttgtgggattagtaagtgtcggtaacgcttagttggcacattttcattggtccaatgctttttgaaatattattattttattacaattagagagggaagggatattagaagagaacgaccaatataaaattttctgctatatttattttatttgtttattttccgtggatgtaagatattgggataataataatattaatagttgaattaaaaacgtgtataggaaaacaacaaatagttgcaattttggcttttaggtgtttcggcaaaaaaacatttatttatttaacgttattgacttttattataaaaattaaaacataacataagaaaaggcataatcatatagttttatttttattttaatttaaaagaaaaatgaacaaacatgtatactttaaaagggacacaacatcagtttactttgaaattaattgaaatttgaggttaggttgaaattttggggttataaattctaagattattgcacacaatgtaccattgttgtattgtttgtatgtgtcaaataaaagtcaatcaaaattcaaattaacccttttggtcaatcttttttgagttgttgatgaagagagtacattgctttaacaaggatcaatattggtgccaattaccagaaatataatagtcggggaacaaaaatggaaaattatctaaacccccttttgattggcttaaaaggctaaacaaaattaattagttagattctacaatgaaatcatacatagtgctcttctagattgggcccactactgatgggtaggcccaaacccataatgaattcaattgaattccttcgcttaggtaggacacaaataagagaaagatgtttaagcacatcacatgtgagagagaatcaattcaatgggaaaaaggagactaaaatatcaagcaaaggataggatgctttatccctgtggtgatattgaatggaaatgtcaacatcaagtgttaggttgtgtttgattgaagaaaacacacaaaaataaaatctagggtttgaaaccattttctaacatctatttattattccaaaaaccatttaagccaacaatttcaatagaagtgcttatattaatgtttgtcattaagcagggttacatttgactatgcatacttaaattaagtgtatggttttattatatgcctccctcttaaatatcaaaagaaatatgctatattcttttttagtactaattttactcctcaaataataaaactaaaccccaattactacctcccctctcattcctgtcactctctctctacaaagtcacacacaacttgcgagattctgcattgccggagcaccatttgccggagtccatcaattttgcttgacaaccaagtgtctaggagcaacctaagctccctgccaacataatcttttgaaaaaaacaatgggtatgtaatttatttagtaattttattggattaagttatatttaattgtatttaggttgaaatgaatagatctacacatattattcttttattttgattgtcttattcctaaaactcgagcttgcgaaattctacattttttgggttttttttcgagttttagcgataatttgtgatatatagcgacattagagtatgttgaaggttagggatgacttttcacgatattttgcgatatgtagcgattaaattcacgacatgggccaatttatgctcaccgtgtacgatttttcgatgtctgtcgacattgtttacaacatctggagatagtttagagttatatgttggttaagttggggggaattttgtcgacatgttgcgatgttatgcaacttgcttgtcaacaggatttataatttgttgcgacataacttgcaatatttctcgacatatttttcattaactaattttttttccttctctttcttttgtagattcaattgcatttgtagttgtactgtataatggggcttggacagttgaacgtttcaactgaatattcaataacccaaagagtaagatgttattgtttgaagttgacactactttataaaagatgcatgaaattttgtatgaagagttggatataaacattcttgtgtatgaactaaaagtagaggtgtgttacatgtacatgaaagacaataagatacagttgaaggttttagtgaaagatagtcaagtaagattgttcttaagaatgaaggcaaaagtgagtgtggagaacttgttgccactgtttgtgactaaggttaagaggcatgtaattttaagacctactctgccaactatccctccacgaagtattgttggtacttttgtcccagaagcagattcagaggtagatttgaatgagcaagcccctactaatatagatgaggacatggctgacaatacatttgatgagtttgatgctcccttttataataatgatcctgtggtagatttaaacaaggatggtgatgtgaagttacaagttgatgaagttgtagaggtacctactttgagattaaaactacctctaaggaactacaaagtgtttgaatgtttacacaacttgtatatatgcttcgaaatatggaacaacatagattggaaaagatgaagttgtatcattgcacaactcatttaagttcataaagtgcaatcaacttttagtctgaactaatttacactaaagaaaatgtaaaatccccaaaagatttcaaatatatcattcaccaaggaactaacatcacccttaagagaatagaaatgtatgtcaatcaaatattagaaacagaaaccccaaaatgcaatgacagaaaatgataaattctaaacaaaatgattaacagaagaaaccaaatataacccaaaaccaacaaccaatgaattcaaagaactaataaataagtataatcaattcaacagtatataattacttcttctacacaaaatcaagactcttacccatttcataaatgtgattctttcttttctttttcttaaatgtttcgaattaccgtgatgatacattattattcattgatcaaatcatcaaaacaattcataatcaagcaagctctaaatcatattcttctgggaagccatttctacctacaatcaaacttcagagaatgataaagaagaattccattttcgctattatgtaactacctaagctcagtataataagaatggagagggtttacactgaagaagatgtaaaatcccttaatattgtggtacatccatcatcctcaagagggtagaaatgtatgaactaacaaagtaaattcttgaaaatctatatcaatcagatactaaacaaatggttaacagaagaaaccaaatacaacccaaaaccaacagccaatgaattcaaagaactcataactaagtataatcaactcaacagtatatgattacttcttctacacaaaatcaagactcttacccatttcataaatgtgcttttctcttttctgtttcttaatcgaacttctcttaaatgttttgaattaccatgatgatacattattcattgatcaaatcagcaaaacaattcataaccaagcaagctctaaatcatattcttcagggaaatcatttctacctaaaatcaaactccattttcgctattaagtaactaagctcagtatataataagaatgtaaagggtttaagggtttttactatgaataatatatgattgttgaagaaattaattaatggagaggaagagattgcggcaacacaccgggaattttgaggatagaccagatgagctcgacggcgacggcgacggcgacggcgaccaaaacaggcggcgcgaggagagcacggcgaatgaggcgagttgagtttggcggtgaggtttaaatagtaatgactgatccaaacatgggattggaattacttatccttattcttattgttaattattatgtgccaaacatgggattggaattacttatccttattcttattcttatgtgccaaacaggagactagagctaatgacaaaagtctaaatggtagactagactagagttgtgggttgtatttggctaatttttttttgtataagttttctatataaattatttgatttttataaaaaatgtaaaaaatgataatatttaattaatgaataaaaaagaattttaaaaaataaaaataaagctaaagaaaatcaaacttattttgaaaaaatctcttcccttttgaatgagataatcacccaagtctttctttataattttacgggacctaaaaaaaattaaaattattagaattttatctaaaatggtacaaaataaatagtacgttttactcaattatcgataatattctttttaaaaaaatatatttgaaaataatttctaatacgaatggttgtttaaaatgtaattgtcataaaacttctaatcgagttattattatgttttattttgataaaaaatcaggctaggtactattttgttctattttttaatacacatgattcaatttgtcatttaacaacacaaatagtctaatcgataatttttacaaaacacaaagtttaaaataatatttacccttatttaaaagatatgtgatatatttttagaaattactaaaaaaatgtgtataattaaaagcagtgacggacccaggaattttactttgtggggcctaatttatcatagaaaaatatttatagctacattataatcacttttactaaatttatctaattttgtgggggcttttctactattttggcctata

SEQ ID NO: 14051 - DNA, 5040 bp, Cannabis sativa
aatttatattaagatgattcgtatgttgtatatgagtagtaaagtttcagtgctcagaccatttcaggtagacctccaccagcagcttccatggcagttggacagtttttcaatccagaggaaggaaagctggatgtctctccttggttcatgcttcaatcgtcttattctcacaaggttatgatctttctggaactgcttgtggaattgagctgtcacgtggataattaagtttttcttgtgcttaatgttatgcaggaaatgtttgtgaaagaggaccatcctcttgctttaaatttgtctttcagcgttagcttaggccttcttcctgctaccttgtctttgaagactgcgggatgtggaataaaatattctggacttccagatgaggagacagaagatgttgaaagtaatactattgacttttttttttctgatgaaaaaagtaatattttacaatagtataaagtaatactattgacttatttcgtttagaagaccaatgtttattcatttcttttcttttttccctgaagttcctcatatagcattttgattcatttttatatttcatgcatatggcttaaaagattataatgttttactatgttgcaaaagcaaatcaattaactattttcatttttttttctatttttatgtaccaaaaaagttgatttgaaattttcttactgtttctgcttgaagattgtcaactgcatattacccatttgggattttataaaagtcattggtcttttaatctatgtacttaattctattgattgtacatgtaaaggttaagtataattgcttaccatttattttattgtgattcttctaaattagagatttctttttgttacagagctgtgcaaattacggtgtttcccacctgtagcatttgcttgggatgacacgtcaggtcttcacatatttctaaacttattcagtgagagaattgtcgttgattcttcaccagcattgtggagttcagcctctagttctgagaaggcaaatgttctgttgctggttagtgtttctaccattttctcccctagaagattttcttataagtttattgatgtgctagtagttaaatttgattaactcttctgcctactctgtttcctctcgcaggtagacccacattgttcatacaaaactacagttgcagtttctttcacacaagttgcaagtagatttttgcttgtatataattcacaagtgagttttgtacttagagacgaaatgattttttgcattgactgattgatttgatataaatgttttcccctttcaaatttttatgttttatatgaccaaagagcattcgtaaattaatatcagaagcttacaaaacacgtttctacataaatgagaaattgggaatgtggaaggttcacccttttctcttgatagttgatacaagctaaaaggcagttaaatgctgcaaaatggtccctatttggttatgaacttattttgtctattactaatgtcataaaacagaagagaaaagtcattagagtattgatatagagacatgaacaaaatgaaattttattatcttgtttaactcctctcttttctatcagttattggatcactttatgttaattacatttatcatgtcatggggattgttttctgcagatagttggcttctctgttgcagtcatcctttttgctttgatgcgacaagcacatgcatgggatcttaatctgcctataccttcgatgctgacggcagtggaatcaaatttgagacttccattgccatttttttgcctggcaattgcccccattttgtttgccttgttaatctccttcctaatgtctcaaccacttccaatggtttccagcttcacctttgtttctgtgatttgttatttactcgcaaatgggtctgtaatacttttgatattcatatcccaactggtcttctacgtagccgctgtcatacatattttcatcaaagcaaggttagtaaggttatttagagataatcttatcttcaatggcaaagtaaatattttctcgagcgaaaatcaaacaaattttcttttagttgtgacaaaattataaggttatagtgctgaagagtaaaaacaccatttctacaagtaataaaatatttcagtggtctcaatattgtgctaaaaatttgtagattctatgctataaatttacttagcactatataaatctggatgcaaattacaatgatgacaaatttaatttgttgtaggtggcaattatgggaaggaaatacatgctttggatttggtcgattgtttttaagtctgtctactagcctctcttcattgaaggtaaaacagttacactatatactagagcaagttcttacttgaggtcaagattcacctcgtttttcgtttatgagcaaattagcttattcactttattttcggtttcaacataacaggtggtgaggattttaagagtcaatccgacccttgtcactacacttgctgcaattaccttggctagcttgcttcatccagccttaggtctatttgttatccttttctctcatgttttgtgctgtcatactgcactttgcaggtatgctttgaactcgtatgccttattgtatttcataccgtagtattttgtacggattgcattaaacatgtttcgtacactaatttacaaaataaatttttgatgataaaataatttcgtcttatcacttgtttattgatggaggaagttaagatatttcattctgaaaaattgtatgactggtaactctaagtgttgcttcatcttcttgtaacagttttttgatggcttcgttttgcagccatgtacgaaaaagtgaagcatttgattataaaaaaggagatagtgcagagcaacttagcttcccatttgagggtacatttgaccagaattccccttcgaaagagggattctctgacagtccagactcttcaaaaacttacagtgaaacacaactagaactattccatcatcgacatggattgctaattttacatctcgtggccacaattatgtttcttccatctctcgcagcttggttgcaggtaaattacaataatatcaataacctttattgtttcatttgaacatgtcaaagtaatgtatgtgttggtttgcacagttcttactttttttttccctagtagtacaagaagagaaagtaaaagcttaaatatttgtttagttactgtttgaatagtctatttatttaaaagagacaagattagagatttcataattttattaaaacttaagaagattttcgaaaattcacccaaacactttacaaaaacttaagctctaggtgtgctttcaaagtcataccaaacaggcccatatgagttttatctccatttcaagatcagtcaatttctagatttttgtaggctctgcatgtaaattttggattcagttaccttaaaagtacagtatctcttgtttcagtagttggatttttcattgatgcacttctttcatgattacagagaatagggatgggagagagtctcccttggcttttggattctgttctttgttcaggtgtgatccttcatggcatctgcaattcaaagcccgagtacaattcctacatgttctctttccctggaatcccaatccgggaagtgaggctaaacgttatctacctcatcgctgggtactattcatatctttctggtctggccttggccccatatagagttttttatgttttggctgcaattggtgcaatttcctttgttttgagaatgttacaaagaagatacagggacaagggtgaaacacatttcgggacccgaaagcattcgcataggcactgagcaagcttcttcataaactatacatttgatccagaatctttcttctccttaaaattatgtttgcgataacaccaacttgatggaggtgggaagtttaattaacatcaaacaaacagcactcaaaagatttgctaatcagatttgtgacttgtgagacaaggaatcatcctccattggtggcggtgcaatacgtgatggggaggatttttttctctttcatttttcttggtcccctgtaaatgtatgggatgatagcattttcgtgtgccacagagctattcttacataatgggttttggttttttctgttactttaggaatgagttgttttgggagtattctttagcagaagaattgggaaaaaggcattagtttgtaacattttgtgttcagagcaaacaattgatattattatttgagaaatttaacaaagccattttgaagggttctgttctgtgtagtttttgtaaactgtttgatatttcaaagaataaaccttcacaagtatgtcaagattttacaatcagaagatctatataaaaatgtggtagttgatgccgcaagcacttgctttgcttcattttggacaaaatgttgttattacaacaggggaaattactcaacaaacttaattgcgggtgacaatttcgacggttgaattatagtttgactttctattcaaaaacattacttcattcaattaaatagttatatggttattttccttcaaaaaaaaaaaaaaaaatagttatatggttagtggtgttgtaaaatgagaatcaatggtctatttgcagttgttgtgaattgtgacagaaaatgattaagatttaggccaagatttattgagattatgatggtaatgaatgatatggtcttcaattttctgtgatgtaattctttctttgttcaattttggattaaagcatagtcaataaaatacaggctgccatatggctccacacacacacaacaaaaattaacttaaaaccatgcaattaataacataaatatatatatatatacatagtgcaaaaagttagcaagcatttataaattcatttaactgtgttattaaatctatctacacaaaaaaaatataataaatctatacataacttcatatcataagaacaaaaactacacctaattctctctcttcacccaatctaacaattcaaagttgtaaaatttc

SEQ ID NO: 14052 - DNA, 3091 bp, Cannabis sativa
attaagttttaatgagtaattagattttatattgttatacataaaatatatatataaatcattaaaattttacttttttttagtggatgaatctaatcaaatccaatcaatattatatcttaaaatattagatgaatgtgatctgatccaaaaaatactagatataaaatattaaataaattcaaattaaattcgtagatgtatatgaaatatatttaatgaatagaatcaacccaatatataattagatcggattggacagtaaaatttaacttccaatatataatttatatatctagatcaaatctgaataggcctaataatctaatgaacacacaataaatcaccttaaaataaatctcaaaacttttggcggataataatagtttctcatacgaaaaaatgaaaacacacaattttttttttgtttgaattgaggaatagccaagagaaaagaaagaatgtagaaagtggaggaagacaagaaagttacttgagatgaagaccagagagctgaaaagggaaagataaagatctgaagcagtgagtctgatcaaataccaaatcggccaggagaaaatcagaacgagccacgactgaagagcaactctgaactgaattagccattcgagatgacaatgccaatggcagccttgaagctttggccaattcaatttggtttggttgggtgactttaaaatataaaaactaggctaaaggtacaaacattatataaagagcaaaaaggaagagaagagagaagtggggtgggttggtgggtaggaactatactataatattagtttatgtcatcgatctgaaactggactctagtgattgttaggcttttggtcttgatcaacgatccagattagagaaagaaaactacgatgagagtagatttttctttttgaaagaaaattcaacgatgagagcagctgcttaattcaccgtttttggtaattagacgatgttgactatataggacaatgcttggaatatatttaatccagtattatatatcattagacttcttctcttgtaatatttagaccaatttttttttgtaataaatgtgcatgtgtcttatatgatatttaatgagacatcttaaaaggggtttaatactcttttcattggaatattgctattaaatattagtggtgtttaatatctcttaaacatgttgttttgcgtttgggtagtggtactctctaaaattattacatcgaactgatacttagttggaaaatgggcaatcgtatactcaatataccgtgtctttctcattcccaatttgattgtttggtgtggaaattcgctcaaaacggttggttctctctgttaaagaagcttacttgagggatcaagatcatcggcttggggcttatcatcagacttggaaattgatctggcatcctacactccatcctcgggtgtccatgtacctttggagaagtttaaatgatgctcttccaaccaaagcaaagttaccttttgtgagggacaaagattgtttcttttgccattcagcgatagaaaattgtcttcacctttttagggattgcccttttaccttgagcatgtggtttgctggcttatacagttgcagagttcgttgtgtaccaggtgaaagtttgggacagttcctgtggaacattttactcacttctcctggggagaatagatttttgttccttgtttatattggctgtctatttgaagaaatttggttctagagaaatcagttaaggttgacagggaaacaagatttgctcaagagatctgttatgaggatcaattccaagtttgttgagttctcgactgattatggggagagcggcccttcgattttcaggagcataatatcatcttcgaatccgatgattcttactaatattgactgatgcttcgtggtctggtaataaggctggtttaactgtggttatgatccaaaaagatactggtgtgtgggcaatgaattctcgtcaaagtgctgttcgttcggctcttgaagctgagattcaggcaattgcccttgcattgcagtgggctaaggaagaacattggggtcagatttctatcttatctgatgcgcaagttgctgtcaaagcctttgcaaaaacggattgccctcccgtttggagctgttggcatgtctcttttaatgttttagagctcttgaactcgttttcttgctgtaatttcttttatatgcctcgaatttttaatgtttttgctgattcaatggctaagagagttcaatgttctagccactatgctggtgttgttcaaggggaaggaattcccgctgtgattcctagtctatgaactgtgttgttccttcgaaaaaaaatatacataaactcaataactatttatacaagacttagatcaatatgttctcaaacttaaatcaaaatttactttacaaatatataagttattgtataaatttacaaaaattagtgtagtgtcgtttgaaccgcaataatatgatacaatataaattgtatcgggacgcactcttcgagtcagtgtcaaactccaattactaattagtctctataccctataccctttatactaactgggcaatattaacaattactaattagtccctataccctttcatgtaacataataaaattcaaaatcgtaaaccaaactaaattgcacgtttcgacaaaaatacaaactacaaccacacctcgaagtgtttcaaccgcatgttttatgagatgtggtgtggtgcaattagttttatgaacacccttaatttttttctctagaaatatatttgtttaagtgaacataagcatttttttttgtttgatttctattttttttttaaataattttatacttttattgaatttctaattatttttctttattttttaagatatcaatttataaatataaataaatttgattttttttcacaattatttattagtttttcaataattttagtttgatttttcaaaatgtgttcataaataaaataaagtctgaaagtatgtatatatttttgagaaattacctcatacactattttttaactttttttttttcaaatttatgttta

SEQ ID NO: 14053 - DNA, 2937 bp, Cannabis sativa
catatatgatatcattacattaatatgtagtgttatcataacttatagtatacctgttctgtgctcatcttttctcctgatttggtagcttgtctagcatcttctagaagctcagcatcttcttctgacctaacttgagaaaaatcaagtgcctctgttacactactaaacaaagactgcttattcttctttggttcttcttcctttttggctgctaacacactgaatttcgagctcttcttggtcagagctccattgtaggacttagatgagaattgggttacgtttaaatttggaaagaaattgcttcttggtggagttgtcaaagctgggagagatctcagtcccatgactatatgattgctttgaccccaaactgagtgagaatgatatatgattctctctttgcagaggtttggaaatggaggtggaagttgttctccttttattctcgtgtttgagttttatggttttgcgtattttgaccactagattactgccacgtggaagtgaatatgacgtggatacttggaaaacagtggtggttaagaaggaggctacgtggccctttactgaactaacaaaatttaaagggagtgtttggtcacgactgatacattccaaaaaggaaattgtccccaaccaaaccaattgaatcaaaaattaatggctagtggtaaatcaagattgttattactatttttatttcctactcattgtcttagttaaatttaataaagtttagaagtcattaattatgacttaactacaatgcatgacaaagtttcaaaaaggttgtatattggtggtaattctaaaatgtcatcacacaggacaccatcttccaatttcttgtctttttttttttttgttttttttttctctttggtaagggttaagacattgagatatagatacctgctaaaccgttttcagttccctctatagcaataagagaaagaaagaagaagaagaagaaactaacttaattacatatttttatgtggcctacacaatataaaccattccaacctcaagaagagatactggtgggactttgagggccacatctggaccccggcaattcctcctcaggaaattgtagccaaagttaatggctagcttcttgaacacagatgaaccttgctttgcctgaacatgagaatgtcccaatatgaatgcagttccagattgttgagcttggtacagatcttccagctcctcttgcagctgcatttcgatctcacgacggctattatctgcttctgaactctcatcaatggcaaacctcactcttctctcattttgaccaactgcttccatctctataacttctgtgatactttccacagttgggaaatcaactgagacactagctggcccaacagtctcctcaatttcgtaagtcggtgcaccagagaatgctactgttccgatcacggccaacctacactcacttgactcattagaacggaaggcatcatcgtcactgcacgagttatcctggtgtgcttggcaccaatcgtatctgataaagtctgcaagcttttccacaagctcggtctcaaaagaatcaatgtcctgatgaacatcccggtatccatatcgaacaatgcacctgtaggatcgatgagctgcagggccaacacgacccacaaggtacctctcggccggagtaacaaaggggacaggtactgactttacgcagacaaaaacaaggatgcgatggaaggcagggaggttggtgacaaagcgggagaagtttgcagggataccagaagtgagatcagtgaagactagaccaattccaggtactctggcgattccaaggcttggacccaaggccagaagccattccaaagagaccttgttgtggagatcgtattcgtatttcttgatggtggcgtagtgccaaacaaacatgatggtcatgaggaaaagggcaagaaggattgggaaccaggctccttcagtgaacttggtgagagaagctgagaagtaaagcaattcaatggagccgaaaaagagaaggaacaaaatagctaaaatagggggcttattccaacaaagtattatcaccaaagaagtcagacacgtggtcactagcataactgtcatcactgccagccctgaaaaaagataatgataacaaacttaataaacgaatatacaaattggtgagcagtcaaattaaaaccagagtagtattatttttcttatcatagttggacaatagcatcgaaactcgttaggcaagttgtcagagttgagaaaataagtttcagtgtttctcctaggagcctagtgaagatttacaagttacctgatgcatttcccatgtgtttagtgtctctaaatccaatggttacagcaatgcaaaggatcatgagaatccaattgatctctggaatatatatttgaccgtgaatcttgtcagaagtgtgaatgactttgactcttggaaagcaaccaatggactggctttggtttatgatagaaaatgttccactgatgattgcttggcttcccacaactgaagcaagaatagctacaacaagaactggccaccttacagattctgcatccaaaatttttttataagcatcacatctttcgtaatgagtacatatactagtcactactcacaacagaagtttgtaataaaaaaatatcatgtagcgagaattcaagtttcgtttcctttaatccactatcgaatgctacgaaaacattagtttcaattcatctcatcttgtcaaatataacagtactccataaaaaattgaagaatgagccttaccaggaactgagacataaaaactgatactatgactggagtggtgatgatgtgataagtaagcagcttggcccatgtatgccaaaataagtgctggataaaccagaaaagtgaaagcaatctgcagcaggagttggaat

SEQ ID NO: 14054 - DNA, 7044 bp, Cannabis sativa
  modified_base (887)..(892): a, c, t, g, unknown or other
ttactgattgaactaattctcaattagttttcctctttatttcaagttcaaccttaaaagcgttaccaatatttattttcaaaaatcaatcattaaaacttgtaacattttgttaacatagattagtcaaagaaaattttgaccagaacaaataatcattcttccactttaagtagatcctaagacgtgtcaaacattagaattaataaaagattatgaaattatttaattaggatcaaccttaagaaacatcttttaaaaaaaaaaccttaagaaacacgaagttatgactttagaaactaaaattatattcttaaaaaaaaaatcattcgttcctattttatttatgtccaaccaatttggaagcatcactttaataaaataaaataaaacatctggtaatctcagtttagtcaatattatctctaactctttttttttttttttaaaaaaaaaaaagattccaacagcaaacttttgttttgcaaataagcctcttgcttaattttaagtaaacttcattcaataagaccagtttattctgaattgaattattttaaaaattaagcaattataaaattgtgtcaattcaaaataacaaagaatccagtttttaagtctttttttgctttttcttcactctccgacttctccacacttaataaagtaaaagtttaatttaatcattaaactaataataaaatatttatttatttattttttaaaaaaaactaagtgtatgattatttttgattgatgataaggaaactcatgtgctatacatacatttttggaacaaagaatagacagctaaaaaaggcattatcaattgagatgacctggagggcctccattcatgctctttggtttttattattattattatnnnnnntattattattattatattattaaagactaattgattacaaaaacaactgttctgactacttggattgaacttaaaacaaaacaagcatgaaatgtcccaataacaaatgaaactcaataactcactctatacattaaaaaaaacttctaaaaatcttaagccaactaatttttattttagtttatgcaaatccaagatattggaagccttgagaaaattgttcaaacgccttgttcaacggtcaactttttcttcaactcttttttgttcacctacaattagaaattcagtatacacatatcagcactctcttctcaagaacacaatatacaaaaaaagaattacaattctcattcttttgtacctttcccatagcgttacgaggtagcgagtcccacagaaaaaggcgagtcggtagctggaaataacagaaacaactaattagaatgaacagcatatgtttctttacttaacacaagatgtcaaaacatcaagttgggctatttggtatactgacataaacataggatatatgattatacaataccttgtatggtgcaagtttgtgttgagcccaactaaagagttcttctaagcttattgcaggtcttgattcttcctctcttttcttctttgcttcagctgctggcacaattattgcagagacagcttcaccgtaatctttgtcgggtaggcccaacacacagcactcttctacagtcgggtgctgcacaaaacaagaaatttttttattgaaagtctttattaatattcaagtattttgttaactttttttggttgaacaagttgcagcattgttctttcttttgacactgtttagaaaatgagtctaaagaaaataagctgtagattcacctctaaaagtacagattcgatttctaaggcagataacttgtatccaccaaccttcatgatatcagcactggtacctaataaatagcattaaaaaaatacaaacccgaatcagaattagcataaaaaatttataattctaagtcacagaaatcatagaaggaaaaaggctctgcatgagaaacaaacaagagggaataatatctacacacataggttgccaggtagttttgaccatcaccatatttttttcttaaaggtcaccttatgcagtggcacaatgtatgaaaaataaacaaacgcaatacaccaatgataatgacagtgtagagtgggtatggtttcagaaagtttcttacgtcccaatatgacatagtatccatctacatccactttaccggcatctccagttttgaagaacccatcatctgtaaatgatgcttttgttacctaagttcaacacaactcagctgttcaatatacttttcatgtggaaacatttgtttgacaggaaaaaggaaaatacatgcgaactttcatgaatcgaaacataaatcgtcactcaatttgtaatatgagaatgtacctcgggaagtctccaatactctttaaataaggaagggcttctaacgcaaagctcaccaaccccggttgcatcgtctccattctcatcttctgcaagaatccttacctatcacagattaaacatcactacatataaatggcaaaccttggttgtacagcaggaattgtaataaatcttccctggttctacagttgttttaatactcaattttctctagttatataaaattaaaaattaccctgataataataatacttaaatgaatttctttctgaaaaaaagtgttccctttcacacattcattcatactgacctccacaccagggaatggttttccaacagtgcctgacttcctctcaccttttaagggatttgatatggccatgacaaactgaaagcatttaagttattgataaattttagaaaatttctggataaatataccatatatgattctttagaaagcaaattttgacaataaaaccaacttaatctaaatgttacttacttctgtcattccatatcgttccaaaagacgatgtcctgtaatggtttgccattgttgcatgacaggaacagggagtgcagaggagccacacatctaagtacaataagagaaatatcaaattatgggtcaattaataaaatctggccttaattagtaaatctgagtatatgacacacgaacaagcgagcataatagtcatgaaaatcaaagaataagaatgcagttaatttgagaagccatgtagctcttgactgcttagccaacgaaaataacacggtgtttcagcaaaataataaaaagtccaaaatgcattagttaaattctaccttgaatttacccaagagaataaaagactaagcaaccagaatgaatcctatcttcaccataacgggcaattaaattggggaaaaataaatcttcataggctcacagtaaattcaggagtaggctgcataccattagacgcaactgctttgcagctgaggcagaggcttccttcagctctggatccattgcttcataaccttgtatcaatcgagtatacattgttggcacctataatacacaaaagacaatcattaaattgtgcacaataatctgtgtactggttaagcacaattcaaattaaaaaaaaaaaatattaaaagagcatgctgtgcttaaaataatgatttggcacgtgacaaacaatgagattctgtctccatttttttttccttttgtaaccatgggtgtccaggccagcttgcgtgcacctcgcctaatcccacacccccctgccacataccaagagaaaactgccacaatggacatgtggggattgaacgtgtgaccgtgtgcctaaccaacacattccaagtatttacctctaggctaaccccttgaggttgtctccattctatgtagtgaaatataaaataaaaaccgtgaccataaaagctaaagaaaaggcacacttgcaagctcaaaagcataacatactatatggaaggatgaaagacaatggataaccaacaaagtgagaaataaacccaggtgggaaaaatcttatgtcattatcatgctcatttttgtcattatattgggacttactcctgtaaatacggttatacaatcattggccttagtttcagatgttggatatgattcacgccatctctgccagatacctcgtacactaaactttggcaagaactcaaccttcaacaacacaatcaaaaactattacaaccgagaccatgtaccaagtctgagctcatctactcagcatgaatttccagtctaaataccaagagaaatgaaagagcaataaaataaattaccgtggagcgagcatagagaggtgcaaataaagcattaaaaagcccatggacatgtaacttaaaagtcaaggatccatcaaactacacttttcttttgttttatatttattcaggttttgcaaaaattagatggatgtgtgtgccttcaatgctgttaaattgtagatgttatatataggtggaaggatatgatgtagtggtaaacagtgcaaaaattgatcagcaggtgtatactcccaagcttttgccaatgtttggacctgaaattgagccaagtgaggacaatggtcagaaaaacaattcttgagattcaggtgctacccttaattatatagccaaaaagtgtactgtttctttttttcataacttattacatacaacctgtgcgctaatactttgatgcgtatgaacaacccctttaggcttccctgttgttccactagtgtaaacaattaaggcaggattttcatctgcaacaaacgaaaatgatagcatatgagcaatgtgtttcttgtctttattcatgcttcttaaggacatgtattggtaagtattcagaagcatttacttgagatttccctattgagcaaaatgctatctgtgcttatatctccagtctgtcgatgatcaactgcaacttcctgtgaacaactactgggaacggacgggataagagaaaattgagctgatgtttttgcagcaattttttgcataagttcttgatgatcttcagtactcagtatcatggagatgtcctatcattagataaccactgactcatgttaagaccgattcctgtttaggaaatataaatgcactttccttcacttataatttactatttaaagtttcgaagagtaaaaaaattataaggattgaaatagaaatgcagtaaaagacttcctttttaagaataaaaaagtgtctaccatgtagaattatcaaaaaaattaaatttaaggcttatggttgaagaatttatagcagaccaacaataagaaaaaagcacaatttagtaactaacatagagaaacaagtaaaatggcgaataaagctctccaagtgcataccgaatcattcatcacatgcaagagttcagcctctgggtagctgagtgcaagtggaactgcaacaccaccacttagccaagtcccaagtactccagcaacaaattcagctgaaggtttagctacaattcctattcgagctccaccaagatgtccatgaccacctgcgccattgattgacgcagaaggtctagcttgtttgcctgcttcatgaatctaaattggaacgaaaaacaagaagccattcaatttaagggagaaaatagtttcaaatataatgaattgtatctttttttactgaatgagacagagaaaaacagtactagcaaaaattaaaaagaaaaaaagtcaattcttttctttgctctaaaaagtaaaatttaaaactcactgctttcaactcagtgccacataacaggctgcatatactctgtgcagaagaaatgagttgtttataactataacttttctgatcagctctaatagcaactccctcacgagctgcagatccttccttagctacttccttcaacacctccataagagacccagaatgtaatgctgtcacataaaaatattcagaaagagcattgaatcagacaacataatatcagtctcagaattcaatgaggcactcagcaaaaacaccaaacagcaattttttttcttctaagcagaaatttgttcactccattaaacttgccaaattagagaagaaaaacattggaaatcaagagctccatttaggggcgataataacaataataaatcataaatccaattcgcagcaatcaatcacttaaaacttaacttcaaaagttcatctttttcccttacatgctggaacttaaaagcataaactttcattagcaccacttcaattttaatcaaacaaaaccacaattcagacaaaagttatcaaaatcgatcaaattcccatcattggtcatatgaaaatcccaactttgtgtaaactcccacctaacaacatattcatcaaccaaagaaaattaggaaagaaccaagaaaacttacaagagaaaagacgagagcttgagaaagaaagaagagggttgttggtttttggggaggaaataagagtgagagagcacaaggtctttaagcttaaacgcataggaggcgagtaaaagcagagaggctttaggtggtggttgagaacttttaatgtagttgtggtggtagagctcattttttttagctggcgttgaaattaaatggggtcacaaattttggtctgtaaaaattgatggggtcactcagtaaaccattacgttgtcgatgatgatataaccatagccataggtacgaggtgtcgaagtaaggtcggttcggtttggcggcgctgtggttcaccaatccgaaatagagttctctaacttgacgttatttattcatagaattagtcaacatgaaaatatagtaaaactttcgagtttcgacattagagatgaaaagaaaatgcaaaaaacaattgtttttttatttaatgataacagttttgtgacaaaagacagaacagaactaattttttttaattggcttccatgaattcattctatgaaagtttttttttttctagggaatgaaagttcaaatctttggatttattccgtaccaaaaaaaatctttcacccaatacttttcctttttcatttttagggtaccaaagatattcaagaaacaaaaaaaaaaaaaggttagattagagcatctccaatgacacattaaatttggtgttacactatcactaaatttagtgtcaaaaagtattttca

SEQ ID NO: 14055 - DNA, 7546 bp, Cannabis sativa
tcccactatgataaggcaaatcctaacaccgttgctcacctagtcactcgtgacctaggtagcatgtgtggcaagatgccaacgccaagctgacgtgccaacccttctaatcatttctcattcgatactttctgaacaatctccctcattgcccaaggactcccatacgttcatagaccaatcctcaaggcaccatgccttcacgcatgttggtaggccttccagacaagccaccaaactagtaacatacgttagacttttgtctctttccagcatggtacctccgtctcatgcgcgtatgcaaactagtgcacgaatgactacctgtgtcatctcgtgttgagacttgtggccaaggcgcaccataacatctctcagaagtttaagtcacgtcccgtgcaagcgacataccggcaagccaatgaaaacatacctactaacctttggcagcatttttagacgcactataaggttgactggatagtgtccataagattccaacttgtggagacatatgagtcccttcgtgatcctcatatgcccgccttactagtatcactaactagtagtagctcacttagcaccaaggtgccaggggtggtggaaagctgacacaaggtactctcttaaggagcattctaagcttttagtcttttactaggaacatgtatgatttttgctctaaagatatatggtcatcactatataccaaatcacagagtttctcgaatctgatttcaccattatattcatagacccaaataaatggcaaataccatgtctcgtcccgatttagacaatattgaagttatttacgaaaatgccaatactatacaaactaagcatcagcatgcacaccaacacgcaccaccacttggtcaccttgtgggcaccacctagcttgtatcgtgccatcttagcttgcacgttacattgtgttgagccataaaagaaaatggattgtatcgtgtcttgctgtgtaacaattttatagggtaggcccagcacggctggcaagtctggtaatttcgtgccatgctcgaatttgtgtcctacaatattcgggccgacctgtttttcttaaatagaccaacttgttttcttatatggactcaaattcgtgctccatatttttacttttttattacttttgatgagctaaatacaaaaatatgtgtatcttttaattttaattagtagtagagtaatttgcggtataaatatctaagtttaactcctatttttggataattttttacggtaataatatctaaactatatttccggaatttctataggtacatgaccatcaagtgttaagttaatggtcatgtgacaatcccgtattgtcaaagtcattaaatttttattttttttaaaaaaaattaacttaaatataccaataagaaaatgatatgtggataatgacttaacagctaacgaccaggtacctacggaagttccagaaattaacttaggtattattaccgtcaaaaaataaacttagatatttatgcaaccgagaattaaacttagatatttactccgcaaattactcttacttttatatcatttttcaataatagttacacattatttaattattggactttttaatgtattatgtttttgagttaatttatttgtgtttacgtgttgtgtttttaaacttgtcgtgtcgtgtcgtacctaagcccatattttatgttgtatcttgcttaagctcatattttttttgttatgttgtattcgtacttttcaaaactcgtaccaattttatatcgtgttaaaaagttccgtccatatttacatcagtgagaaacactaattaattattataattattactactaaatggatctgacaacgtgaaaccatatcttattagtttagtatatattatggtgtggtagccagctaaaaacacatggaatccggtgtattgtgttttgaatactaaatttaattaatacccaagagtcgaataaagaaaaacataagttgtttttgctttgctggattcttgtgggtttgtttattattcaaactaaaataactcagattaattccaatccgatgacgactacacaaattccatcaagatcaaaaatttaaaacataaaatcattgaatatatattccttggaaaacttgatacttccaaattaaaaaatgagttagtgatatattcattcttaaattacacacaatacattgattaagatatgtaaatgtgaaaataataccataagatggataaattttttttttattgtcaattaattttaaagaacctcataattcttaagatgaaatctagagatacaaaccccgctaaataatatatatatcatttataataattgaagtgtgcacattaatgagtcctaatctttactatgatgctcctcctatcacaaaattatcactgtaaaaatttaactataatgctcctcctattaataatcccccctctcctactacgatagcacggccactgccattgccactgcgaccgccgccaccacggagcatcactccaattacaattggagtgctcattgaaagcaccaatccgttttttttatatgttttaatgattcaaaatcaaatctaaaacttaaactcaataatattcacttaaaacactaatttaaaagtttcaaatacatctatgctctaatttattggttttgtgatggtggcataaaaattaatttttagtccaaagttgatgataaaaacttttttgttagtccaaaaacaatgcttaacaatatttttgcaatggtggcatggaaacttatttttatgcaaaacaaaaaacgatgctttaatattgcttagtaatagtgctattgaaattttaagtttgttttacatcacaaatttaatgttctacacattttaaacatgctaatttcgaaaataatatactcattaataagaaaaaactcaaaacaaacatttaagtgaatagttatacttgaccactaaagttttaatcaaattttatcgcagacaatcacgaaaccttcaccaagtattgttctccattgtttatggccaaaaaaataaaataaaattttcatggcatcatcgttaaagcatcattaagcatcgcaaagtatcgtttttttttttttttttttttctcaactaaaaaataagttttcatgtgagcattgcaaaaacaacgttaaagcattattataatcaaaaaattgaatttgaaaacaaacaaatcgaacaaaaccaataaatcatacaaagattccaaaaccttcaaagtgaatactcttgagagttggtgtttcaacggtgatggcaatcttgaggtaatgttctgcaatcgtggggggagagagagagattgttaatgggaggagcagcatggttaaacttttacaaagtggcatagttttgtaactttatgtttgtgtatatgttaatatgtttttttaattaaagtatagcaagtggcataaggcatcaaattttgttaaatgttttcagccaattatgtcgtttccttagatagtggcattttgttttaattcaagctcctttacttctatccacaatataaggtagagtcaagtctttaaaattctaacttccttcctagagctacaggtatgtctcaccacttaaattgccagcctttgttgtgttattacgtattgccctcaatatttggagattcatttgttttaatacacaattgaaatcaacacgtcaagaacgttgatattgaattcctccttcacaattgtattgtaccctccaaatggtaaaatggtggagaaggatcattattgaaacttcatcaagtcaaagaatgaattatattatatatatttatattgtgctttgtcgttccatgggaaaaatctaaagacagtccagtccatgccaatccaaaaatacaatcaaacagcgttacattcttgaattcgaaagtgatccaagaatcctaaaatacatgaagttttctaataaagaaatatgaaaccagagctaaagaaatatttataaatcgtattgaataatatcaccaggtatgaataaaatttggtcaaagtttaattagtgtgatgttcacaaaacaagaatcatacacaacaaaatcaaaaacaagaacaagaaaaaatatatatatgaagaacagtctaatattacacaatacagagacatcagaactcaattacgtaccccccaacaacatcaaaaatcatttattccccatctctgtctcttcatctcagctccctccaacaaaacatttccaattttccgtgcacaaatgaacaagttcttaattacttaccattcagagttttagacaaaagggaagaacaaatctagaaaagcaacaacatacaggatgaagaaataaactgtatttataataagatttaagaaaattgatcaataaggattatagtaatacccggccggcggccccatcccgttgacctgaggctgaggcatcccatattgcatcactggatatggatttggagccatgtaaccgttgccactaagcttggccaaactagtttgaccttgcattccttctctcgcatactgattccatacttgctgttcctgcactaacaagctttgttttttctccatatcggacatttgcacataagaaggtggtggaattgttaatgaagcagcaaaagggtcctgattgactgcatgaactgtgccactcccatctggagctgggagagccaacacgggtgtgttggtctttcccagcccaggcaacgccacactgctggcgcttccaccgctcatatgggctgtgctcacgtgttgtctgaccacgccctgatcgtacatgccattcaacaacaacggatctagcccaccaccgagatcttgtttttgcaacgacaagttgctagctgactctaccaaggcgagttcccaatctgccttggtgggatcagcggcaggagtctgccaggccgatgttacttgaggttgtccatttgatgagaacggttcccacgatccattcgccttgttttcccctggaccagcaaacaatgcaagagcaaacttgttcccctgatcgtcggccgtgaccgattcctctctcaaatccaccaagtcgtggatcacttcttgttgctgaggcttaggctctggctcaggtggaggtggtggagtgtaactttccggagcagggagtgcctttatctcgttcatatcaggaaccggttcctcctcttgaactggaggagccggaagctcctctctcttctcgggactcttgggtctctttgatctgtccctcacaaactcctccaatgtctctaataacttaccagtgatcctctgaacttcaggatactccgatgatctcgcaacaccggtttccttgcaccaattataaaacccaacgagctcgtcgatctgcttagccgcacttgcataggcatcgaaggtcttaacacaatctgggtactccatgtcaaagaatttatcaagtaaaacagccaaaacctcacaaacgtcggcgtaaagctgaaagctctccctaacaacggggtacaatgcgatcaaaatcatcctattgatcttggccaaacccgtgggtcgacaagccaaaaaacgatcaaacagtctctgcatatgtcccatcttaacaaatatcttctcaggcttcatctccctcaatggagtcaaaacccttttctcctctctctctctcccttctcgtcctgccgattcgctcatatccccaaacgacctcgaccgcctcattccgtagttcccagacggacccccctcacccctggaatccccataatcgtagtcgtactgtctcggtggcggtgacctgaaattcgcgttactatctctagacccaaatcgatcgaatcgatcatcaccaccaccaccaccactaccaccgcctcgaccagctccgtctccagcacctccacttttcttctcaaatagcgccaattcgaggcgttggtcaagatacatggcgtaagtcctgacaaaagctgagtgatcccaagaactagaatgggcttcgtccctgaaatcagacaaattgagaagcctggtccctcttctggtagcgaacaagatctcttcctgaaacaaaggatccccttcattaagcaaacgatggatcagcatcaaagccttgagtgccacaatccagtcgcgcgtcttccccaaacgcttcgaaatcgccgtaacacaggcatgaacgtaacctcgagagtaagatgtgagattcaggatctctcttgtgtacttctcgctagccggatcatcgtcgtgactagtcgccttgacaatcgcaacctcaagctccggcgccatgttgctagccaccttagctattccaatactagtctggtccttcaccgccccaatcgctttccgaatcgtagtcggcgccatctccaacaacttcctctccttccccgatccgtacctaaaatatcaaaccactcaaaataaaaacaataattaatttttatctcaaaaaagaaatcaaaataaaaaacacattatccgtacataccggtagtgtcggtgttggtgtctagatccgccgccactaaggtccgacggctcaaaacgacgccggatccggagattacaatcacctcaacaactggtagttgaccaaaccaaattggatctggagaagcttgatagactgtacgacgtcgtataagtaactagtaaccaaaaggaaagctctgaagctcgttcgttattctatactcttttctttctctctagtttttttgggtttgttaatttcgtttatttctagattttttttttttttttggtggagttgaagtgttttgtttgagttggggattgggtagcaaagaaaataagtgcagaataataattaataaatattaggggagagatttgtggttagttgatttaagacatgaaaagatcagggccgttgatttgggtaaagtagctgtctttgttaggacaaaaggttgagccttgggcatctatgtagtactgcgtgccttattttagtggcaaatacgacgcgtacggcttacggtgattcggacaattcccattcctttctccaaattacatcacacgtggcgctcgatcccctgtcctacgtctctgacggtgacaatcctacggcaatcaaaaatttattttcactttttttttttttcccaaactaattactcccagtgtaaagatcgtgctaaagaaagtaagtttattgtttttaagaaaaaaataatagtaagtcaagtttattgtattttcttaatatttttaaaataaataaattaattattttcaaattaatttttatactatttgcaaaattataattatcaaatttaataaataaaatatattattttttaaaatttatagaattgggtgtatatatatagttgatttaagaataatttgttataaaataatataaagtagatgagaggaaagaagaagaagatgaagagagaaagagaaagtgaatgagaatttctgagttgtt

SEQ ID NO: 14056 - DNA, 9152 bp, Cannabis sativa
attcccattccctgacccatgccctttcacattccaattcccattcctattcccattccattcccaagcctattctaactatatattactaactcaaaaagaaaaagagaaataaaaaaagttaaaagaataaagttgtaacaacaaatttcatgaaaaaaaaataatgtaataatacagaaagataaaccaagttgtcaaaactaagtaaaaaaaaatcgtaatacaaaagcatattgaggtgttgaaattattttgcttattggaattaggttaatgttttgttgttttttctgttactttgcacttatatttttgttattttatagttgttttcatgttatttgttaagttgttctaatgttgttttttagttgtttttgagttgattttattaaactaaaatacaatatttttattataattttaaaactttaaacacaatattttcgtaaagttattagtacaataaataaaaatataaaaaactccgtgtttcgttaattttataaacttttcctcattttatagtatttttgtaaattctcctaataaaaaatacaactctaaaacaaattagaaagtgtactacaatattgatggaactagctgactacttgactaataaggctctaccagcctctcgttttctccagctctgctccaaactcacagtgctagctcctgatgagtttgaggaggatgataaaccatagtgtatacttgtaatttgttagatttaattcttccattagtaagcctagtgtacaaactatcttcttatagtgtatatatatatatatatagtgctacaatatataaactaactttgtataatgtatttcgttaagtagcaatattgatcatcaatacaacatagacgttctatctctcaatttcttctccattcagaaagacatgcatgaaatcaacttgctaaactaataaaataataactttaagccttgcttgcttcatggattagatcattcaccaaagcattaataatatatcttccaatataacctaactatgggtaggtgtacgtacacatattggatagattgtatctttttacttactaaaagtttatctgtttcacatttatatcaagtctaatttgctgaaattgaaatattgatgaaatggtttgacactgaattaaatataaaagaaaacattttgaaaccttaataatgtatagatatgtgcttttataactgattttgattgttccaaagtcaaaactgctcaaacaataattaatatatattgtacacatgtagtgtaacacatatgaattaggcaagatattttagctagctagctactaatgaaagacaaataaacaactaacttaacacaacaagtcgattatttgaccacttttttcagttaattaaccaaacacctctcaatcatttttggttcgttggggttctttcgatgccaataaataaaaaatatatatatttatgtgttcgctgactatttattatcatgtcaaaatccgctgtacgacggaatttaattgataattaaacataaattgtttcaaatttcatcactcatcaacctaacccacatgttgaattcttactacttttaaaaggactttacgtgtcgatagttttggcaacaatacaccaacgtcctacttatatagtaaacaaaatcaaaaggaagagaaatccaaaaccattaattccactaataactaccaaactacttttttttttatgtcttttatggggagataatgttagttttttattgactaaggtacatattgggacacctttaatgaaattgacaaggaaaaatctaaaatttacttggactgatcggtccgaggaaagtttctaagagttaaagcaacgactggtcactgttccagtactaattcttccttctgataaggaaaaattgttgtatattgtgatgctttcagactaggtctaagctgtgtattaatgcaagttgaaaaggtaatagcctatgcttctcaatagctgaaagagtatgaacagaggtaccctactcataatctgtaacatgctgcaatggtatttgcattaaaaatttggcggcattacctatatgggaaaaaatgtgaattatacaccgatcataaaaacttgaagtatttcttcacttagaaggatcaggatagacagagatgatggcttgagttggtgaatgattatgattttaaaatcctttatcatcctagataggccaatgtgataatagatgccctgcgcaaaaaaggccaaggacaagtatgtaacatgaaacaaatttcaaagcaactaggagatgaaatgacaaaagccaatcttgagttggttgtgggataattagccaacattactttgcaattcacattaatagaaagaatcagtaaattctcagcatggagattcagaataaagttttaactggtaagactgaggattttatcgtggatgaaagtggtatgttatggtttatgaaccgagtatgtgttcctacatggatgatgatatcaagaaagagattttggatgaatcccatatcactccttactttgtacgtccaggtacgactaagatgtactaaaattaaaatccatctattggtagccatgtatgaaaaatgatatagtattatatgtttcacggtgtctgacatgtcaataagtaaaagcagaccatcagagccctacgagattgttacaattgttaaatcttctgaaattggaataggaagatattaccctggacttcgtggtgaattacctatgactatggggaaatatgattctatgtggtaataattgacatgtatacaaagttagctcatttcttacctgtttcaacaaacttctccattgattaatatgctgaattatatgttagaaaaataattcttcttcatggtgctccaaattctatagtacgtatctgacagagatctgaagttcacagagagtctacatcgagctatgggtacacagttaaacttaagcacaacatttcattctcagacagatagacagtctgaaaggactattcagatttttgaagacgtattatgtgcatatgtattagaatttgaaggatcttaggtaaagtaccttcccttgatcgagtttcttacaacaacaactgctaatcaactatcgggatgactccgtatgaactattatatggaagattacacaggtcacctattcaatgggatgaattacgcgagaagaagttcttaggtcacgaagttgttcaacaaatgagtgaggcaattgaccaaattagagctcgggtgcttggtgctcaaaatagatagaagagttatgtagatccaaaacggtggaatgtctacttttaggttccagatatggtattcctccatattttacctatgaaaggagtaaaatgctttggaaagagagggaaactaagccagtggttcactgggccttttgaaatcctaaagaggatagggcaagtggcgtacaggttagctataccccaacgttagcaaccgtacataatttgtttcatgttttgatgctacggaaagtatgtgtcagactaatctcacattttgagttacgaagcctcggaaatgcagtaaaatctctcatatgaagaacaaccagttgagatacttgatagaagagataaggtcttaaggaacaagacattggtactagtgtaagtgttatggaagaacaacaaggtcgaagaggtgacctaggagtgggaatcggatatgaggtacaaactattcaagtaaatttcatgacaagatttctataaggaggagataactgtaatatcttaaattttaaaaatggattagaagccctaattaacttaattaagatactaatgtaggattatatatattttaatacaatccataatatgatattattagtgaatatttaaattaaagaccatatttatgtgttagtagtatttttgtaagtttgacctgaaaattaagggtaaaattataattttaatatattttgtgtaaaaggactacattattatgtagtatgttcgcttttattgtgttactagttaatatcggcaagtttgtgtagtatagtcacaatcgagtattttggctcgaacttaattcgtggtccaaaattcataagttatgttgttaggataataacatgaaatatctgggattatataattatatgtgtaatttaaatgacctctatgcccttggtgattaaatacattgatttttggctttaggagcgaaatggtcatttgaccaaatattagcaaaagaatgtataagttaatttcagtttttatgttagaatttttttggctttgagagctccattgaccttcttccccttctccttatctcttcaaactttgttcttgatttgtgaaggattttgctatttgaaggggttttggttgtggaattgtaatcaagctttggaaatgatcatcatttgaggtagtttgaatctcttttctgttgaattaatctctgaaaatttatatgattgaaatgaattgcatgaggttgtggaatggtataattatgataattatggtttggttttatattgatattgttatagatgctaggttagatatttcgtttctttagttgagcatgaaatttgaattttaggttatttgcttagtgttgatttttttttggttgtcaaatgttaaaattgaactaagatttgtgcttggttttctaagctttaaattatgtgaattttaggatgttaaacttagttatggaagtgttttaagcatgttgttgtggtgtagtgtgcttgtaaacactttattttagcatgaaaacttattgcatgatttatgtgatattggagttgaattggtaaaattttcgaagttgtaaaaaaatatagttttatgggttttcaagcccagtcgccgcgactaggcttatggtcgtcgtggcaagaccctatttgaaaacataggatgcccctattaggattcgtcgctgtgaccccatggcaaaaattcgatgcgacgaccctgcgacgatatttcaatttttttcgtttgtattaggcataacttttgactctgaactcctttttacgttctttatatcattagaaagctcataaggagctctattactcggtctagagttagactgctaaatatttatatttattgaatgtgatatagggattaaccctattttatataaatttaagattttgactaggaatgctgacacttgcaaaattctcctcataaattagaactcagggtaaaacagtgaactaaacgtacatataatatagcacaatagcgtttgtttgttttatagttattttaatagaaatatgagttaaggtttaccctaagttttctatgattaagcatgtatttataatatttgtgagtaaattaaaatagttatgcgattatggcataactaggttagaatcagtgactagaatcgaggtaaatcctattatgacattatacatataaaatagatgtgtgagcgtaacatgtgaaatctatgctaggtaaatattagatgcagaggtatcattataaatgaaataatgtaatacaatagtgtaatggcatgtttatctatgtagggacgtattgtatgatatgtatactatatgctcatgttatatttattttacaatcttgctaggccttgactcacagatgctctattttgtaggcaaatgtaaagaaatatcgagtcaaccatgagttcgaaggttttgaagatgaattatacatgttccagccaagctagaccacgagggttaggtccaataggaagattgtatagaaatcttattttattgcttaggtcggcttgtatgtaaattacttgtaatattttgcaaaataaaattttacgggatcttggatatgtatttatattacttcggttttaagttaaagataaattttattattacaagctattttattcaattaagttattttattttaatcaattggcttattgatcccaattaacggggattagcataatataattagggcacattcctttaatcaaggcattactttaataatagacttcaattataatttgatgggctgtaaatataatgccccataccacggttggaaattctactcttttctatgaaatgttatctcgtgaggcatttgagttggttaccttatggtggttttagtatgatcgaaactcactactatttggtaacatgcagtcaagcttagatattgttccagagttagcccataatcacctattagaattcaaagagcatgttcggcggggtctttagttgggactgtgcaattcaaaccatgttttccagcgatcatattcggtggatgccaccacttcctgagtcctttgctcttacgactgatgctcaaatggttcttgggaggggctttgtcgggttggttggagtgatacgggatgctgcaggtgcagtttggctagtttggtcatctagtgttttaggtgacttttctgttaatgtggcggagccgcttgcaattagactggggttgactcttgcgcatcaatttgattttagtatttttgattattaatagtgatcctattgtggctattggttggattaatagtcctcactcaaattttatttttcagtctattttataatatattaatttatttattagatgtttttggtgatggatattgtagtgttattctgctgcaaatgcaaatagtgttgtcacacactagcctgtgttattattataaaagagtatatatgaacggatgcttgttcataatctttgagttttttttataataatagatttatcttaatgaattgcgttttttattaaaaaatatatatttgtatatataatgccccatataccatgggcgaaggccgagtatcatagataactatacctttagtggtcagtcacatgtattatatgttacacaaatatattaattcccacgaaaaacgtattaagaataatagtacttttaactcaaacacatcatattcacatggtgcaattcaaaacaaagtacgcctactcgaccttgaataaaaaaatagaccagttggagtaagaatatatatattattacatgttcgatactacaaaataagattaagaccacttggattacatatatccctatcttcaaattacaagtgaaattgttacatgtacacaattaaattaaaaaagaaaaagaaaaaacgtccaagtgtttattagacttagaaagtaaaatagtagtctagaagtgtttaatagcgtacgcgtgcgagggatagcagagagagcggtagacccaaaagtcaacaggtcaaaccaagaacaaaaatgttaatgaaaaaagtttattattattttaatgtgttgaaagttagaatttttaatactatgttatattaaactattatcttcttgttcttctcattgagttgtgccgcgttcaatcacatacatcatcctaatatatgtgcgtcacttttcttctcacttggattatgatcttttcagtcaaatctcccaatctgtacgcttcctatatatactccttattctatcatctcactcaaattaaacaaaccccaaacaataattaattaaacacatactcttctctccatactaatccaaactctctcactctttctcttttgctaataaagtctatccgtatatataattaactacataaaaaaatggatgttcacatgggagatcagttatatggatcagtaattacaagtattgatcatgatcatgatcaattacatagtagtgaagaagatcatcatcgtcaattggatttaaggaaaggtccatggacagttgaggaagataacatgcttttcaattatgtctccatccatggcgaaggtcgctggaactcccttgcccgccatgcaggtactttttacttctttcttgatcatttcaaacccataaataattttcagacctttattatttctagaccaaaagttcaaagctttctggttatgcacgtatgaaattaaattagatttttatcagtgtaccattttccttaattgctctctaaattaattaattaattgttattaacaataatacaggtctaaaaagaactggtaagagctgtagattgagatggttaaactacttgcgaccaagtgttcgaagaggaaatattacccttcaagaacaacttcttattcttgaacttcattctcgttggggtaacaggtactgctaatattgtctaattaatactttttcttttttatttatttaattatattttatttagtgtgagaaatgattatatatctgaatgggatgttgatatatagaattgattttttttttttttttttttggaaaaaggtggtccaaaatagcccaatatcttcctggaaggacggacaatgagatcaagaactattggcgaaccagagtgcaaaagcaagctaagcaactcaaatgtgacgtcaacagtaagcaattccaagacgccatgcgttatgtttggattccccgtttagttgagcggattcaatcgggtcgatccgacccatctccagccggtctgcccgtttccactggatctaacacccaagtctatgactgggccaacccgaaaccaatgcccgacatgtctgggtcttcatcagatacgtcagaggcacaactctcctcggtttcggatcttaccgaatgcggccaaccgatgggaacagggtcgggtgggtcattccagtatgggccggatatccaagtaaatgcacaaaacgagacttggttaagtggtggggactcatcattagagaattggtggagcgaggaggatctacagtttctggagactgctttgctatgactttattattaagttaaaattatgtccaataatagtaacaaacacaacatcacaagaattttcttacgtgacgcatttgagattccatgacacacacaatttaaatatttatatataggtaatagctgatagggagagggaaaaatcaagaacatatacactaaactctttttttttttttgcttaggggtatttatctgccaaaaatgttggccataactttactttgttcaattggtttttttttttttttt

SEQ ID NO: 14057 - DNA, 7791 bp, Cannabis sativa
gtgaattaaatagggaacaagatcagagttctaataacagacaatgggcttgaattttgtttagatgaattcaaactattatgtgccaaagaagtaattctgagacaaagatggtgattaagactccccaacaaaatggcttggctggaagaatgaatagaacactacttgagagagtgagatgcttgctcctaggtgctagtttgacaagagaaattttgggagaagcactcaacacatcatgttacttgatcaacatatttccttttgttgcaaatcaattcaagacacctcagaaactttgaacaggtaagcccccaaaatttgaccatttgagagtttttggatgcactgctcatgtgcatatcaaacaagataaattgcagcctaaggcacttaaatgcatgtttctttgataccctaaatgggtcaagggttacaaggtttggtgccttgaagaatgacacagaaaatgcatgatcagtagagatgtggctttaaaggaagatgagatgcctatgaaaaccaaagccacatctagagatagtgaaattgatcagagagaggatgttcagtttgaggtggatcaagcagaagtgtcaatgcctagagaattaaatgaaaatgagtcagctaagaaagataagctacaatacatcctcaacaactatcagttagccagagacagagaaagaaaggagatcagatatccaacaagatttggctatgctggttttattgcctatgtacttattgttgctgaagacattgatagcttagagccaacctgctatcaagaggcaataagtggaaagaatgatgcagcatggttgcaagcaataaaagaagatatagtgttcttgttaaagaacaagacatggattagggtcaagagacaagatggccagaagttgatctcttgtaaatggatttttagacaaaaagaaggcattcctagaattgaaggagcaaggtacaagacaaaattatttgtcaagggattgtcacagaaataaagtgtgaatttcagtatagctattttactcagtacattatcaagatcttgacgcccatgatgatgaagtcactataattaactacaaaatttgtaagattgtccaatttaatttcactttagaaagcttctttctcaccggaagttttgatctgcatttttctcatagaatgttaattgcccatgggattcagttcccacacttcacattaactttaagtaaattatgatagataaagttttcataattggggatgtagctcagatggtagagcgctcgcttagcatgcgagaggtacggggatcgataccccgcatctccattttgtatctcgtcttttttcaaggcccaggcccaatagcaccccaacccagcccaataattatatcagaaaagctcagcccataagattgatcagaccgatttcccctgtatctgtattctctggctcattcaaatggataaaccttactcttttttctttctctaaaccattttcactcttcgctatcaataatggtgggaagaagaaagcctttggttctcgcttcaaccaaaactcttctcaattctctcctcacttcgtcgcaactccgcgatggagatcaccctgtacatgccactatggccccttccagcactagtttgaagttgccggttggaattctccgttttcctaactccactaccgacgttattgactcaaaattggcttccctagatgactctgctttgatcggcgtctccacttctgtactcaaaagactctctgtaacttcaggctctacggtaaaataaaatgaattttgtatttcaatcaattcgtgttcggattcatagaaatttatggttttttgaatttttttttgggtgtgtttgcaaggtgcttgtaaagaatgttgagaatgggaaacaaagaattgcccagaccattgttcttgatcctcctgacaaacacagagaatcttcaaatggtgaagaagattcttctcaattttcacgggaaatgctaatttttccttcttgtaaatttccggaaactgaccctaagtgtttggaccgtgaagttgcgtatgtatctcctatgttagtattcaatcttgacttgcatatattgtgcttgaagtctcttgttcaaggaggggaagaaactatagcatcttacttcaaagaaaaaaaggatgacaatgtttttaagaaaggtattgacaattccatcattggtatacagttggaaccaattcatttcaagccaagatatgcttctcatttgagggtttcttttgtgagaatacctgaatgcggtatacttgagtctcttaaaagtagttcatctgttgaagctgaagagcgtcaagagataattgattcagcgttacacaaatactttgaagtagatagatatttagtcaaaggtgatatttttagtgtccgtattaattgggattgcaagtcagccatttgtgttccatgcagacgaaggtttcaatctaaaactgatgatattatctatttcaaggtaattatgttttcagtgtatcagtgtgctttagactatgttgtcagtgtatcaagttggattagaatactacttttgtgtgcaggttgtggctatggaaccctctgatgaacccattttgctagttaatcgcactcaaactgctcttgttcttggagggaacgctccttctgctcttcctccagatttgttgattgctggttacaaaggttttgcacctttgcaagaagaaactgtgaaacttttggcttctgtacttacaccagctatttgtccatccacactttcgtcaaaattcagagtttctgttctattgcatggcttggcaggtattcttttgaatttaactgttgtttgctttaagtttgttggtttttttcttggttagggaagcttactaatagatttagtccggccaaaatcatacaccaaaacgtttgtgttgatctctttaatgtttagttgcgtttggtcggtaatagagagggaaaattgttgcggaatgttgctttgtcggttatcttgggaaatcaagaattcttataagatatggcatcttcaggggaggaactcccgggagaagtttgattttgggtgtcaatctagttgaaaattgtttctagaatatcactttttgttaagaatatagctttacttattggtttccaacaataatgctatttaaagttgtgatcctgagatactgttagagaaaagtaagactgtgataatacttggtttcagggtgtgggaagagaactgttgttcggtatgttgctagtagattaggcctgcatgtagttgaatacagctgtcataatctcatggcggcatctgagagaaagacatcagctactctagctcaagcttttaacacagctcaaaggtaaagcaacttgtgtaacaagataagatgaaatatgagggatacttttttttacatttttcagctaccaattgatgtggtactttgtaataacttctgtgttattttataaatattattccggatcccttgatcttaattcattgaaacagaagttttttttttcttctttggaacagtacttgtttatgcatttatataaatatatatatgttatttgtcgtgcaacacttgtaaattagtgtcgattctgttgctgctacttagtcctcgccttattaattgatcttggacagatactcgcccacaatacttcttcttcgaaattttgatgttttccgaaatctggcctctcaggatggttcaccaagcgatcatgttggtataatttcagaagttgcttcagttatcagagaattcactgagccaatttctgaagatggagatattgattctgaaggaaaactaaatggtgattttgtaagatgcatttatttttgtttttttttttgccaaagtaagatgcaattgttttactttgatacttgttttagttgttctgtatgtatatgtatacattctcttttattattctgcatttcttatagaaaaagaaatttgtataacttctaaaatgaaagttgtagaagactaaagttgtaatatgatagtcaactagagcatgtcaaggatgttgataattgtgacatgttaatgcagaactcaagcaatagtggaaccagacagatgcatcaggtgtttttaattgcagctgctgatggatctgaaggtctaccaccaattattaggcgttgctttagccatgaaataagcatgggccctttgactgaagaacaaagatttacaatgttgtcacaatcgctgcaaagtgtaactaaacttattcctgatgtatgtgttctttctctctctctcttgatacctatcaacctaggagagttattcagtgatttacatttcttcatatcaattaccaaccttgtcctggatgaaccccatgcaattaagtagggaatattgaagtttaaaatcaaagctttttttaattgctctagttatccatgtatatatgcacatgaatagcgctgtaatccaaattcatttgcatacattatatcctcaaagttatcatcttgtaagctttgactgaaaggttatgtggaaacccataaatacatttttattctatgatacttgaacttcttcgctgtttattgttgaggtccattttaagatctcgtacttagtgctaggagagtatttgaaaaatggtaggtatagttcttttgatcataatttctgactttgatggatcaaattggtttttgcagataaatacggaggattttgttaaggacatagttggacaaacatctggtttcatgcccagagatatgcatgctttaatggctgatgctggtgctagcttgttttccaaagtcaatactcctatcaatccagatgagtccaagaaattaagtcagtctccaaagtttcaagcagaaccaggcagtgagtctagtgaaagtacaactcaggttctggggaaagaaaacttgatgaaagcactggatcggtcaaagaaaaggaatgcatcggcattgggtactccaaaagtgagtgatgatgtttatttcgtaatagccaatacaatttgctgtgatgctgatcagattttgttcattttgctaagaagaaaaactagtaatagtaatgttattttctgaatactaaagaagacttgccctcatactttactgtaggtccctaacgtgaaatgggaagatgttggtgggcttgaggatgtgaagaagtcaattctggatacagttcaggtatagtctttatatggtcaaaaactgcatctttatatgacattcctgtggaccttctgttaaaagtttacacgccactggaattacgtttaatttgtcaaaatgattttgtggttaattgacataatcagaaagaatgaatgatcgttttatttaaagttaatgaaaaagttgttacttggtattcatgtgtttaagacatcaatagctatttaagtaatttagcttgcataactttaaccattattgaatggaagttataattttttcctccacaataagtgagggttcataaaaccttggcaggtggtcagttttagagatatgacctcaacagaaagaagaaaggaaattctaattttcttgctatattggtgtggcattctagatgaatgttctgtttttgcttatatctttgttttttaattgaatatccattaaaactaccagtttgttagaggctgagcttcagaaatatcatgtacttattgttattattcacatttgtagttacctctattgcacaaagatttgttttcatctggcttacgcaagcgctcaggtgttcttctatatggacctcctggaacaggaaaagtaagttccgctgctcaagagttcctctaaaaacttatcaagtagcgggtttattattattttgttattttaacttttatatgttgtcttactttttaatgtcagactttattggcaaaagctgttgcaactgagtgctctctgaactttctcagtgtaaaaggacctgaactaatcaatatgtacataggagaatctgagaaaaatgttcgcgacatttttcagaaggttaaatattttttttttctaatttagtcaatatgattgaaaaatagcagttttgtcccttattttgatggaaaatgtaaattatgtacttgctgcaggctagatcagcacgcccatgcgttatcttttttgatgagcttgattctcttgctccagcacggggtgcatcaggggactctgggggtgttatggacagagttgtttctcaggcaagataatacgtagtattatgttgtcacgttattttcattcattcaatcagcttcttaatgtgccaacttctttttattagatgcttgcagagattgatggcctaaacgattcaacacaggttaatcttttgtcaaatatttcaatattattttattatgaaaatgtcttctgctttgatactaaagacactttacctctgatatatttttggttcgtttaggatcttttcataataggagctagtaacagaccagatctaatcgacccggcacttctacgacctggcagatttgataagctactatatattggagtaaattctgaagcatcttatcgagagaggtcaatttcgtatctgtttcctactagcctctctctttacttgttattgatgtgcacttttttctttacatcgttattgtgctacttctagggtcctcaaagcactgacccgaaagtttaaattgcaccaagacatatcgttatacacaatagcaaagaagtgcccccaaaacttcactggtgccgacatgtatgcattatgtgcagatgcatggtttaatgcagcaaagcgcaaggtgattttagtcatttctatacttggtgcattagtaggagggacctaatatctttagctattatgaaccgaaattacactggcaactgaatagcagcatttagtgttgatttaaacttacttaatttgttgtaaagatcaaagatgttttcatgctgctcgttcttacacatgtttgccttttgttataggctttgagttctgattctgattcttccatggataatcaagctgattctgttgtcgttgaacatgaagattttatggaggtatgttgctgttttacatactcaagttctatgaaatgagagctgaacttttgcagttgactttatgttgttatgatagtgaagttttacatgtcgatattatgattccaacacataaacagtacatgtatacacacatttttttgagatatatatattttaattcctccttttcatattgatagatttccaatattatggatttatctgctctttatttctctccgagagactttggcatttgcattgaaacacatgtggttttgaagctttctgaaactgagcatgtctcaataccttgctctgacttttcaggtattgagagatctttctccttcactctccatggctgaacttaagaaatacgagttacttcgagatcagtttgaagggccctcaaaataagttcttggaaaggcgttttcaaatctttttatgtttatactgtggtggtaatcagcaagatggccatcaacatcaagctacggaaaagtggattttttcgtttcccttcttttgatacaaggaattatttatgtttgtaaacgtgtaataaaaacattgaaacatgtataatgtgttcgttgactttgacattacacctgtgtgatttataaaatataaagtata

SEQ ID NO: 14058 - DNA, 13407 bp, Cannabis sativa
aaaaaaaaaaaaaaaaaacacgctattaggtgacgtttgattgaaaggaatgaaaacataactagaataaaaatgacatttcaatactttaaaataaaaccaaacaaaaaaagaaaattaaactcgttttatttccattctatcccatttcattccctctaaccaaacatagctacttaccaattagttttgaacattttcgcaaatataataaaaattagttagtttaattgcaaaaactaataaactagggaccaaatgacaagaaccatagtaacatagggacctacaatatcaaataggccaaaatatatggtccaaataaaaagacagtgccaaacactacagaacgaaagagagagaagaacgagaaagttcgccgtcgttttgtttggttcccgagaaattcagaaagaaaacgcaagaaaaaggaaaagttcaaattttttctcttcttttccaatcctatttgttatttgcaacataaataatcatcaattcgagatgcaagccgtggtgttgaatccaccactgccaatctgcacagcccaacaaaccattcaaccatcggtttcaaaggtctgaattcatttttttctctctgaagattaaattttgtagaatagtttgtaatatttcggacgtgtttggcagagttggaactcgttcagaggctcaggtggccatgtttcgtttagcagaggctcttgtagctcccttaggattcgattgccttcagcttcaaaagggttaggttagttttttcttataaagttatatttttggtttgaaatattgattactgtgttgaatttagtctaatttggattttttttctccaaacactgacaagtaattttactaacccggcgattgtcgatgtaccaaatcgcttaggctcttaataatctcaatagttaaaaaagaggcatgatttggtatatgtttaagtttgtgagaaaaaaatcctaattagccttgaattgaaatgaaagtactttgtgttattgtttgctttgaactatttatattcaataccaaaggctaaattataataatttgatttttgaccatatttcttagggtaagaattttgttattttttttagctagagatatttatagttttctttcttgggtaattaggaatatttgattctttgttatctttgatgagctaggactagtaaagttttacatttttactagctaatttggagtttattactaaaacattcatcactcatactcaacatagaccttgtagtcttaatagtgacagagaagagtctaaaaatccagagaaagaggaagatttggaaccagtgtagaaatatgttttgcaatcttgtgcacttcagcactaaaaataagtgaatttcgacctggcgtagctctaatggtgaggtgtgaggtttgctccaacaagatcggagattcgaatctcttttgactacttgattagcaattactataatttattggcttgtaaatgttagtttaggtgagaagcttagtttcaaaagaaaaaaagtgaatttaggtggcgttcggttggaggtaataaaatggaatagaatggaaatgaatcaattctgttcctttcttttatttagttgcattttaatatatactaatgtcattgcaaatgatatgatctttctggcattttggtggaaaatgataataatttcctttatgcgttttaaattatattccatccttattcctaattgtgtttttattccttccaactagtttatctgtttgttgtatcgctaatgtttttttcatgaatgtacagttgtaaaggctgttgctactccagattcagcagtggaattaccactaactgaagagaacgttgaaactgtattggatgaagttcgaccatatctcattgcagatggtgggaatgtagcattgcatgaaatcgatggaaatgtggtacggttgaagttacagggagcttgtggttcttgtccaagtgctgttatgacaatgaaaatggggattgagcgtcgtttaatggaaaaaatccctgaaatagttgcagtggaaccagttccagatgaagaaactggcttggagttgaatgaagaaaatatagagaaggttagtaacttataactcgggtagttttagaattagaaggtttgactgtcaaatgttaatatttcgaatcttgatgaggtcggctgtaccacgaggctcaactaagctctctgattctctcgtggcttcggaatcatggttgagtgttggaagttcagtttctttggaagttcagtttcctttatggtttgactagaaatatgagctagattgattctattagggatacaactaaagaaatatgacaaagctgctttttttgtctagtcaatgaacaaaacatttttcgctaagttagcatagtccaactgttgttcgggttgaactatatctgcacagaactcacagttaaaattattgtctgtctcactaatttgcggggtcattttttcaggtactcgaagaaataaggccatacctagttggagaagctgggggatctcttgagctcgtgacaatagaggaaccgatagtgaaaattcgaattacaggtccagcggcaggagtgatgactgtaagagttgctgttacacagaaattgagggaaaaaattccggcaattgctgcagttcagcttctctaaaggaattaggctcattttatatttgttctaaattattttttgttgttttagataaaaagaagaatgtgtataagctctgtaaggccttagtaataatgtttactcagtatgtacagtattgtatactacagatgcaatgatgttacttgaggaagttttaagtatgagggggccttttatacaagcttttttcacttttcaaaactcttattttctaaaagatggaatatatgctaccattgtcaatttggagaaatgcttaaatgtactttattagtataaataaattaatatcaaatcccatataactaaccaataggtattgtctaagctcttcaatttggtatcctaatacatctagagatgcacttaaattccatacaaattttatacgtgtgggaatcacatttttgtaataatctaaatatgtgacaatgattgttcttgcttaatttggtaaaatagaaaataattctctacaagcaatcttgtgaataggaaaaggtaataattttgtaaataacattatatgtggaattcgatacacatttaagcaagatccatagtgtttttttgtttgatgaataaattatattaaagaaaagaagtttcacctttccattccttttataaattaaaaaagaagaccaaagttataaaagataaattacatttgacaataatcactgatgatgacaattgtaataatcaatgatttgactatctccgccaaacaataaaaacacaacaaatcgaacaaaatttggttgccggttctccggtcatgggatcccggatccctaccgatcgtttccaccttgcttttggagtgacactgaaaatagggtgttcaatccatcatattgttaatgacagtaaagtttaatcaaagaatcagcaccggccgtgaacaaccatggctgccttggatgaaacttacaatccaacacacctaaaatgcagagagaaggaataaagagttagatgaacttgttctttggcttcaatattatatttctagacaaagattaatagaaacaatctaaagtctgcaatatcttaatgactactttcggtcacatagaaacatctctagtaaaaatggaacacagttattcaaaaatctttctactttctcacctctaccatttgaggttttatgtcctcttagaatttccagcggaacaatgagaggattctgaacaagatctgaatacactgtgccgtggaaaacataagccgtgcagtcatcagagcacgatgcaaataaggggtatgaacgatggaaggccacacccgtaatgtctttgggatgacacctgcacacagaaaaattcgaaaccagattagtaaatagtatcccataaaagtgatgaccgtacataaatatggcaaagaagtggcatcatacttcagagttttgtaaggtttagacgaaagatccatgtcaaaccaacacaactttccttctctgctccccacaattacattgtcacctgtgagaaagtacatgcaaaaagtaagacaaattagaggataacgagcaccgtctttgcctcgatacacaatagaacaaaaaaagtgatgaagatttttagatttcatgcacaaaaaaagttgtgatgaccaaataaataaatgaagcatcaaaggctaccagctggatgaatggcgatgctggaaacttcacggagtccagtctcaagctttttaacgagcttttgcttaactaactcataaacacgaacattcttttttgttgcaatgaagaaaatagaacgagtggggtggaaaactgaagtgactggaagcccgtgtaacttgaatggaattctttgagttattttctttgaaatctggtgaatgacaatagccctcgattcacgtaaaaaacaagttaaggaaacttggcaaacagtaaatttaccctaaccaagaatcaatatttatgttatacccacatattacttaagctcgcatagcgcccccaattagttatgaaaagaaacaaccaaatattgcagatgtttaaagaacaaaacaaataatggaaaaggatatctgctggcattactgccgaaaggtagtctcctttgcgatgccactctatcgaagaaacagtctacaagcacacatcaaaccaaggagttaaaacttctccataggaagtgcccccatcaagtcgaaagaaaaaacaaagggcaattattaacacaccttaaaatgcttcattctgattccaccgtgtttgtcatcttgatgccaacttgcaattgacacagtgtctatgccaaaatgataaataagaaacagttaaaaagtcacatgccaacagtttttactaataatagaatctcacttaccagagtcttctgacggtgtgggtgtcttgactaaaagaagctcccttactctttcctgttcttctccatttcctagatcagtgttcaaaatatatatatctgctcccctgaaaatattaattcatagttaatatacttgagcagcaactataatcatactcaaatgttaatttacttaaagatgcaaaacctaacagtagcataaggccttacgtagaagcagccagtatagaaagatcccgcacaggattccatgagacacatttcacagcttcatcaaaactccagactcttaaacatctaccagtctcaatctcccaaacacgcgcagttccatccaatgaacctgtgtagatacaacaagggtcattagaacctcagaatgtccaggctacaataataataataataagtgaaatcaatcaatcaatataatgtcagcacctgaagcaatccattgccccgaagggtcaactgaaatggacaaaactgcatctgtatggcctctataatcgagatagcatgatgtaggatatggcctaagatctttacgacttggtagcttgggtttcagagattcaggatcaatatttatctggaacattaacaagaaaaatagaatagtatcagcagccatacatatattatatagaagcaaagcaaaaaagtcaaaacatggcagaaaccattaatttgggactaaatgcgggacaggaaaacttttaaaaaaattatttgtcacttactcttttcttccgtactctaggacacaagtaaagatccaagcatcgttcgaaggactccttaacagcattttcatatgctgggatgtttctcattgatgcaaaactaacaaaattgataagaagtaggacatcataagctgagttaagaccgaagaagcaataagcacaggatgaacatctaagaaacaaataatcttaccttttaggtataaatttaggtcggtcttcctcaaacattaactgataagcattaatctcttcttgtgtagggatatattctttagagggattatatgactcttcatgacctgagggcggggaaatttttagcaaaactcaataaggaaaaatatgagaagaagggttgtaccttatcttaattttcattcagaaaacaggtgataagtagtacctggcaatttcggcttcggtgcaggaatataggctaaatgcccagacttatcgttagagttggattcatctccccacaagaggtagacagacggttcttctttaggctcgtcaaatttaattaaccctttacgaatagcccgacgataacgaacaacctgtagatacagcaaaagcgcaaggcctgaataactaaactactcgtgtttgaaattccttcaagtgttctatctcaacaaccagtaggtgaaatgaaatttcagaaggaaaacataccagaaatttcattcatttcattagagataaaagggaaaaaaaatgtaaatttacttaaattctctataaaaatagcataccattttatcttcgctcttcgaacgagtgaagcgtctcttgggttcaggtgcatttgaaaggggatgtttagcaccatcccatttgaaccaatcaacgtaaggctgcattcagaacacataaattataattgtatgcaaaaagagtcttactaataattgaccaataaatggaaagctaaagatagacgtaccgcatatggatcaaagtcagcatgcggtgcctttccagcaagcattctacgaataagtttggtctctttctttttgagttctacaacctcatcgttatactcatcataaattttgcgccttcaatataataaaaaagcaccaagcaaatgtgaggtaatgtaagcaagaaaacatgtttagcacataaatttgctttctggagaactcaccaatttttggaatcatctgcactcgcaaggaaagactgcaatttatcttctttttctttcttttttatctttttcccagaaatgtcataaccaatatgatcttcatcccgataccataccaagggcacatctccaattgtatttcgaggagcaacctactttaaagtaaacaaaagaagacgaaacagttgaatgaatccagccaaacaaatgtaactaaaaaaaaggtacatattttcataagcaaaataacacacaacctcatcttcagaagaatcactctcttcaactgctggatgagcatcggagctatcactttggttctcatgactatggtcatcagccaaaccatcaccattagtagtgttgatgttttcctatggtgattacacttaaatattaaaatccagatgtagctaagtacaaacaccatggtgctatttaaacaagcaaaaattaaattttgagcagggaatgaaaagggtaagcagaaataattggggtaatgaataagtttccatcttttactgaaaatctcttcatatcattttgtcttggggaaaaattctaggtacctgatcatcggaaaaatcactttcaccactttctgagtccctcaatgatccatactcttctgactccgagtcatcaccttccaaggaatcctattaagaaaattgaaataaagaaaaaacattgttcatattcttcggacttttgaatgacattgcgagaattgcccagaactacaaacagaaacaaatcaaaacaactaaaatgaatttctacaggccaaaatcttttttgaaaaaaagaggaagacgccacttgtcttagattccccctccccccggttatgtattgaaaaccctaaacatctaaatcaaaagtcaaaacaactaaactgaatttctaaacgccataatcaacattagataatatcataaaacgaataataacatctaaaagaaaagcaacaacacctatttgaacagagaatacgcataatacaaaattacatacatatatatacttatagaagcatatgtatctaatcaaagaaggtaattactacatacggcatcatcataatcagagtcaaagtcagagtcggaatctgaatgggaaacagttggttgttcttcgtcattgttcgtgttcttggtatcgtcttggagttgcttggtcattttgcgcttctgcttgagtgagttctcagtattcgccattgaagtcttcttctcggtggtggtcgtgttcttccctgcctcaaccattttcactgcaactactttgggttttagggtttatcaaatttaaggctttatttttattttttatttttatttattaattttggtgccagcccaataccgtggcccagtccactattggactttcgttatgggcctattgatcaataaagggattatttcaaaaatacgcaaaaataaccaaaaaatttgcaaaaatatggttgtacggaattttaaatatttgtacggttttttaaattttatttacataaaatactatgtattttgtatcttattttgttgttgatttttcttttttgtataatattttttatgttatttagatattgtttttctgttatttagatattgtgttgttctattgaacactgtgaaaatgtaaaaaaaaatcttttaaatgtaaaagtgtaaattcctactaaaaataatagttaatataaattttctatgggattattttaaaaatatacaaagatacagttatacaaaattttaaatatttatacggttttaaagatttttatttagcttaatcgtgttttgttatagccgaatcaacatattgaataattgtatcatgttatagccatgttgatatgataacactaattaattttcatatattttataaaaattaaaaaataatcgtatttatcacaataatagtgttatcgtattgtgttgtgtgacttactaagtaattatttcatgatcgtatttaccttaatttagtgttgtttataaacgtgttaacatgaacacgataacacaaattgtcaaatttactttattacacaaattccttcataattcaataacttatataaatctagtacttactagtttgattgaatcacttttaaaagtgatggattggattatatgaggcctaaatgccattttcacttgggttaagcatgtttattgcaacacttagattggaaggcatatattaaccaaattaacaaaaggttacttattaaatgctaagtcatttcaccttaaagagcatatatgtgaaagaatgcttgtaaaaaactaattattggagataatactttttttttaataaagttaaaacaaataatatattaaataataacgtgtaaatggtagcaaattttgaaagtactaactactatactacttttagaaataatattgctaaaaataatgtgaaaaaaataaaatattatatcatatttctctgtaataaacataaaattgcaaattgcaatacaacaataataatgactaacttagaaatggattattactttcaaaacacaccaaagctcttctagttatgagcttgcaaaacaagagaataaactaataatatataaatatttcaaaagtactataaaacattaataagatgaattcatatagatatagaaccaaattcagcttagtaagatactctcagcatagcaaagcataaatcagaaattattttaaagttaattatattaaaaaaaatgttaaaaattaaattaaaagtactattttatactactttgaaaaatacagatgtctaaacgacacaagaaattcaattaatttttgcaaaatggtaataacccttcttaatggggtaaatataataatagaagattaatcaacaaacaataatgtttagagagccacataagataagattatatatggttgaccagaacaagaaaaaagtcaaaaagagataatgagattgcaaactcaaataagggcaaagttcagattctcttttagtccttgcaagaattcattgaagtagcatttgtcagatacagtacaatatatgtataaccaatgtgcacaaaattacattggcaagtatcaatggttgtagaagaacaacaaagacgacgaatatgcaaaacggtatacaaagatggcagctgaaaccagctaactgtagaagccgaaactcgaattagggaaaggagatagaaacaccaaaaattctcacccatcttctctaaaggatatgccggggatggataagtgggacgaggtaccgataacaaatgaacaccaaaggccgggtgaaccctctacttcttctttcccccacacaagtaatgcaaatttcattcttgacatggtagaatctcaataataaagaataagatttatggcgatctcatggtttcctgccgtctaagaggtatcccttctgggccaaatccgtcctcttctgaatatttgtgcatgcgtgtggacgatgttgaacctacacgcgattttaataacattatcaaacaaaggttcagaatgtatggaagaatttgagataattgagaggaagtaccatcggccatgtcttttgttttgtgaagtagaaaagtcccggagaggatagtcacaaacccgcacatttctgtgataacttgagttggactttgcctatcccaatcctgaaaggcaatggaaatcaatagtgcaaagacagagttataaatgagattcatcaccaacaatttttacatttcaaacactcttctatgtcttttggtaaaagaaagagcgagaaattcctagtttatattattaggtggcatttggttgggaagaattgaaacataagaatatgaatgtgaataagaataggaatgaaatcaaatataaaatgcataaaagaaattgattaaatcttgcattggaatggtctttcattttaaaatgaaatagtcattccaccaaaataatggaaaactcattccattgaaatgatatcccagtactttaaaatgaaaccaaacaaaggtatggaataaaaattgtttcttttccattccatttcattacttccaaccaaacgctaccttattctctcgcttgacattctccatgatttcatttatttgatccaaaatctcaacttcaagtacaaataagaagtaaaatattctctaatatatactagcacttaaatacctaccaaaattagaagtattgaacaaaagggtagtgagcacagtggtaggaattatcagaaggtatcaacagcagaaatttttcgtttttcggtttcaataaactaatcaaatcataccaataaagcaataaaaaaataggttttgttgcaatcaaaaggaaaaagttaccttaaacatgataacactagccaaaatagttaatgatgtgaacatggtataatatatgggagagacaacggctgtgttgaaagtatcaagagcctgcaatcaaaagccgtaagatagatatactgttatagaccaataatataaacaagattgtgaaaagaatccaaaaataaaaaagtgaaaggcagtatatatgggcaccatatgaaataaaatgaaacaaatataaaatattatgcttaaaattgtaattgaagtatctacattaatattattgggacttttaagtagaaaatcattaaccaccatgacagatgaactcatacaaattaaatgaattagttccagaaacaactcaagcatacactatctagttcaaaggaaataaagaagtccccctaaaaaaagcaaagagcaaattaccttgttcaaataattcatttgagtgataacacaaaaaactacaactaaagtgaaggcccatgtttggggatatataagctgattagttcctgacaatgtcaacttcagagcaattcctagcgcttttacactcatgacctgccaaacgatagctttaatataaaatcacttagataagtgataagacgagcaaagcaaagcaaacaaataaacagttaacattatatagtgagacataccgacaatgaaccaacaagggaacaaactccaatgtaaaccataatgtgtgtctggccgtaaagtgggatgaagtggaatacaagtacaagtgcagctgttacaaccagggccgcataaaaaagaaaagctgcaatggatatggagcatctaatgaaacaacaatatatatgactgaaaatttgcatcataatgcagcatgaaaatctatagttacctggctccatggcaagatcccaaacttctgtcacagaatcaattccgcgttcttgaggagcatgtaaaacaattgtcgtagaacccacaacacatagagcacaaccaagtattccaaatatatgaagtttctcccgtagaataatatgtgcaagtacagcactgcaaataaaatgatcatcagcactaaaatactgtaaattcaacatgtcatggtaggtataatttgtatgtagcctacctgataattatgctaagggcaccgagaggggtgaccagtatagccggtgcaaatgcataagctgcaaagttagcgatttctccaacaatcactgtcaaaatggaaacaaatcagaatgtacatttctttctcttccagcagagcagacaaaaccaaggcactataaatagctcaaatagttagcaagctgaaaagcttaacaaatatagtttataacaatacaaatgtcgattggaaattgaactgcccaggtaatatacaatcatatagatactataatagttggttaagtgaaaaatagccttgtgtaaaatttctgtgactcaactgaatagaagagtaaaagaataaaagctaatgaacagatccataacagaacaaatggaactcacttgtaatcatgcccacccaccaaagtggctcgtataagtaagaatatcctcccacacctgtggaacaaatcaaagaaatcaatttaaggtcaattttatgaacctccacaagagctcctacaaatctatgatctaataataaataatcagaaaggagcaaactagcatcaaacttaagcaccaacaactgcagagctagtagaacagatccaatacagcctaccactctatctaatcagtgtaaccaataatgaaattaaattagacataaattgccatagtagcacaaagatcacacaattgggccctattccaagtcctttatataggccgatcatttacagaattggatcagaaatcttgttcactaacacaaattcccaaatcccattttccactaccctcttcttcactattacaaatgcccaaatatcattcctcactatcacccatcaatacaaaaactacggaattatagcaatatccacattcaactaacccagttcctcacttcacaaatccaaatcccagaaggg

SEQ ID NO: 14059 - DNA, 6590 bp, Cannabis sativa
ataagcagcacgttgaccagcgggatgatgttgctgaaagactcctgacttcatgaccatacttggtctagtcttcaaatcatttacatcattaatttgatgatgctgcatctgattttggtgcgcgtgcaactgagcaggaagttgttgttttgcttgctgctgtaattgttgttgctgctgctgctgttgatgttgttgttgctgctgcaataattgctgcttctgcattaagtgctgctgcatctgtcgctgttgatattgttgcttgaattgttgggactgtaacatttgctgctcgtgttgttgcttcatatgttgctggttctgaagcatattggaattcgactgaaggttattgacatttggctgcaacacattgatcccattctgggatgacatggcattaatgtttgcatgttggggagcactcacaggaatttgctgcagagaattcgaagaaacctgctgcaatgagttcatagcatttccttgtcctgaatccacgttagaactggactgcaatgggttcatcacattttgctgagttgttgaaactccggacaaaggagacagagtgttttgttgtaagctcgtataattgttctgctgcattgttcccacagaactttgcacattcattgattgcaattgagaattcatttggttttcatgagattggacttgattaatttgagactgtggctgctgagtggactgcatatgagaagaggggtgcccttgttgcaattgagaaacaggcttcctcggcctatttgtattaataaaacttattatttgtttctcatagtgagccagtttctccttatacccaggaatcacgttaccttttggaacctgtaagaattgaatagcacgttccaacgtgttcctaaataatttcagcttctcaagctgctctgactttggtggttgttgtgcaagagaatcaagctggcaaggaaaaacagacgccattaagattaaagaacagcataactcagcctaaagtttcttattagggtaattgtgttttctttcctgtttctactttaatgttgtgtaggggtggaaactcatgtcattgtgtcatatttgtgtttttgtcatgcgggttggcatgtctaattggtcaattctaatctaacccatttatatttcatgtggaaaaatctaaaccttaagcagactcgtcctgtgttgattaaatttcctatattacctgttgatcaacttgacaaatatcacatatttgaatttttttctccttacattttttgattgtatcaatttgtttgacattgaataatgcactaaataaaataaataaagtttcaaataaacaaaattgatgaagtagattacttctcacaaaataaacaaaattcttaatatcaagtaattataagtgtgaataagttatactatatcgtatgtaaagttctttctacttcattaaaaaaaaaagtaataattcaactataagtttgtaactttaatcatatactccattcaaacaggttaattcatgtttgaccctaatcaaaacccaacccaatcaatttgtatcatgttgtggtgatctaaattgccacccctatctgtgtgggagttaccaaatttccattcatattataacagcagatccctccatgtaagagatggcatacctgttgtaatttgccagcaattttatggtacatttcaagaagttcaggtaagtacagttccttcattgttttgatctgccaacaaatttaaagagcagttaaattttaatctcatcaagttgctaatagattaagaaagtgagcatcggccagatacattatatgaaataatcacaacaataaaaattacatcatttacttcatgtcttgattgtaattcaattccccaatgcaatctttatagtttattacagcacctttctcctttaccgtgtccacaaatgaagaaaatacagctgaatatataacactaccgactatttttttgtcttatttatatacatatatagatgtattataaaatatattttgatttttttttctattgagaagaaaattttattttgaattattatcataataattcatgtgaatcagccactcacacactcacatagactataaattagtgtggtgtataaatattttgtctttatataaatatctctttttttttaattttatattaaaaatgtctatttaacaaaaagttgaacagtttttcttcaacttgtaatattaccattatttaacaaaatattattagttaacttttaaataaataaatagttttttattcataactttttctctaagagaactagtatgaattaagtagggttagaaagataattaaaaactctataatttttaaaatagtaattttcatattggcatatttaatggttaaatactaaatcaaaattttggtttattacaaaaattttagaaaattatctttagtcctttagtcataactttctatttaggagtcctatatcaataaattaaatatatatacatataaatataattctagtatgtgtgaaataaatttatctagtttcaatatttacaagtcaaaaactgatcataagttacagattcaactaattatgaaatttcactattatttagaagtttaaatattaaggagttaaaaatttgatcataaattatatgtttggttacttgagaaatttcagatttatatgtttgaagtcgttttattcaattttatattaaaatgagacattttcaaatgatttgtttatttatttgagctcttttaaaatttaaaataaaaaaattaaaatgatgataaaattatttactctattattatgctatgtttcatattaattttattaaaaactatttagcttgattactcttcatgtgatatgtttctaatttttattgttgtatttatttagttatattgattttctacaaattttatcaatatatacatatatagaaatatttaaacaacaaatatgtattatatatactatataattttttaaatttccatcaatattttcaaaaaaaaaacctaatgaacaagtcatgtcaccttctgataaacctcctcttgccaatcacctccgttggcatgtccagtttgggcagttgaatcaacagatgctagataaaggacataaaagtatgcacataaaatcatgagaaatgagattcagcttctaagagtagcatttctaattaaaaaaaataattaaaaaagagctttttaactagcagagtattagcgtagaaaaacttatcgtctcctgacttacatagtacaaggttatatgtgtccacttttatttctaaattcataatgaatgaagcttttgagcattaaaaatcatgcttaaattcctaatgaacaaatcttttgagcatggaaacatatgctaaaactatataattaaggcaacaacatacttgatgatgtctctggaaggggtctctgtgattggtataactgcttttgctgatcaattacatgttgtgttggaggcaatgatcctgaagtttgacccgacacatgaagcctttgtggcatttcacgctgcagtgaatttggctgttgttgcaaacctaactgttgctgcatctgcggctgtgactgaatttgtgacaacatttgctgttgtggttgtgattgttgtgcctgagttggtagcaaattagatccactcggctgcgattgttgctgcattggagctttggattgttgttgtaacatgtgtacggagtgctgattagtctgcatgcttgagttagagttactggtctgagttccatgcagttgctgctgtaacccattactctgggggactaactgttgctgatgcaaatttgatatgttattttgctgagccattaactgttgttgttgttgttgcaggtttgggagattattctgctggctaagaagtctctgttgctgctgtaaatccccagcattgttctgctgtccaattaagtggctttgttgcatatttgtagaatttggctgttgattcataagctgctgctgtgacatttgtgtttgttgttgatgagcaacagaagattgttgagtttgtggctgtgatctaagaacagattgtggatgttgctggagcatgggttttgatggttgttgaatagaggactgattctgctgaagacttggcagagatgattgcatcatgggaggttgcatggaagctgatgtttgcacagcagctggctgagatgattgcaattgagttggttgcaataggttctgttgctgttgctgcatatgagtctggagcattgactggggaatattcccctgttggaacttcggctttaaagtctgctgttgtaactgttgctggtagagatactgagactgtgggttttgagattgttgctgttgttgtgggacctgttgccttccttgcacttgtctctgagtattagcataccctactggattctgtgaactactagacatattttgcatatttggattttggccaacaacatttgggatagaagtctgacttaagctagtggggggaggaagagtagatgatatgctggaagaactctgaacagcagcagaattctgaatattctgagatagtagttgttgtcgtgtttgactctgattagatgacagtggcattacaagtgattgcccttgattgtgtacttgaggtggcatgacaatagaacctatccaaaaacacaatttctacaaataatgaaacactatttttcagacagcattacttatcaaaacaaagttatatactgtatatggaacttaaccgctccatttggaagacattggaacaaattaaaatgtgattcaaatacatatattttgtataccataaagaacacagttttttggttcgcacttaagaatgtattgcctacctggatctgtgggtctgctattagcagggttggatggcaacgggttgggtatattattgttctgggacttagtctccattgtcagcatcttcagtgaaattttccgtaaataatcagactgccatcacatacaaaataccagttaagagagagcaatcgataaataaacacaaaaatatttcatagaatgtgcaagtacacaaaacataacatgtcaacataagtacatcatgtcagcattaaaacgtaagtaatacatattggtgactaagtgaaaaaaaaaaaacgaaaagggtcagaaatacagaagcacctggcttgtggccgcactgtaaatcttttcttcaaacctttcagcaattttcttcagttcaagcaatccctcttggccagagaaagggagatgcttcttcaatgtatccattcttccagtaagacattaaattatataagtcagtgaaaatgaacctttcatctattttatactctaaagataagttctgataatgtatacttcacaaagcaaaaaaaaagatttctctgactgtttgcaaaaacaattaaaagaaaagagacattaaaactattctaatgtctattttaacaaagaaatttgcaaaacaaaccatatacatgtttttttacatacatatgtataagctattttttaaaaaacaaaaaagcacataaaacctaaaccaaaaacaatagaaaagtgaagattgccaatcatgttttctgtttttaaattttttttaggattaaaacttttttaaccaaaacaagatttttacatatattttcaatttatgtcaacaatccaattaaatctttaattgtttaaggaacaaattaataatttctattaacacggcctctctaattccaaaagacacttacatcttgttgacaatacgttgtctcgaatcgtgctgcaattgagttctccaatctgtggtgtccatcgtgggttccccaccttggataggtctccaattattggtgtccatgctgaaaataccctacaaatctgttttccatgcagaattgggtagattgcaaaggacaatagtagacagaattattttaaatttaatacgatgtttgctaaactatcgaattaagcactcaaaaaacaatccagagtgtttgttacatgaaaaaaaaaataaataaataaagttataaaagcttagttttagtcaatatttatggaatttgattacatccacttcaaaaggtaatatcactctgaaacataagacggcacacaacccttcattgttcatagtcaattaagctacatttcttatccaaaaaaaaaaacaatgaaagggatggctagagtgcaattttagtgttcaattaaaagccccagacaatgatcatctttcgagacagagagagagaaatgaaatgttacaaatccaaaaacaagaacctttcatttcattccattccacgtcattttttttatctaagaatgcaactaaggcaaggacgggaaaaaagtgtgttgtatgggaaatggagaacaatcatatttctcacataacgttttaatgaacacttgaaaggaacatagaaacatgcctagaattagaaggaacaccataattcatactttgtcggttttcctgccaagcaaca

SEQ ID NO: 14060 - DNA, 8509 bp, Cannabis sativa
attacgttgtcagataaatacgtaacactatataattacattcaattacacctaattttaattttctcgtggcttttcaaacgtttcataaaatgggaatactattttgtatcttgtgttttgcaaaagttatcgattgaatacctgtttggtcggttaaatgaaaaatgtgaccttctatttttcaaaatattacaaaataataccctaagtttaatttttgttattatttaaatataattagcctgaatccagtttctagtacgaaacagatgtaaaaaaaatatataactagtctaatcataacacatacaagtccgattattatcaaattttattttgataaaaactaaactcaggataatattttgtactattttaaaaaatacaaaattcaaattattatctaacaaaatagaatatcaaattaataactttataaaacacaaacttcaaaataatatttaccataatattaatacatagactgaattttgtatacaaaccattcatccttacaacaatttttagattagtagttgagttgcttgaactgatttttaattattaaaacaaaatctgcaatacataaccatacaaaattcattaccatataattaattaatagatatggaatagttgccctaatctatattaatatatatattaatgaagatgaccacactaattaagactgtatttgattagtcctttttccaattctcacactctctttagttcaaacttgttcattctgtaacagcttgatgtgaactcctaatctaactataaagatatgcataatgtggttttttggggaattagggtttataatattggaattagggtttataatattttttttatatatatatatatatatatttttaacaactatatgttagtggtaaattttgtctcttcttttagtcaaccacgttaaatccattgtggtgctcattagtcagaattttcagctgtagaatatctaactaatccatttttcacacatataaatatttatattatttttttctcaaaaatatatgtagaataagttcacatgcccctatatataataggctaattaattatttttttctcaaaaatatctaactaatttaatttcgttcaaattttttaatatattgtatcaaatcgtacatcctgacatgtatcaaatcgtgttttttaaatttttattcacattatatttccgttaaataaatctaacaatctcaacaattcaaatttttttttaacaacttgaaaatttttaaaaatataattcaattctaatattgaagaaataaaaaaaaatattaattaacctatataatacacatgtcaaaacaataatataacatataaataaacatgatgtaatatatatggcatttaagtaaatatgcctcttaattatggagattggaggaccccctaaaaacccaatcttgaatttgaatgaaaatttgaatcaattaatttgtataagatttggacacacaaaaactatatatacatatagattgattattttggaccacactgaatcaacccaaaatatttccttggggacaaacatgctcaataagcttcttctttattctttatggtggttttgactttccaaccaagcctttttttttactataaatttatgtttctttgagcttcctctatatgtgtgtatatacatataatcatatattatatattatatatgcagacccaccaccaaactttagatccaaattcattttgctaaagcactactgtttaatcaggttggcagatttgtatatttctaacttttattagtataaaagaaaaagagtttacataaatatttgccctaatatttttgttataattagtaaaagtccaattaattaattgatattattgtatttgtacccaatgaacattaataatactattgtacccaatagaacacacaacatgatttttgctagcaataaatgaatatgacaattacaaataaacattttaagctttctcaatttctaatcatgaataaagaacttaatagttttgttccaacatttgaagaaataagtacatgtatctttaattgcttttaacattttttcttactatgcccatttctttacacaatgaacatttttaagtaaaataaataaatatttatatatgtatatttatgtatatgtttggactttatgtgagtttcctcctcttttatttatttttattattatataaggatatatataagttaaatttcaatctttggaattgttatgataaattctcatgtacttaaataataaaaataaataaaatgttactagtcctattgacaagccctatatattttgctatacttaatatggaaaccagctaattacttaagaacaaaataatgaaaatttatatatgaagattaagaaaagtttattataacaattaatttgttttgtttgtcaaatttcaagtggggtctaagaaaaagatgagagaaatttaaaagtttatcccctttttcttagcatgatgagtaatagtattgagtggtgcaccaaaattaccactaaggaatattgtggtgaagtttttttttttattgttatcttttttttatagagtaatgtgaattacaataggacaaaatgtcacgctgagagactttcaattaacaagtcaattgcttaactaaaattatacaaattaaccatataaatcgctataaaataaaacaacttgtataagattaagttattttaaaattttagacaaaagaacttaacactgcctaaaaatatcactcggtcttagggccggccctgaggtgagacgaaggaggcggccgctttaggccccaccgctcaggcccctatttcaaattaaaaataaaaataaaatataattagtaataaaataaataataatactcttaatattaaatatgtgctacagcctactgatagttttattagcttaacaactaacaactaagattttaagttcaaatctaaacaatagaaatgattggcacactaaacaataaaattgtattaaaccatcaacattgggtctggaaattgaattaagaaattgtaaggtgatgaattcaaactcaaaattggggcaataagtttattgggcttcgaggatgggcttctgggttagacatagcccaagttgttttttttggattatttcagaaaataccaaaatcaataaaaagtttatgtttttacgaaatatttaaatttttcttttttctctaagaaaagttaattagtaataatttttttttttatataaagttcaatcatatacataacatttatgtaattatgaaaattttatcatgaatttaagattgagtagtagatatgagcctaatataaattttacaaatcacttacagatgagtattatacctactaatgtttgacatcattagttaatttacctatataaaaatttaattggggatgtgttaatttttaaacttgttaattatataattgaatatgcttgaatatataagaattggcatatattaatttctatttttttttcaatatttctatcattatattaagtaatatagtatggtctaatcaatgatatgaggttctcatttatgatgggatattataatttatttgatatttttaggaatgaagactaatagaagattggttgtaaatttttttttactagaaagtcatatttcttaatatctataaatatataaaatgaactaaaaaataataataaataacaaaatagataaaaatattgtagaatgccacctcatattctttaatgctttactttatataaattattattattattattattttaattttattagaaaagaaggctcaatagcaaaccaggcattaatagatgtttaccaattctcagttatggtatagtaatatctaattagcatgattaatttattatgatagtatgtgcatatatgccatactaatctagttatctaaatatgaaaaaagacatgtattttatcacacatttttttaagtgtaaataatttgtaatatttatattacacttagctatcagataccaatttaatcttatgataaaatttcgataatttggcaaatatttgttacctaggcttatgacacttttagaagttttaataattctcaaattaagaattctaataaagttaggtcgctctattatttttgtttttataaataattttctagtgctttcttcacattggatttgattggactcatatatctcgcaaggataagttgaaaactacctttttttattacacattaactaaatataactctaaactaattttaaatgataaatactctctcttataatcaaagtaccaaatataatctcataaaacttattaaaattagacttcctaacacacttaatgggaatataacttataaaaataggtataaattaaagagtagtaaaaagaaagtaaaaattaaaatatgaaacaaaaaatgagtatagagtgtaatttcctccaataatattaatgtcacggctcattggctaaacatacccttagaatctaatctaatttgaagaggtttctaattgtggatgtcttcataaaaaatattttgagttaattcatatcacttgaataaaaaaaattaaaatttttgcctccgtataaaaaatcatagaatttttttagctaaaataactaaaatagaaataattacacaatttttcatttctctaatggttaatttatcataaaaaccttgtgaatttaaattcatgattcaatagaactaaaattcatattgtgaattggtaactaaactcagagctcaaaacataaactcatcatcatcatcatctgacaaattgaaatgggtttatatatgtaaagccattaatttcatgcttggccaaaacaagaattgaattaaataaggaggggtctcctttaatcagtatggtctaaaataggccccccatgcaagattattctcaactaagaaaaacaacaaacaagagtgaaatgttgcaacctataatggtgatgactaatgagccagaatgagcaaattataatatgcacagttgaaaaacaagacacagaaagaaagataccaaatggggctgaaaacacctactcttgaatggagtagtagtagtagatatgagaatgctgatactaatttaacctcccaactgtagctttctttttttttttttaacagaacaaaaaagggcagaagattaaaagggaaaaaaaaaaacaggtaaagtaaaatgagaacaatagcaaaaaacaaacttaagattggcacaaaaaccacaacagtatttcccttgattctttagtatcaaacctctcagatcttaagttgttccaggaactgtgctgtgaccgtcttcgattctactaaatcattcattactacaggtttgctcctcgcttcgtctgtttgagtaggtgattgattatgcagtgtaggattcggggcaggggatgatgctggatggtcttttttcgaaactgcaggttgatcttcttttggcattggtagaggatcgttttttctaactagaggaacgaaatttcgaacaggtggggtggcaaatactggcacagcttgtctgatatttacaggaggaacgattcgtacaggaggtgctcgcataacctggtgtgatattgcagtaggtggaggaagtgggggagcagagaacacaggtacggcggttcttattgttacgggtggtgctatgccatggcaagaagtcctcatttggcggatggggacataaggtgctgctcctacagcagggaacttcagaggacggcacccacggttttcaggtggaagagcctgtggttgtaacatatgactgtcgttaagtaaactaggatagggtctgtgccgagaagctgccttttgacaaattaaggggagtattttcgatgtggttgctgggggaggttgtggacttgttggccttgtgtgctgaattggaaacttctttggaaatggtattggtgcattaggattcgccattttttccttcaaccgataattcgacaatgctcgagctattgtgatctgctccaactcatcgctgctttctggttcagatgaagaacttgctgtttctttcgccactacccaaatagaaaagatttcaatcaaatttaaccagacaattaaatttaagttaatgcatttgatacttgaaagcctttaaatcttaatgatactcacattgttttaaagatgaccaggctgccattgccgcattcttctctgcttgttttttattcttagctggttctcctgtaaaaatgatccctgctaattcaactgtccctgtaaaaactggcaggtgcccgagacccgaacggtatgtcgtatattggggcaatggagctccaactctttgagctatttcctgtaacaggtttttgtaaaccccagtctcatcctaatagaacaaatccataatcagtaatcaaaaagatatgaatataaaccagaacaaatgccacccaaagggggtttggcaaagacattcacacagttactacatttcctgaaatagcaacttgtaattgattgaaaaacatttatggttatttatgaaatttactagatcattaactcaccattgaacaattgggtttaattaaagataataaaggaaatgaaaaaccagaattatatcacaaacgcgtaatatttaaggtaaataataacatttcaaatcaccaaagattattatcaatacattactctgtgaaatggtcaaccagaaaaaaataaggcaacttcccagtaaagcttgaccaaatttcttatgactcaaaagtaccctttactctcaatcaatttattaccataataaacatattcagagttgtaaggacagctcatagaaagatttgaaagagaaaaacaatgaaaaaacccaaactggtttctcacttgaatcatttcattactaaattaccttcttttttttcaactatctgagaacaagggcattttggtcattccatagataaagttgtcgttgccggagatctaaatctaccggcgatcagtaaagcttaataataataataatttaattcaatggaaaaataataataataataattattgttaattaatttcaaatttctttacttttcatgtaatggaatgaaatgaagccatcgatttgatcattaaagaaatctaataaagatcaaatccaaaaccctaacgaaaccctaacggaagttttaggaagaaaaataacaagagagagaactgaccagaatcctagcggcgagagagtgagaagggccacggctagatagagagttaagagcaacttcggcggcggagtgttcagcctgacggagagttgaacaatagtgagggctttcaaaggtctcaccgttaaagttaacggtagctttgaatctcggcgcatggtctggaccttctctaatacatgtataagaaggtaggttaaagcagctcctttgagctagctcttgaagctggtttttatacattttcgtatatactccgattcttctccctctcaaaaccctaattcaagtttcactacacaacacactcaccttcctcttattcaagaaaatgggtttcagggaaaccccagatcggatcatatgggtctactcaagtcaaactccagccggaaataatggcggtgaagaggagtatcactaccattccgaccaccaagatcaagggttttggttttttctagggtttgtttcagaaaacccaaaaagaaaaaaagtttttttggtagagagaagaagatgaagttgggaaatgaaaatgaaagagaagaagtaaaaaaataataataataaataaaaataattagtaatgggagaaattatttatctttatgattatttttgttgggagaagaaaaaaaataataataaagaaataattaatttaaaaataaaaatggaaaataaaagtatttattatattaattaattttttgttgctgagagtcaacttaacgttataggccacactgcatggatgtgatcttttcctagattttctaaatttttgtttttttatttttatttttaaatttaatttaatttattattattattattattattttctgtttaccaacgccaactctctctttcccgcccccacttttcttcatgccattttatttattttttatataattattagtaagttaaaaagataattaaattatttggtattttagatgtttagataattataattttaagagtaattcttctgttaactttgtattataatttcttgatcaatttttgtacttaaaaacacatatcgaaatatttattttttattgcaatgttatagttacaacattatttttgtaaatttttgaaattttttaaatagtttacattgtcaaaaatagatttgaagttttttaaacacgcgtggta

SEQ ID NO: 14061 - DNA, 6667 bp, Cannabis sativa
tctaactttgtatataaatatgtatattctatgaaatcaacacacaattcgaatcactattttctacaataatgaaagcaaaaatggaaaaggatgagaaggcttctaatgagccaagcattatgtgccaacactatcttgagattgagtaggaaactatttcatctattgtaaaacattgagactcagcaaatggtcttgccaatttattcctttaggctaaggatgattgccattcatttaattacatgctttgttgctgatggggttgtaggcctgtcttcatgtgttgtgtttagcatacatgttgaaatgtgagtgatatttggattgtagaggttggtagggtggctttatttatgttagttgcccttttcctctatggttgtttggtcaggagaattggtggaaggagaggggtgagggaattacttaatggatttgatgtaggatggttatttggcaggaaggatgggaaggagagtggacaaattctcagttttaaccaatttttaattcttctaaaatggagaggttttaggagactagtaacttgttgagtagaatttgattgcatttacaaacttacaaaagtgaaaaaaaaaaacatagtatagtaattgtacatatatggcaaaaagaataaaaagtaactctacgaatatactttctttacttccacctctcttttctaccaagaaaatggagaaggttttgattttgtctcctcctctcataccaaacaggagagatgaatgtttttcttcttctcttccttccctaagaaaaagaactttcatttcttcattaactatcttctctctttcctcccacaggttgtcttaaattactgttttggtggtgtggtgtaaatcttactttttgacttgtgatgattgtatgttttctccactctcttccattgccttccatcctttccctaggatggaagacttagaagagggagatgaatgtttttcttcctctattcctcccctaagaaaaataactttcattctttcattaatatctgctctttcctcccacactgtctttaattactgttttggtggtgtggtgtaaatcgtacttgttgacttgggatgattgtattttctctccactttcttccattgccttccatcctttcccaagtctactaagtacttatacccagcttacatatttaatgtaaaagatgaagctaatagaatttatttgatttgatttctatatgtctggagacattaatgccataattgacctaactcgtaataatgcctcattgaagtcacacacaacctacatttttgatacgactaaaatattgaatattaaaaaaggctaaagggtgcttggaagttttggtgtattgtgacttgtttaagatgttgctatgtgtttccatatgttataaagatatgttcccaagaagcaatcctcaacctatagcattaaagcataacttgcaagctttctttagcctcttttcttttatcgtcctctatcattaattcaagctcaatcttttgactaaaaaaataatataaaaatgattacaagaaacaacaacttatgctttgcttcaaagggtagtttcattgaagaaaatttgaaatctaggatgaaaatgaccatgatatcatggccaattaatttcaaataaagtattttgggtttaccattgacatggataattgaggttacatacatatgttccctgttgtccataagaattttggaaatgtcaacaaatatcgtgtgtcctctttgtgaaattttgatattgtgcaaggattattttgatatatttctttttgtagtctactataatttgtactgtagtaatttagtttgaattacctttcactggtgctctaggccctagtttagatgatacgacatcatcttttttgaatacattttttgttctgtaaaagaaaagcattttgctagtatgttataacttgtcaccaatggatttgtgtataaccagtagcatcaaaatttgaatgttttaatagatatttaccaattctagtattcattgcttaaagtcaagtgtctcttctaaccctcatatttgctatgtctcttgtcattctcatatttgctatgtcttatttcattgtcatatagtattaaattaaatatttctctttttatttcatttggaggtatatggtgtttgtgctgaattgtattcagtttgacaaaatgctgaattcttttttgctactggcttattggcgatcgataatttatttgtgttcatttttaatttgtttattgaagctgggccatggggatttttctgctgccaataccaaggtgttgcgtatggtgaatactctgaccgtcgataatgaagcaaaacaaactatagaagcattgcgaactgagctgcaaaagactaaagagaagttacaagcagttgaagagctgaaaagtcagtcaggtataaacactatttctcacacgacaaatcttgtatgtttacttatttctctacttttaagtgatgatgtaaaagaaatttttagaaagctcatgcatatgacctgataatatattctgtagttttgttcagggttgatggttgtttatatttagttttttgggggctttagatgttattgtaagttagtaatttttcaaaattttgtcctaacaaaaagcaatcttttaggttcactattatatcttctcaatcttatataatgaaaattgctgaaattccgttcgctttaaactgctgatgtaattttcttgacacaatgtacataccgtcaatatataatgttaggattccataaacttgaactacggttcattattctttttctctgcagtcctgtcataatattcacggggagaaaattgtgatattacatattctgcaaagtaggaattctttgagacttgaagcttcttttcttgtcccatcatgtattttggattttcttatctttcattgatatacaagagaaattgaatatgttctctagcaattgaatcagctgattggtttggggttttgatctcttgtggatagtttcataagcattctgttttaagtattgtatggtattctggtttgtcagaaaatttgaatgccaggcaactggaaatatagttataattgctttaggatgaaccttatagaatattcattccctttctcgaggatccattctggtgtcaattattaaaatgtagctgtcacttgaacagaatacaaggttggagatgacccttggttcaatggattacctcaactgtatactttaattgggctgaaggagccatatgatagaataacaactgtgtttggaaaagtaattgtctatacttgtcatatgctcagcaatcttttctctttttggtataaaatggggctcgtgatttggtgatcgaatggccacatcatttcaataaattattcttatattgataccaaagagctacgttgcctttttgtttcatgtacccccacacatgaaggaagagtacaatacaattgttgatccatatttttgaagttaatttttgaatttcgtttaaacttaacaggtgattctgggaaactagtagactcgtacatatctgggaagataatgcagtttaaagaacaaattgcaacgttagaaaagcgtgaagaaaggtaacttgctgaaaatgagattcattcttattgtgtcttagtcatctttataatgtaaaagcatgagttatattgtttgaaacattttaattttcttgtccaacagatacaaaactgttttcgctgatagaatttcagtgttcagaagggcctgttgtgaacttttcggttataaggtatgacaaagtgtttgtagttgtgttttaacacatttcaaatgctatggggttcatgtagacaggctttgatagtcttcagcttggcttgtaatgagtctcggaaagttgttgattgtcagtatgctacatttacaagagagtctacgcttcgcttcattaatctaacatttttctcagattgtaatggatgagcaacagcgtcctaatggaattccagtaacacaatttgcactccaatccatttatgctcaaagtgatgaagaaaagcttgaatttgaatatgaatcagggaatacaaatattttggtaagattggatcacactgtataggaatttatgtatttatgtgatagaagtgttatcggtaaaagataaataggcctatttatcttttccagttgatttgaagaaatatattattatgtgctaaaatcctttttccaacaggtaaatggttacacctctcagcctgagatatcgcgtcaggtatggatttcatatattatatacttgttatagctgctaggtaaataaatcttcatcctacatgtacactgcgaatcctcaccagggctgtaaagggtgttcaaaatatttgactaacttttctataacattttatgacatggtgttgaaaacatccattaatcttaaaagtttattttctaccaaatactatctttttagtagcgggagaaatgtggcatgtttggataattaggttatagtaaatgcatcccagtgcacttgctattctgttttcttgtattggaaatgtatttttaaaaggttgtcattttgtcttggatttttccaacttttttttttttcaaaaaaaaaaaagagacagtggacctctacacagcttttctactgagaaggactctgcaaggaggtatttcacaaataacagcacacacacacacacacgagatacacagcacacggatttctcgagtaaattcggatctattattgtttatcatctaattagtacaaagctttgtcttacccttttttagaatatacccacttgattgtggttttgcagatttattatattgatgttcttagtgcttataatttttgtagacttgaatatcatttaaattgctagcaacttcagttttaggtggttgtttatgcctaaacttgaattaactggtttgaacgctgcactgcatcttacaggttgagatctttgttaaaaagatgaattcaattccagctttcactgccaacttgacagtggaatctttcaacagacgaacattgtcctaaatgtctcaacttgcccaaattatgtataaatcttatattgtctctactctagtacagatgaaccaagattgtgggttacttgcatctttatcatcctagaaccctctgatcctcatttacacacttttgacttgggtgtaacactcgtgctagatatccaattccctttacttcttgggaactggattctcactaaatgatggtttgtgatttttctttcaaaatttacagcacaatgtaagccaccaaacattgtaaagctactatactaaagtctcaatcttactcgagcttgaaggtagaatacattgttaaatggaagtattatcttattatgactacattccatttcatgaaaaagtgagtgggtgattgtatggttcgccagtgggtttaacaattatgatgcagaggggctaagacactattattcatgcaatctattgatgaaacttatgattttagagactatattgcaaggtccagtcccaacaccacaacatgtccgagacatgtctcattagtaacagacatgatttgacaataaacaatagaaatcgtagaacagtctctgagtggatgtctttttggctgaagtggtggctttattccttcccttttgactttaatggcatatgtttcatcgagtttcattaaatctactggtagaagtaggcgcttgctacgtacgtagcctttattttatggtaacccttaaaggattacagttttacgtggttttccctacaggatgacaacttttaagctatgcacttataattaatcaataatcaacaatatacattggttggatccattgaatatccgatgtgagagtagacataaatctcctcagcatcctacaaccaactctttagtccttggggcccttaaaaagtgcttatattggaacatataccttagcaaatagtttggcctttacttttgaaggtgtggttgaagctttcatatttgcttacataggaataagatgattactcaactccatcaactctgagtagacttcattaatttatttattgtcataatggttgatagattatttgttacttttctctcgctgacataagttgtgtgtcacttgccaatcctctggatcatgcccggaagttctaagagaatatttctttgcaaataatctttaagcttaaatgcattttcagcaaaataacataattgacatttgagctcagatcttttgagagaaatgttaaatggcaccacactataatattgtattttttatcactcataaaaatatgtaatatcgagattgatttcataggcaaatatattgtgtattattataagtatagatctaaataaaatctttgttgattaaaagagaatgttaatttcatgtttgacttctttaatgtgacaaaaatattttataatttattaattaatttgagctgagttgtttatttggttttatattttgtgtatttgacttttacatttttgtattaattatttgcagccactctaaaattctgaggacatgcaaaaaatgataata

SEQ ID NO: 14062 - DNA, 12057 bp, Cannabis sativa
  modified_base (698)..(699): a, c, t, g, unknown or other
  modified_base (788)..(789): a, c, t, g, unknown or other
tgttactatctcacttagtcactcactctcttctctagctagtctctctattttccatcaaaaccaaatccccaaagtcagatatcttctctcctctttacttttcttctttctcaatcataatcttacaatgtttaaaaattgtaagtaatcattacattcttaaatctccactctactccataactcaatctgagtaagtattttttctttcaatatttatattacaaaatcaaactcatctctcacacattttctctatttttacataactcaaactagaagagatatgagagaataaattagtaacaataaagaaaatcccctattttaaagagaaaaaaaagttcagttttgggcggtttgaaccgaccaaaccacaatttactttggtcggttataagaaaaattctaggttagtctgtcggtttttggattgcaccaatcaagattataaatcgaaatataaatttttatacaaaaaaaattgaccacaccgatcaatactcagccctacatatcactttgtaattaatctaacaaacaaataaaaattataaaaatataggtaaatactattttagaccctatattttataaaagttaccgattggacactctattttgttaattgacaatagaccctgtatttttgaaaattgtacaaataagaacctgaactaattttttgtcaaaannaaacttaataataatctgatttagagatcttatgacaaaactggttatattttctgtattcgttcatgttagaaattgtcttaaagttnnttatattaaaaaaaaaaattgttgaaaaattgagcttagagtgctatttttttcatcttgaaaaatatagagtctattttatcatttaacaaaacagatggtcaaattgataacttttgcaaacacaggatccaaaataatatttactcaaaatatatgtgaaggatcaattatgaataaggttgggcctggactaaggcagactagagccgcgcctagggcccaccaagcctagggactagaaaaaatattttccctttaaaaatactacatattttttaaataaaagacccaataatttttttcttcttaaaatccacccaatctcaggacaaccttgactatgaagtgacatagttaattaaatcaacacctaacaaagatgaacagatagagcctaacagacttattattttaccaactttgagtactttttatactcacaaaaattattgagaaatgtttaaaggtacaaatggtgtcaatattgttattggtgtaattaagtatcgagtctcatataattaaatataataatttttaaagaatataactaattaattgcaaaataatagaaggtactaaccaccaatactcaaaattatttagtcaattacaacataaactttagaaactcgtgacacaaaattctctcaaatatatatgtataatatatgtgctcatttgtatataaaatataccaagtcgctctcctaaattccattggaagcaagtaacgggtgctatgtatttaaagtttttgtcttgatattggtaagcaattaagtttttgacactttgaagacaaactaagtagtaatcatcaatggagtagtaataatctattcacataacaataataataataataataataataaaagtaattaacacaaggacctagatcttgaaatgccctaaagaattaatccatctctacatgagatatacttgtgtagattttgtcaatattagtgatgggaacgagggaaatacagctacaaggttagccatagccacccatgtggaagaattatgtgtataaacaagtacttttttgtttggattgttgctttataccaaactaaattaaattatattgtaatgatcgagggatggggttatggctttttaattttggacccaaattagataatgactgaacattggaacttgccaatccaaaacataatgagatggacaaaaaaagggaatggaacaaagtgaagcacattatgtttgttgtaaaagtatttttccagggtggtccaactttccactcccagggtttgctggacttgaaaagagacattcatacatgacatgacaatacactagagcatacagtgagagttgagagagagagagattgtaatcaatctttgaattatgattacaattattattatttggttttgttttggaaactttgtaatgtaattacaatgtaatcactattatacactatttatataaataaaataagcattacactctatacatcatttatataaaatcaaatgactcttatacccttcttttctacctttaccaaataaatatagaaaaactttaatcaatacaccactcattcccattatctatcattccaaaaataaactaaaaataaatactattactatttgcatttcattaaatcaaccacctaacaagttaggcaatgttacagactttggcattctagttggagcattgctattaagcaccggtggtgcctagcacttctagacatattaccttacgattggctaacgatactccctaaaagctataatattaaattatatgggattcgatacttacttggaccaatagtaatattaacacataagaaggtactaaacaacactactgccttttagcatttctcttctaattaagacccaagttaagcaagttaaagacaaatgtcttaaaatacatcgtcataaactgatcctgataaaatagaataacatgaattctcatcaaactaattcacttaacccttttctctatttgaaagggacaaagtgaagttgaagtgtagtggaagataacaaaaagctcaattaaagaacctaatcataaaagtaacaaacatagatgataaacatgattagattgcactatcattatagaattaatccctttctgttcatttcttgggataagacttgtatagaatggtagaaccaccaaaataataaaatactgagtatggatttcacttatactggatcttacagtgtatgtagaatcatttgttagcttcaatgacttcagatcacagcctccaccactaggcaactctgcaataagatggtgtaagagttaatactcttcctctgttatttggatggcattaaaaaaagacagataaatatgagaaagtaaagcaggaccactgtagtctgtagctgctcccactagcaaccaacaaagtatcattttgcgtccaaatgtttatgttcagagaagcaacaatccaaagaaaaaatatcttcattctcaagatcttagaaggggttttcaacagaaccatcataatttataatcaagattcaattgacatggaggctggagaaaagaatggatcggtaactgtggttaaaatgttatgttcacacacacagcacacactttatacatctaagaatagtgaaacacccaatgtgatacccaaacaagcagaaggcattccatttctatgtcatcaaaaaggataaaaagtaacaagtcgcagtgtgttctcttgtgagaatgcatccttgaaatgagtttgcacctctataaactctttcaaaaatcatttacatagaggaaaaatcaatttgaaaacttaaaatatatggcttataaaatattcagactaagaatattagagctattttaatgtcttaccaaaatgatttacatagagataaggctaagcgaaaatggtgaactcaaaacatctacccagcattgcatgtttatttcttgatgcagtacttcgaacgcatgctatctagcttctctgcatacgcgagtggtgttgcctcactactaaatacctcgttccatatcttaaaaagatctggtcacaatgacattaaatcaataaaatcacgacaacaatgctctaaaatatacagtaacggaaaaccttttaattttagaagcacaaagatatttgatagatatggccatattagtaaatgtgaacatgaaaagtcctatgaatggagaatgtctagcatgtcaaatttcgggagcaattcaatgtaagtatgagtatccatacctgatttgtctgtggatgtaagacacatgacaagtatgttgaatcttgggaccttggttaagttctccaaaaaacttactgctagatccatttcttctctgtcaaccaaaagtgcatgatgagtacattaaaaagctaaaatcagaacacaaacatcatggggataaacattacattacctgaaaaaggatgcaatgcacttgacaatgtccactagaactggaacagtcaaagcattcttgaatatctgaggtaaagcttcaggagatatagcctaaagaaaccccttcgttagagaattacaaaataaatagattattttccattactgaaaatcaccaagtaaacaactgattatatcctttattgaattgtgcatatttcttatgatgaccctatgaattttggacacatgagaaataatttgtggctgtggcatcaagaagttgtgtcaacatacataaaaaaaaaaaactagaattaaaataagactcgaaatcaattactaataccaaatctaccaattcattctcagtcctctacaggccccgctaaaaagttttaacatgaccaccaataagtaaaaattaagctcattgacatgaacagtttaaatgaaaggtaaattttttatatttacaatgaagaatgaaaatctaaaactaaaccatgataactcattacggaccttcaagagactagcctgtaaagcatgatcaccacaaagtcttcgccaagaaacctcaaattgataagcagaagtagggggtgaaatgtcttttgctgtttcaaccatgactttggaagcaactcgagatgcaagctcttgcactgattccctaagctcttgcttgctagctacttgttttctctacaaaaaagattcgagtaataaaatgggaaacagaactaggaagggaaaacaatttaagatatattgatggaaatgcaatacacacattaaaatataaacagttactattagttagagtttcatatctcacaagagcattgcaagcctagcagaatttagtagataagacaaacattagtatgcaggaaaattaaatcgttgaaaccttggtgtagtcttgagccccagacacttctgtcttctgaataatacttgtgacaggctgcatatagatatttgaaaaggcaataagcatttgtagcagacatattgtgagacatagcaagcatgagccaaaagaaatagttaattgttaaaaccttgatgtaatcttgagacacaagcttctctgtcttttgagtagtacttgttacaggttgcactatatgattgtttactttggcatctttcttttctactttctgcatcttttctatagtattccccagtgctgtggaagtcttatgaagaattaactgaaaagaatcaagtcaaaagatttaatgtttctttccccccaataaaacctccaaaatcaaaaaaatctatactaaattaacagaacaaatataagcacagtaactccagtgatgtcatatgattaacttactaatcaataatcattacataagaaaaacctagtccgtgaaaaaagaaaaatacatgcaaacatcaaataaacctccacatgcgaatggccatatatttttctatcttttcaaaggaagaaaaaacaaatactaatttcaagtcacattacagaacaaacaacatttgcagaagaagatatactcactttctcatataatgacttggcctcagtatactgtttcttgatttcttgattttgaggctccaaccgcaaggcaaactccgcatctgcggttagctatatatattaaataagagagatcaagattacaatgatacgtaatagattagatgccataattttgatatcaagaaccaaaaaccaaatttggttacagtgtacacataccctcaaggcattctttaagttttccaagttcttttctagctgttgctcgccgggaatatgctttaatgtaacgatcatccatattcaaggcctctgtgcagtcatcctcagcatcctggaatctaaaggaacaaaactgaattattcggtcaagtattggaagacaaaggaaacttaatccaaaagcgattggcaaaatgtcatcatttttgctgggtaataagtaaacacgataactgctatataaacaactacatcactttctgaattaaaatgcttatacagcatttggttcaaatatcttttaataatctaactgcaccaaacaatacaacagtgcttgtaataaacttgccttttgaccttcagatatgccatagccctgtttgcataagctactgctgttggtgacaatgcaatgcttctagaataacagtcaatagcttccttaaacttcttctgcttaaaatactcattaccctggatattaaggcatcaacagaaaactcactatctacattgactaacagataaaaatttaaaaagaatatttaataaaagaaaagtaaaactcttaccgattccttttctgaagcggcatcagcaaaactatcatcagatatggagctattcggcagtctggtaatcgtatcatagttcctcgagtaatcatatggcgttgagctacttaaatagtccattgtagaggaatgcccagctggtttcctgtctttaccatccatttcagtcttcttggaagatgaaacctttacacaaaacaagcattgtaaaaagctatcaatcaggtgaataaactcatagcatacaccaattactaataaagcttgcattgttctaaaacccactaattacaagaaagaaagaaaaaatgcttcaacattataaaagggcaacacaagtacatttcaaactatctaattaaataacgaaagaagaattgatcacagtgtgaaggacccaaaaaacatacagactgaaaagacaggtttttccatacgagataagaattgttaagtgtgggtttatggaattaccgatagttccttacgagaatcctgtgctttcattttcttgtccttgtccttaaacgaaagctcccaatcctgcaagtcactcaaaatcccctggaaatcctagatgaacatgaaaaaatgaagcaacaaaatgcagcgatgaatattatgagctctattgactagtttatcatgatttcatatataagtaccacgcaaacaatcaaacaaacaagtgaactgtatgtaatatcatcagtgattttcattttcaatgacaggcttgaggtttggttttcttcgttcgattctcgtaagatgtaagctagatttatgaaagaaggcatgataaaaaagagagaagaagtatgatattgataccagagcttcgtcccttccgtgcttagttggtggagccctagccatgaatgggagttgaagttgcagaaggcaaaggaatgttctactgtagtgtaaactcaaaattgggtagccaagcacctaattagaattttttttcacatgtaccatatagcccctgaattttgaagtcctttgaaaattccctcaattattgacaattttttatttaataacttttaattttaataaaaaaattcagaaaataacgtaatttggtaaatattaagattcatcaaacataatttaatttataaattattgaattaataaaattacacaaaaaaaaataaaataaattcagtgtaaacgcattgataaatgcattgtttagtaaatattaaagttgagagcacaaaaattctcaaatatttattaacaatttcatttaaaaaaaaattaactatttaaggtaaatatcattaagatcccaaatttttatagaaagtatgattatcccgcaaattaaattttgtagctattacatcctcagttaaaaaaaattcacatccttaatttgcttttctgtcaaaataattgcaagaaataacttgtgagaaaaatataatatattaataatatatatatatattattatccttaggtcaatgaagcttccaaaagacataatttggttttctttggtttatttttgaaaccttttgcacaattcagtcttgaatctttggagaattagcagaataataagaacagcaaaatgaaggaggagagacaattgtagtggtatttatttatttattaaaaaaaaaagtataaagccattatattaagaacaatttacattataacattactcttctcttcaattacattttcgaataaaaaaaaaaagaggacttcagatattgaacaatgaggtacaaaatcaagttacaacaaattgggtatagaaccattttaaactaaagcatcaatttgggtatataggtttctttggcaattacataagcttagagcattggggtttctcacattaagaaagaaaaaaagataatgaactaaacattggataaatctggttttataattacttttactaagaaaccacatgtgtttatattatattccaatttccaactctgttacttattccaagtatcacaactataaaaccgttgtctgttatttgaacggtttctctgcaacaagtaactataactgacaatcagctggtacatataagagtagctactatttacacaaatacttcttatttgattataacagagctaaccaaatgaccaaatgccacacatttaacaagttgttaaaggtgacatcttttcgtgtactgccttgtagcactgaagactgcataggggtagcttcgattctgaatcacggtacttataagagtttgtacaagatggaccagcgcatttctcccgaggaggtggataactgaatcagcataatcaaaattataagataatggagcagaacagagttttaaagcctgatataatgcataataacttaaccatatgatatctcccagtttattcaatcacgagtcaacttaatcaaataaaactaaatttcccgctatgaatacagtagaaacaataatggtaagaaccatgcaagtcaggaaacaaacatttgcgagcaatacttacttgcatggcttggagttgaatatagttggcagtcccatttcgttgggaaatgtcactacagttcctgagggacctagcacccatctaactgagtctgatgcaattatcatagaatttgcagccctctcctgtaaggattagaggatgaatgtagtgttaatagagtgaaatgctttatcaagtgatacagtgtaccaacaagagttcctcatgtaattgttacctgtgcgcgatcttcttgccgtttcttaattttgtcttcttttttcttcctactagaatcttggcctaggatctttctgattgcctctgcctaaggttagcaagggaaaaaggtaaattaacacacttatcatcaaatatattatagggtagatggaatggaagactaataaagaatgacaaacctcagattccctggcagccttctctacttgcatcctgcgtctctgagcagcctccgctttcttcagttgctgctctacgtcagtgagtttctccttttgttctgtaaataaaacaagtaatgatcacagcttagtggaggtccaaggtggcaaggtaaaaaaacctaatagcatataagaatacatcaccgacttcttggtggagcaggtggcaacccatttggaaactcgataagatttgcatctaagctggaagatacatcttttccagtttgaagggctctttgacgggtagtcactgtcatttcctttttattatcgacaattgaattgatggactcccttcttggttttctcctcttgctattgggctcatcatctgaaattgaatattcctcttccacataatcagtatcatctgatattcttcctgatctggacttcttagcgtccctcctcaatctcgatgagccatagtctcccatatctaaatcatattggcgatcagaactcctctttaacacctttgaaatcctcctatgtttcctactgtctctttcctcgtcgtctttgtattcttcatcataatcactagcagtcctagaagttctgagtttttcaaggtactgaacctccaagctgttatcctcctcttcatccagtgcatcatctataaagcgtctcctagtaaccctcttgctcttataaacaggttcatacttccctatttcttttgcatatatattatcttcaggctctggagaatcatccttaccagtattaatgacatttctagaatccttgcacagcctcctgtacaggtcagtccccttatctgaagtaaaggtgtgattgtcagccgaatcctacaccaaaagtctagttagattggagtcttcaaagtctgggaaaaaagtctcttagctaaacagtgctcatcaattcggtaaatagaaacaggaattcacggcaggtatagtgaagaacaaaaaaaaaaggtttccaaaccaaaaaagcaaacaaaacagtaaattgtaccaactaggaagaaacttcagtacaaaagtaacccatgaacttccattttttgtgccttgcacaagcatggtattattcaagcgaaaattatttttactttttctaatttctgtctgaagaaatggttcttgatacctgaattatcttctgtcgaggccggggggcatatgaaacatgggaagattttgtagtggatgacccaacagcagatgcaccatcagatatggaattggcatgaattgttcgcgtaacaccacaaactttaagcttaaccttcttcactttattctcattatccaagtcatctgaaatagattcaaaatgccccacattggttgagcttgtccaattagcaggggcaaggacacctttgctgcaccttttagaatcaatcccattatgcttctgctcgttactgctacctcgaaaagatccattattagaagcttcatcagaatctagaagaccaccatcttcattttttatcacattcttggaagactcagattcagcattgttacaaaatgaggccctagagctacacaggttcagattcatttctttctttcgagtaactgcaccgtaaccattatcttcatcgcttgatcctttgctgccatctgatagagatgagtgttcacggtaatccaaaggcactgctgattcatttcgaggacgacgggaagcattactcctctttttccttactgcactgttaccatcactgacacccaaacctccaaatccttccataggaatcaacagctttgagcaacaatcctaagtgttttctgtcattcccgaggagggaagatagaaagagaggaagaggggaaaaaaaagatctcaataagagatataatctctgtagtttgaatcaaggacgaaaaaccaaagaaggcttcaaagtcaccaattcagatacacatgaacatactttgatcattaacacatttggtgcttaattgagattaagagtctcaatacaaagatatctaaggttctaatcttggtttcaccccaattcccgaaccccctcagaaagagattcatatgaacatactctggggtaagcaaacacaaatagaaaacgagaatggtaattgataaaacacgttgtaagatccattaaagcttaaaatattattagtttatgacctataactggtttccaaaccctgaaatttatgcttccttcagtgtaatggcattgataattatattgctatagtgaaccccatcaccgatttcagaaacgagctatcaaacttgaattataagctagtgattcaaactcaaaatccagcttaacaaaagcaagatttgacaaaaataatatcctcttcgaatcttgcccaggcgaagaaataaaggggaaaaagagagaactttatcgaactagctcatcaaaattcagaaccaactaaaagatatcaaacagaagtttaaagctaagctaaaaatttagaaaaaaattatacttttctatgtgaagagattgataaccatgtgcaattttatcgtaaccat

SEQ ID NO: 14063 - DNA, 4285 bp, Cannabis sativa
  modified_base (135)..(176): a, c, t, g, unknown or other
atcttaggtctatggatctcaattttggcatggttaggttcgatctcaagaatgttatttgtgttttttgatttgttagttaagcctaccttttggcgtaggtgatatgtaggtaatatgtacattttgggaacnnnnnnnnnnnnnnnnnnnnnnnnnnnnnnnnnnnnnnnnnnatctatagcttttatctggacataaaagtaaaacgatgatctctttcgagcttggttgaatagagataaatgattgaggcctcgtaacgtggaacttgagttggcttaaagtatgggtatttgggaggctctcagttgtattaaggacaaagcatgattgacaaatgacaatgattcttgagcctgatcgtttaggggcgattaaggccattcgcagtcatgtcatgatgaactctcttcttgatctaattgttaatgattgtagatatttgtttagtttcattaggattttttgttttccatatccaacgaaagagaagatggaaagatgccatgtttaggcatttttgtttgatatttctttttattccaataataatttgtttagactttcggtttgctcttaaaataaataacaatattgttaaattaaaaaaataaataaataacaataatgataaataaatagtgtcattgtctacggtgacggctcgtgggtcagtcagttcactagggttgattctatctttgctgctagaagcaatcgctgccatttctgggtttatagtatcctaaatcctaatgggcgtgcttgatatttacagtgcttcctctaattgcttcttcagaaccagttccagtcacacaccactaacaccaggctctgctattctcgggaacaagaacagggtcgtttccatggcgtccgtacagcctgtggagcaccaagtcaacgacggccaacaacaagtcactggagactcttttattcgaccccatttcagaaaattgtctccttatcaacccattttacctttcgaggtatttcgctataatccccacttccccttgtttcagtcagactatgctatgaattagtttggtgataacttttaagtgtatttaagtgactccattattgtttaatccgagctattgcttgctttcttagtgaatccgagcaattgcaaaactaattattttgaaattgattaagaagggcttttgggtagtgtttcacatagatgaataccacactcgagcttttttgtaaagggttctcttactattcgacattgttaaaaattgacagtgtctttactgtgaactgttctccggactctaaagtaagggctgttgtaagtagggaaacagaaagctttggagataggatgaactgggataaacgtttctggttaaagttgttttgacttgacttcaaatgatgtaacacaaagctggggttggaatgaagttaaaacatttgtacatataatccaaatgcattttcggatagtggagagaacatttcatgtcaaaaatgttttgcagctattattgggctgctgccatcatagctgaagtcaggtggtatccctgttacaaacaatctgtaagagtttttcatttggaaatggtggctgcagcatagatggtccactggcttagattggtggaaaattgttttcgtattcctgagtagagcacttgacatgggtgttataacacatacaggatgtggcccttattccttaggctgcatatatatcttatcttattcagaaaggtgaagtggtttgacaacttcttgaaattttgttcgttttcattgcagctggctctatgatgcctctgaatgatatttaagcttagttttgattgacttgggaaagaactttcttttgctaaaattttagatttgccttcttataatttcttttgcagaattgccattgattaaagtgtttgcttgtttgttttgatcattattttgggtaaaattaggcaattgccacttgttagtgtaatttgctcatccgtcctgacaatatatgatatctttgctaatttatgtaggttttatcatcccaacttggaaggaagcctgaagatataatcaaactagatgctaatgaaaacccatatggtcctcccccggaggcgagtcatatatgctattgtactttctttctctatgaacaaaaatatttttctttactgttgaatatagtttggttgtcttttgtttttttcctttccaattttaatttgcacaattatgtgcactgcattaataaataacacattatttttcaatctccatgattccctgattgcaatttcagattgtttgtaggtttttgaggctttgggttcattaaaatttccttatatctatcctgaccctgaaagtcgtcggctacgtgctgcccttgctgaggattcgggccttgaagctaaatacatactggtgggatgtggtgcagatgaattaattgatttgattatgcggtgagataaagaaatgtgcccattgagttacaattatgctgttctcaatgtgcgttgtccgcattatcaatcgatcttaatttccaaactttgctctgttttcgattaaatgttttgctgaaggtgtgtgcttgatcctggtgacaagattgtagactgtcctccaacttttaccatgtatgaatttgatgctgccgttaatgctgcaggtgtcatcaaaggtgaatagtttgggatgtgaagatcatattatatctgttttttatgtagcaatgtcaatgttgatttatttttgcttttatatgttttgttaaccttacctcagctgtttttttttttttttacagttccgaggaaatctgattttagcctagatttggaactcattaaagatgcagttgaaaaggagaaacccaaatgcatatttctaacatctcctaacaatccagatggaaggtaattcctattgtttcatgtattatttgacatgaagttcctacatctatttcttattatgaaatttacataccactgttgtctaacacggttaattcaatgttccttctagacttacataatgattgtgactttaagcttcccagaatgacaacttgtgagctacattcattgcaaaataatgaaccagcatcattctaaaatgacgtggtttactaatgttgccttttatttgcttgtgcaatatatcaggatggactttatttatatatatatatatatatatatatagttgctgtttgttttatttgggatcttgctttaggtttaagacttattttctattttgtcaaatttccttttcttttagtcaatttcaaagtggagactttgaataattgtttagtgacctagtaaaaaattcctcattctgccaaattaattttctcctttcctattttttttatttaaatcatagaatgtatgtaatattattcttgtcttcagtaactggtttaatttattgttattgtttttatttatgtacaaatatttatataaaaagtaactgggttgatttcatgctgtatatgccaacttaagaaggtgaggtatctattgctttttctatgaaatttttgataattttggttctagtctatagatttggttgggatgctatgtttatgctatgatttgtctatgacagtataattaatgacgatgatctcttgaagatcctcaagcttcctgtgttggtgatccttgatgaagcatacgttgagttttccacaattgagtctaggatgcaatgggtgaagaagcatgagaacttaattgttcttcgaacattcagcaaaagagctggtattcacaattttttatgcattgtattttcaagctttaagggttcagtagtgcactgttattctgttgtggaacaattgatttcattgttcaaaatgtccacatgaattaatataggacatgactattagtaaaagaaggaaagagaataaaaagaaaaagaatcagagcaacgcttgttaacatggagttattacaagaaatatatcataaagtcataatgctaatatgcgatgaaaagctaagattttaaacagaccttcctttaacctatttgatcaattagtttggtgctaactgtaaattggttacaattataacaaagggtgtcaaggggattgcctttttgtattagttgccaaggtgcttattgtagctagtgatattccattttgaagcatgttaaaacccttacttttgctgtgaaataaaccactaattatttctcctgcatgcacagagatgttgaacaattaatgtatatcttaatatag

SEQ ID NO: 14064 - DNA, 6726 bp, Cannabis sativa
tgtttatacaccattcttgacagagaattgttatttggcaccaacggtatctaatattactacttgcttacgattagtcagcgatattctataaaaattaaagtaatttgtagtgtaaatacttaagtttaattcttaattatgaataggtacttgagcttaatttttgatgataataatacataaattatatttatagtaatttataggtatatggtcattaagtgttaagttattatccatgtcacttttttattagtatatttaaattaattttaaataaaaaataaaaatttaataatttagatcaatttaattacactaataacaatattacactttaaaaattactaaacatcaatattgtcttttagcatttctaattgaactgttataacttataacacctttgaattatttctttcttcatgtctaaacaatatttattttacaaaattaaatagttgccaataattttctttagtttcctagttcccatatctatgtttttacaagttttatactaaagttaccaagttcctacagcaacaagccgtcttagctcagccggtagagcgcgtggcttttaaccacgtggtcgtgggttcgattcccacagacggcgtcatttatttgtttagtccactccaactttttcctttcatggcttttgtcttcagccttcaatctctaacccacttattagtttttttgcagtgactatctgtaaatgaagaaataatcccttacctcaacagtatcctctgtgaatgtcaatatctgtaaccgatttctctttttcaaaatcagcttttacatgatgttataaacccttttagaagctatgaatccattcaataaattaatgtttattttcactaagaaaacatgtttctctccattcaatacataaatggttatttgctcaaaacaaatccttcaatccttctcttttttcaatggagatgggggaagggtacggggaatggtgtgctccattaaatgataattacaagattaatgtagatgcagcattatttgagggtgctagcaaatttagttatggctgggtttttcaagatgcaaggggtcatgtgttacagactcggtcagattcttgggttggttgtattgatacgaatcttgtcgaggccattagagtgaaggaggtcctaagttggctaaagatgctaaatattcccaatgtaactgttgaaacaaatagtctcatcactgttcaagtcattcgaagctcgatcaatatgatctcctgctgacagttgtattgatgattgcaaatccctgttgtttgatttgaaaaatgttaatttacattttattaatgctaatcgtgttgctcacggcttagctagagtttcatggttccggctgaacttctatcccgagtagcattcttgatgtagttggtcaagagatgatttaataaattacatcttttattcaaaaaaaaaaaaaaaaaaatagttaatctcttccctaataaaccaattacatacgaccattagacataaattgactcaaatttactcagccctactttcttggtccactaaaaaagaggcagagctttgtgttaatttcttgttcagcaatttactatggataagtttcaatggcaatgttaagatttacattcatcttgtttctcgagggattaaacccttcaaaacgttaccttggaaagcacgttatgaatttgaaacataaagaacagaaggaaccatttccaactcggaacgcctccgatgaattagaatacaaaaccagcaatgtaatataatttttatatataaaaaaaaagtcccaagatctaatttccaactagtgatgtcaaaaatgccaaaacagcaatcactatcatgatattcagaaaataattggactgtagaggcttatctgggcttccaccgaccgcttcgtactctgcacgaatcttctccttcatagaacttgacagctctctctgcaattcaaataggtaacaacactattgaatttcttttttattcctgttcttcattttaagacttccaatttatagtttgaaaaaagcttcatcttgtattttatttaaaacacacggcataagaaaactatgacactttgttatttagtcctgcaataaaccataaacgatgaacaatttaaatatatatgctttccgttgtgaaaatctatcgtgctataatttgaaataagaactcgataaaatttgacaaaatgaacaatgagatgcaagttttttattgctacgaccttgccagtcgagtatttggctgctacaaacttctctccaacaggttttgaagaaccgtcatcgagcacaataccctgatcagaaaacataataaaagatttaagagttacatacatttaatagttaaagcaactgttggcttatgtaggctgggtaaacattaaaaaaaaaaggcaaaaaaagtcgcatttaaggccaacaaacctctggaggatcaaattttgccccgaggttgctgagtttagcatgggcttcagcataatccttgaagaatgcttcctgatcttcggcatatttttcagcatacacctgcaaatcatgtaataatttgttagtacaagagaaggagagagaatgctatgctatgctatgtatgagttgcttgactttactctgaaagacgggtcatcaaaaagaacagcatcagttggcaacaccagtagatcttcatccttcctctctttaatatcctgtacagaacaataaaacaatcaattagagaaactctgaagtccgaatccccaaaatagatattttccaatttaacaaatatcaaataattctcaaaccttaaagtatgaattgtcaaacttcaaccatttcgcagtccaggactgtcctccaggtgctcctggcccatctttctgcaaaacaaacatattctagtaagctatcattgttggttgctactgttttcattattacataatagtagatagtacattgcagtatcggctagataatcaccaaattgttcagttgccctcacgaaaaaaacctaattcacatgtgtcaaatttttattacttctcccacaataaattactactatcaattcttactataagatccacccctaattctcctcttactatacaaagcagttttgaaaaagaaaaagcatatcgacgtaggctcgtaacagaacagttttcaacattaacaaacagaaggatttttccataccgtatactttgtctctggcttgccccaaccactacgctctggtctggaccttcccagtgtatgagcaccagatagtgcaacaatttcctgtagattaatttaaaaattacataacatgaacactgaaatgatgtccagaaacctaatatagagccactgaaaactcactttgtcatttaaacccattctgtagaaaacctgtcgaagatgatcagcaggtgaaggaggaccagcatctgaaaatcaaataaagtaatctttttttaaaaaaaaaaaaaaagaaaaatggaaaaaattcaataatgattaaggcaatgagactagcacaaacagtgtgggttgtcaagaaattatatataagttaacttaccgggaagtcgcccttcttctgggcactgttcaggtgctgacacatctactcttccatacttcatagggatttttgggccacctgcgtcctgaagtttcagggaaaaaaacttggtaagaagaatatctaatcaacatagatatcaatagtcaaatgagttaaggacaacctccactgcggtagcactggccaactggaacaagtctgcatatgtcacaccagagtatttctctttgattggctgaagaagtttcaatgcattcacaagacctgaaaaagagcattacttgtaagttgtaacttgtaagacacaatgatttagcaacgatattaacaatcaagaaaagtgtcaagagtgtccttacctgcattggctgcatgtttaagctcaatctcaaatctcaaacttccattagttccacctctttgcggccattcctcaatgttcttgttataagtaccagcatcatgccatcccaggcgaacctattacgtaaccacagattaccactttattggtcactttgccaatcaagaagctttaaaaaatatttgaacaactgaaatctgactagaccaattctattaaatgattctaatcttcgtatttagatcataaccacaggttaatactttattattagtcgagaaatttttaaaaagaactaagtataatcactaaagtttcttctcaatagttctaacaaaaatgcagtaacagtggaaaaagagaaatcaaccgagctcaaactatgacaaaatcaaatcaaacaacaataaaaataccaaaataggatggcagaagttcgtcttaagaagctccttgatatcttctctagcattcttcagctggtccggatcagaagcaaagcatttcggagcagaagccgcactgaaacccctggccgataagaaaaccgacgtcctcttctaaaaaaaatcaaagaatcaaaccaattcacacacacagccatctatctatctatccacacacacaaatatatatatatatataaatataaatgtaagtattatgttatcttacctggttgaggaagagacgagaaacgaaaggagaagatcggaggcatttgagcgatgaggaatagcgagaggaaggaagagagagcgtagcggcggtggctctggcggcggaaggaagaagacgagaaccaaaagctgcggaagtagccatgggagagagagagtgagtagttgttttggaaaggtgtgatggaagtgttgtcgccattatagtctctctctttctctctctatttaccgcctctcctttttttttgggtttggattgagaaaatgaaaaatgaaaagcctgtaataacaaaggccggtcttattaagtagtggcggcccactatttataggagccccattgccgcgctgttcttcacccaaacatctctcttcgctaatcttaatcttattttaatgatctttactcaaagtcaaaacccctaattattatacattaacggtaaaaatattttattttacgattttattgtagttatactttttttttagttattgagtgtgaactcacaaatatgtgacgatattattgaactacgtattaaataagctaaaaaaaatatatcgtcatgtatttttgagttggtatttaacgggcttaattggtacttaacaactaaaataaaatagttcaacaaaatgataaaataatttattatttattattattaattagtttttagtttttgaaagaaaactaaaaaattcattaaatggcacaaaatctaaaattacaaaaagagctcaaaaaattaacaaactaaatctataagaaaacttgaccaccaaatacaggattcatctaaaacaagaactcgctttgctaaagaataagcaataatattcttaaactttacaatgagccatattattaattttgtttttttttttataatttggaaaattttatttttcaaaaagtattttataatttaaattagaaggtgtgttaagatggtaattatgtatcaattttttttgacaaaataattagtttttatacactgaaaataaaattagttaataattgatatttaaagtgtaaagttttacttacaatggagagtatatattcaatgttgtatagtttttaatttgtattcttttttatttgggtcaaaagttcgaatatggcacaattctttattgggaaggattatatttaatcttttgggagattaacttgttgtgatggtgtcattttttatgggatgggaaccctcgaggtacatattaatgattcaatcaaagcaaaataaggtataaagctcgtataattagcacgtgattctcaaaattatcaaagctatcaaatagaaggaaaaagtacatgcatcatcctttttagttaggaaaaaaaggagcactagtttttatttttataaattataaccaatatgaaaggaatcgagttaggtaagtgagtattggatttttgtggggagggatgtttggtggcatgccatttttctctttttgtgcttttgtgtttagttgaaaatgatttggtcaaagtgaatccccaaattcaaaccaaccaaaaccaaagaaaacactatcttttctcttataaaaaaaacacttgggctgtttttaatttatagcctttaaaagaaattatatataatgatatatattgtagatgtatatgataaatattttactaagtttttttttaaaaaataaataaataaataatttacagtatcaaaataaattttaaaataattacattaaaaaaaaaccataaattggaaggagaattttagctatttttttgtaacgcaaattattcaaaaaaaaaatcgaaaaattaatgagatgtctactataattgcaatttatacatagtcatataacaaaaaataaattataatttttctaagtgtcgtaaatataaaacaagattaagtgagaacttttttggcaccccaccaaaaaatttccccaaaaaatataatgattttcctaattttaaaaagtgacaattgtttcttttcctccaagaaaatagagatgaattcatctttgtgacaattttctttttttttatatatat

SEQ ID NO: 14065 - DNA, 4117 bp, Cannabis sativa
aaacaccaactatatatagttatgaactattcagcaaaaagaaaaaaaaaagttctttaataattacattccggttcataaaaaaaaaataacagctctttcacaattagattaattttttttgactaaaaattaatatttagtggcaaaatatatatcactatataatatacttttagttcataatctaatatatataacaatcaaatttgttaggactaaacatatttattataaacaaatattattttgagcagataagttattttctttccttgatggggtatctttattcttattaatattattttaatttgagcaaataagtggttattccttgatgataatgtttttattcttattattttgagcagacaattaagttatgttcttgatcgtgtttttaattatttttattatataaatagattcttgtttttctttttatatatatatttccttacaaatgtatattttttatttatttgctatcaaaatacttttgccttatagagcttttaaaggaattaagtcaaacaaattttcaagcacattttgttttactataataatcataattttatcactagactaaattagtagattgctattgccatgagagatacttattctaagatcattgttagaggttataacaagtttgttttcaattttttaagagtttttctaatctgcattattcatagatattgattgtgcatgcatgctcttagtgtgaatagactttgtttaattagttagaagatattcttattatttctggaatattttttatgacattgtgattattttattgtcattaattgctttcaaaaataaatgttaggactaaaatacatttttttgtactaattttaatcacaagaaaatacaatttttgtgactaattttagaactttcagtgattttaacataaatataatgattttgttttagtcctaaatggagatcttctttttattattatttaatataagatagtccttatgatataatttagaaatttgtaataagatcttttcatagttcttttggtcacttaattggtatagttacagtggttagtcgcctgggttgagtaaaagttaataaacgtaattaataaatcctttgtttttgaactttgagctgacatagatttttttttttcactggttttaattattaatatttatttgcagcattaacaataaaaacaaatcgtatttatttgttaattaatattatataaagcaaacataccattgccaatgccataacattccctctaatctatatcacttattggagccttattaattttagttttattttcttggggcttctctcataatatttattctctatttttggctacttagcttcaaattcaatcaaactagcttaattaattaattaatgcacgtgaaattatatggtactctgcctcattattgtactttactacttcctataatatatgtcaataatatatataagtccttaatcacattctactttagaaattattgtttatgtttgtgcaaatatgtactgcaaatcattcaacccttaattgaccacctacaactactgtaacagactttttatttatgataattttggataagaaattcaacttcgtgtttgggtaatttggctcaagtacttttacatatatggcctcatagagtatatggaaaattaattatatgagtaatgattcacacacatttatattgtacgtaattaataataatttgaataattaactcaaccacacaatctaagataatgtagtctctacctaaaatatataaaattaattcaatacaattttctaaaaaaaaattagaaaattatttcacatttgtatatatatcaaacaaacgataattgcatagaaattaatgttttatatttataaagtatgtacatgtatatatatgtgcataaaacatcatgatctaagcataacttgcttcaagaaattgaaaagggtttttagataatgtaatggattggttagttgggtctttaatgccataatggggagtttcgagtagttatgtcttgcaagatacattctcttattatttcagttttaattttcataaacaccatattttagcattactttctctactttgttgatgcttcaaaacacagtttctatactttaattagctttttctttttcgcttatatattttatttcaaaaaccaaaattcttctctctctcttcctttagttaaccatctcacatagagccccattttatttaatggaggttagagacaaggaaaatccctgcattaatatattaaagtatatataataaaaacctgttatggaaatttccatatattctgtgtgagttgtgacttataaaatcagcaataatttgattactttctagaattatttatcaatctattattttaatatatatacaccgctatatattaataaaaactaatataataccgcgttcatttattggattgtattttatacaatacatacattatacacaaataaattattttatagatatatatgattctcttccaaaactagctaacatgtttgacgataataagagtcctcgtttgccacgacagtgaggaacatataacacaacatctttttttctgattctatataatataataatatgcacgattcaatattttttttttaaaaaaaaaataataattaacaaatcggggacgtaaggctctatccacattcataagacgaaaatagcctcgactacattaacgtatatatctatatagaaagaaaaaatacttgaaaaaaattaaattggctttaattaggtttattaatgttggtatatatgtggagcagtaggtgttcgtgataataattaatgccttggattagctgatgagtggcaagtgcgtgcaagtttttattataatgtttttcttttatatatatgcaacattaaataattgtaatttattattttttttttgaatgtttttctcttttataattaacctgtgttattcattaaactgaaaagggaaaagggaaaagtgaaaagtgaaagtttattactattagtaatattacaaaatttatatatacaaacaattaggctacaaatcacgatttatcttattgttattaattattatgtgtggtgtaaggagagaacctaattaattaagtttggtccatttgggtcgaacatgtctcacatataattaatatttaattgttatatattataattaatttataatacaaagagattagttagctagtgcaaagagtttgtcgtacttacaagtacactacactactacacacatcactattttaaaatttcatgttaaacaagtttaaaaattcaacagtttttataccaattttaagattttcttattgtgaaatatgttgtaattatttttctatttctttttagatttaaaaaagtaaaatatatatatatatttgtaatttgcaatttttttaattaattttcttataaatgcttttcatttttgaactgatatgatcatgtataagtattgaattataagttggttataataagttaaagttcctggacaaataatcataaataggcccttaaattgttatatattgatcactatacgtcttttaatctcaaatttattacaatgattattagagttattaactgcaacattattcgtggcataaaaatattttacccctggaaataaattactaattgtattgcttaacatatagatcacagactatatattaatatacaaataaaaaactataacaattagtttaaagttctttattttcttttcaattctttgaataaaggaaaatataaccccataaattcatgttcacccttgagtatggagacacaatatataactgatgtgttgtgtgttaaaacaagaatcacattaacatgaaaattaactgatcagatgtcaaaatataaatattaaaaattattaattagtcataattaaatagcgataaataagctagttgacgttgacgtacatatatacatagctgtgtggagttaaccatgtattaattaaaatcatccaacacagctctctc

SEQ ID NO: 14066 - DNA, 2579 bp, Cannabis sativa
caccagactggttcctacaggccttcacaaaaggacagttaactagcaggtgaacaatagattcttcctcttttcgggagtatatataatttctaagcaatttttccaaatgaaagtttcatcatcactcaccaatgacaaatcatgagctcaatgaagaaaattataactataagcactacttttatgtaaaataatgtgtcactaatgtattgtttcttttaaagtcaaaaattaaaaggcaataatatagtttaatgtatatttaggaattttattaggtagaagcattacttttttgcccctattgtaggataatttttaatcatttctggtacttagagaaataatatttgttttctttttgatgttctattcataattataaataaatatttttctcacatgttttttaaaattttaaaataatttatggtgtcgaaaataaaattcaaaatagctaatattgtaccctataaaaagaagaatttttgttgggcctctgggctagatgggctaggggcccacttacgcccagggtcgagcctgattgtgctaattatcaactctaggtgaataatcaagtagctaatcgtgtaaggtaatggtatttttccttaacataaaaataacagatgacatcaaaaactattaataaaaaaggtagtacaccatacattaattgtattttttcacattttcatttccatgcaaaagaaacatattgacactatattttatttcttatataattaattctccttttcaacaaataaaaagaagtctttatttgcaatacatagtacttcttaggaaatgaaattggagataccccactattaatgtctaagaagatgatggaggaaatggctttttaggatgtgggaacttaaaaatgggatggttaaatggtggctttttaaagaaaggatggggatatggtttgtgaattggagttgttggttttgcttttggttccggctttggttctggttctggttttggttttgtctcttcttttggctttggttttgactcttttttgggttttggttttgactttgactcttcttttggttttggcttaggcttggtgtttgggttgggctcgcatattggctttggtttggtctctgatttaggttttggctttgactctgattttgatttcggctttggtttggtctctgatttgggttctggctttggctttggcttggaatctggctctggctttggctttggcttggtctctggctctggttttggcttggtctttggctctggttttggttttggcttggtctctggctctggttttggctccagctttggctttggtttggtctctggctctggttttggctctggcttaggctcaggcttataaatgggagctggaggaggaagagggtttacaaaccctggagtgggatgatgaaaaaaaccatgatgttttggaaatggaagaaatgtatcttcatctttgaagccagaactctctgcatgcataacatttaaaaacacatattgtcaaatatatatttatataaatataggaagattaattagtttaaatataaggaatataatatgtatccaaatacctgaagaagcttgtgagaaataactcacagcacataaacacataattagtaaccatttgaaaagatcagtagaaggaatcctcattgggattaatattgtaaatttatacacatatgtgtatgagtgatttgataactcaatggagaattgtgtcatatatatagctatatgttgagaaggctaataattaactaattgttttcacttaatttaggccagccaaggtctttaaaaatggacccatatatattgagctttttattattgtgttaattttctttaattgagaattcccaactgtcctctatcttctaacttcttttattttatttttttatgaaaacaaattaaataaatgtatatatatcatatactaacaacatggttaaactttcttattatactttgttaaggaaaattccattgtaaaatttgaatttatatacatacatctagtgtattttaaatttttgaacacaagcttactaaaattaaaaaaataggcacactttatattcatacccattatacccttctttcttctcttctaacttcaccatccatattctttattcccatctatattgatggtgtccgatgggagtttgatagtggtccgatggtagcccgatgctacctattttttttttaatttttgtttttatgtttttgtacataaaaaaagtagcatcaggtgaccatcggaccaccatcagaccatatctacatttatagatgttaagctccattcattaagctcgtcaggaaggcatcaggccaccatcagaccaccatcggaccttcgtcttcaacctttactcgttttaacgacaggaaagcatcaaactactaacggaccaccttcgggcctgacaaaaaaaccaattttttttgccaaaaactcaaatctaactatttttaaccctaaatctaacatctactcacacataacaaacattaatcatacaatt

SEQ ID NO: 14067 - DNA, 5958 bp, Cannabis sativa
gctcttttctgtctatttcaagttattaatttataatactatatattctattaaattggatgaacatctctaattgtgaggcccgtgccatacgtctcacgtaataataaatcatccttcactaattatggaagtagaaggaaatagtgtaaaatagtgtatgtaaacagtaaacacactcatgagttaatttagaaagaaaatattcgtgcatctcaagaaacttaatcaatccaaattgaaacggtcagtctcttggaaataccaagtaatttcgcaaatattggttgaggagaaaaaaaaacgtaaagcatcatcacataaaaattggatgacgacatgcatgcaagaacactgtgttactagaaaatttacagcaaattattccctattatgattatgcttcttaatgggtgaattgactcacttattcattaaaatatggaatggatctaatcatctccttgtctctgttttttatttttattttttaaatcgtttgtttactttcgaaagacctaaatatatccatgtgtattttattttattcttttctttatcaatttgtacgtttatattattttctactatcatcaattcattggctcaacatttcatgcaaactcttatgctttttattctcattaattattaaaattatattaatttctttgattttcgacaaatatataagacgatatggaggcaaacttacacctataaaacaaaatcaataaactaaaaaaacatcaaaagatgaagctactcttcttcaacttaaacctgttttaccacatgtaattgcatgcatgccacataattacgttcaagcattcccatcccaagtggctgtacaaaagaaacaacacattggtttgatattaatcctcaaatattgatatggaaaagtaattatttcaaataatttatttagaaaaaggaaaaaaaaaaagatggatacataaacgttagtatctatatatgtaccttattattgaagctaataagttgcgtaaaaccgtcttaatactttctaagaagatgcagtgcaccttcttcgtaaacttgtaccaaataacctgtatatataaatgtcctgatttcctcttttttttacagtattactatatattttaagcaactcaacaaagctttgcactcaatttgtttttgagctgtgtttcgtcaatacttgtttttctctctacaatcaaacagtcgatatatatatccatgtctctaagacctggccaaaaactcgtgcaaacagccatgcatgagaatgagcatgaatatggggatgaatctgggtcaccctcaaaatccaacagacgcagatggaggttggctttcatggccatatcattcactagtgcacttcgttttctagccaagaatgttcatgaaaacaaagcaaaccttttgcgctccctatcctatgttgccattgacgtccagccctcagccgacgatgcggctgacgagcctgctgctggtaatgaacacctttcttttcttgatattgatgcgaaagatcttgctgatattgttagggctaagaactttgacagtctcatgactcaatacggaggagtcgaaagattagttgaaactcttgaaactgatgccaagagcggtattaatggtactgattctgatttgatacgtagaaagaatgcctttggagctaatgaataccgaaagcaacctgtaaaagggtttctgtctttcctgtttgatgcatttaaagatacagtaattattatactcttggtatgtgctctgctctctttagggtttggtatcaaacaacatggctggaaagacggatggtttgatggggggagtattgttttcgcaatcttcctcgtggtcgttgtctctgctgtgtctaactttaatcagtctaaacaatttcaaaaactttccacacagagtagtgacataagtgttgaagtggttagaaatggacgacgccatcccataaccatctttgacattgtagtgggtgatgtcgtttgcttgaaaattggtgatcaaatcccagctgatggactatttttgaaaggtcattctttgaaggtggatgagtcaagtatgactggagaaagtgaccatgtagagatcagtgctgctggcaataatccctttttgatatctggtacaaaggtggcagatgggtttggaaccatgcttgtaacttctgtgggcatgaacactgtttggggagagatgatgagctcagtaaacagggacttggatgaggagacgcctttgcaagcacgactcgagaacatgacatctttaatcggaaaggttggtttgtctgttgctgcacttgttcttttcgtattgatggttcgatatttcacggggcacacaactgacgataaaggattgagggaattcaatagcagcaaaacaaagtttgatgatatcatgaatgtcgttctaggcattattgcagcagcagtgaccatcgtggtggtggcaattcctgaaggcctgcctcttgctgtcactcttacacttgcttattcaatgaagaggatgatgaaagacaatgcaatggttcgaaagctctctgcttgtgagacaatggggtcagccacaataatttgtactgacaaaacaggaactctcacattgaatgagatgaaggtaacagaggtgtggattggcgaaaaacatttgagtgagaacagcgcatcacagatgtctccaactgttattagcttactgcaggaatccattggtctaaacaccacggggagtgtttataagccaagtcctgaatctaatactgaaatttctggcagcccaactgaaaaagcaatactatcatgggcagttttcagtttgggattggatatggatgaagtgactttacaatgtgatataatccaagtagaggccttcaattcagagaaaaagatgagcggagttttaatcaagagaagacacgaacaggcacttcaagcccactggaagggagctgcggaaattgtcctcgccatgtgctccaattattatgacagagatggagtcattaggccgttgaataatgaagaaagaaaatgtattgaaagaaacatccagaatatggcaaccaaaagcttgagatgcattgcctttgcctataaaaaacttcaagtagaaaatggacaggttgatgagaagaataaagaaagtggacttactttacttggtgttgcaggtctgaaggatccatgtcgaccagaagttaaggctgccgtggagacttgcattgctgctggtgtgagcattaaaatgataacaggcgataatgtgcacactgcaagagctatagcaattgactgtgggattttaaagcctggtgaggattcagaaagtgaagctatagttgaaggggtgcaatttaggaattattcaccagaagaacgaagagaaaaagtcgaaagaatttgcgttatggctaggtcatccccatttgacaagcttctaatggtccaatgcttgaagctaaaaggtcacgtggttgcagtcactggagatggaacgaatgatgcaccggctctcaaggaagcagatatcgggctttcaatggggatccaaggtactgaagtggcaaaggaaagctcagatataattatattagatgataattttaattcggtagtgacggttctaaaatggggcaggtgtgtatacaacaacattcaaaaattcattcagtttcaacttactgtgaatgttgccgctctagtcatcaactttgtagcctctgtgtcttctggtaaagtccctttgactgctgtccagcttttgtgggtgaaccttattatggatacattagcagctttagcattagccactgagaaaccaactaatgaactcatgaagaagctgccggtcggtcgaaaagaggctctcataaccagaatcatgtggaggaacatcattgcccatgccttgtttcaggtgactgtcttgctgactcttcaattcaagggaagatccatctttggtgtagatgaaaaagtaaagaacacaatcatatttaacacctttgttctttgccaagtcttcaacgaatttaatgcaagaaaactagagaagaagaacatatttgaaggtatacataagaacaagctgtttttagcaataataggaattaccattcttcttcaagtattaatggtagagtttctcaagaagtttgctagtactgagaggctgaattgggggcagtggggtgctagcattggcattgcagctttgtcttggccaattggttggcttgttaagtgcattccagtttcttgaaactacataccaactacaactagatcctgcatggtgaataatatatacataacaaggagtttattaatgcttaggtttttcttcacccttttttatttatttatttatgattttatccgtattatttctgcttttatcttctaaaccctctggtagtttatgtaagtttcggtgtatgaatttatataaataaacgtattaggttcttgtaatggcaatttaaacactagaaattaagcactattatattcaaaagcataatggcctgcgttttaagctaataataataataacacaatgcatttaaatgcaacattttctatctgcccctgttggagagactgaagttttgagaattcaagaaaaatcagggcaagatgagagttgtttatcattacattagttgccaagtggaagtatagtgatgtatggagctgaggcatcctaacagatcggtagacttgaacctactacttcatttgattgatacgacattctaacgaaatttatttgattgatatatgtacttacttcaacttagatcaaaaatatttcctctttacctaaactcgtacttgatttagtagctttttccaaaagacgtgaatgcaaataaaaacatctctgggataagcttcgcggctcttctcatcacaatgcctattgcattggcttgtagtacaaatataacttatactaccaatgtgtgcaagagttttcttatatgaattataatgaataaataggattttttttccaaactatggcacttgtaaaattttgctctgaatttgtatcttctattttttttttttttttgaaaaaaaccctgaactataaaagccattgtaaatgtccactttcagttacattctgtttatttttaaaataatttgttgatgtaacactaatgtgatgctaattcagtgcaatcaaaagtcaaggcgaagcagtctaatgacgaattttgatgttaatatatatatataattagtatcaataaactaaatttttactaacttaagttaatcacatagaccaccgcattgcaaatatattggtgatcatggccaatacataggcaaatgtttttaaaaaatgaacagaatgtatataaaggaggacatttgcaataactttttatagtttaggggaattctttttgtttctataaaaaaaagttcaagacatttgaaaaacactaaaatcatgaagcaactgcaaacctgtgatttacaggaatatttgaaaggtataactgcaaatgcaaagttaacaattaggataaggacatcagaaatcttgagaaaacatattcaataaccacaaaaaataaaatctcaacttttttataaagacttcaagatcttctgtcactttgtcacaccatatattgataatagcatagagcacgacaatctatagtcatgaacaaaaacaaaaacacaaatttaatatttggatacatagccacaactagcactcaatatagctctttcttaaaggttcccaactccgaaatcaaaaactcaatccatgtatcatatccaaaccaacgtagatccaagtataaaagtaaatttgaagcaaaagaaaaattgatagacccccaatggtgagataattaattgacaaaatgacaaaaaaaaa

SEQ ID NO: 14068 - DNA, 12200 bp, Cannabis sativa
tgaattctcttttttagttgaatttacgacggaatttgttgattaggttgttcaagggattattagtgagcttgaatcgcaaggggcacttccgaggagcaattccagggtttcttccctcgctacgtgctgtggaccaaggttagtgagttctgactttgtcacttacgttttcacgatttagttttttgacaaagaactgcatttgatgggagaaataactttggaaaataacttgaaaataaaatacagattcttataaggttgaatatcttagttttggggcatagttaataatttgcttgtatgctcagttaggtggtttcttttcttttctttttgtgtttaaaatgagaaaatacagaattggatgcaaaaaagtgtgtagacaaaatggatgttgaaaaaataagaagtttattttatctttattggaaagtttgagttgctgcattttgcttgggttgtgttaaagtatgttaattatacagtgtgggttgtaaactgatgtgtgttcatcagtacattgattttctgtttcaagaatagttgtagttgtaatggttcatgagccctgagtgttgactgcaggtttgtagagctcttgtggcaactttctttgcatgctttgcgagaggtccatagacgaacattttcatctgatgtggcttctaacccattaccatcttcgttaactgatgtggccttttctcatgctgcaactctacttcctgtgacaaaggtagtacagatttgccagttatttttcctgtgaaaactaatatctaatcattactcgaagctattgacatcaatttgtaattttggccaattgtgctgatatgagaattgcaaaatcaaacctttgagagagtgcctggagtaaaggactgaaagaccttagttttgttgcctttggtaaaatggcattttttaaaattatattttggctcttcagtgtggtcaagttataacttaaagggactatattctgcagtgaactttaaattgttggactatgtctgagaagtcctcttccagaaaggcttttgcaaatatctcctgctgctttttatttatattttttccagtaactgccgctagtcaagatgtcatgctgacattattaggattgacaagtaggacactagaatttatgactttcgaagtcttgtagagttatatttgggacaattcattttgaatttaggctattttcagttttcaccatgaatactttttttgcatacatagatatgacttgaggtggcttacggtttattttgatagttcactttgtttttcttgttgtttgacaattcatagtgatattgttagattcatggtgtttttgggtttagtttttcttctctccttccgtgtatgtagatattcacttttttaatttttaaatttcaaaacatcttcacttgtttttgtcaacacttgttagtgatatgatactccttttttaaacaggctagaatagcccttgaacgaaggaggtttcttaagaatgcagaaacagcagtacaacggcaggctatgtggtcaaatttggctcacgaaatgacggcagagtttcgtggtctttgtgctgaagaggtagtgagagtttcatctagattcaaacgagttcattattttagatacttctttggtaataaagcaccttcttcttttggaaacttggatcataggcttatctgcagcaagaactggaaaaattacatgatttgaggaacaaagtgaagttggaaggagaacattgggatgatcttgtatctagttcaagtcaaaattctcatttagtgtctaaagctactcgtttgtgggagtctatattatcacgcaaaagtaagtaatgagtttttattttcttctattctaatagattttgattaatattgaacaattttgatacaaatggttcgaagctactcgagatgcttggtctctcccttaagttctagaaactttacataaaatcgcttagttacaaaatgaataagactttggtatttataggtttaggctaagactaacatgacggctcattaaaaataaaacaactcggccactaacctttagacacctagccaaataaaccagtaaactcctaagactaatcagccttgggccagtaagctggataggaggcctaacagtatgtgtctgtagtaaatataggatatgctcatgataataatgttcattgaaaattgcacttatctctatatcactcttttgtgattaaaattggttcataacctcgataatatactactatgtgcaggtcaacacgaagttcttgcttctggtcctattgaggatttaatagctcaccgggagcataggtaattctgtgttcaattttattttggcattctatggatgtttagtggctgcctttaaaattgtaactcttgtttttaggtaccgaatatctggatcttctttacttgcagctatggatcagagttctcaggttccctatccagatgcatcaactgcccaatctggtgagctcacttcatcacatttggatgaagtagaccaaagtgatggatcatatatcaccacgaatggagaaaggatgaataatggcttagatgcatctgtttcacaagcaaatgatgaaacactttctcgagcagaggaaagaagtggaagagcccaaacaactgttgatgtagcagaaattatcaggcgttggacacatgccttgcagcgcattcataaacaatcacttcatttggtatgtcattgtgtttgtgactatacttgtcagttctcatttgagcttaggtatgtgttggtctttttttctcccatgtaggccttgtcaaagtgaagaatagttcactgtatgctgcttttcagttcgaaaagcagtcttactggatgtgtgtctactaaaatttgtactattaaattgcagttgttttgctccttttatttgagcttactacttatttgtgattttagacctccttgagttacctcagtttactcttgactgaaatgaatttggattgattcaatgacactgagtagtttgatgtgtcagtttttgcttgtagtttctgacacagtttagtgttattacaaaaccatattttttcaggcaaaagctaatgatggagagggtcctgaaattttacgaagttctcatgatggtggttcaagtggtcatgcagaatctttagctacgactcttgcagaacatcagcaacacttagctagctttcaggtaattccttttatagctactcgtcaagctggaatactctatttgagaactgaccatttaaattcccacatcccagtttaggaccagttctcctcttctgttctagtatataaaacttttgttctattttcttcttttgcatcttttttttttttgctaaggaggtaaattcattaaaacaaaacctcaaaatctgttaacaacaacaggtgttaactccccaaaattaggaaaaccagaaaaattaagtcgtctagcccaagaggcatagcatcagccataccattatcatctctgggaatcccagaggaaattacagccaacaacatcaagaccagaaaataaaaacataaaaagggcagccaactaccacctaggccatttgcgattattcagttcaatttatttttatagaaaagaattattggaatttttattttacattttgatttttaggaatgtcttgttaattgtattttatacacaatgtccaaattttctgttgaaatgttttcctgttgtgtactcatgtaggttctcatcaatcaactaaaagaagttgccccaacaatacagaattcaatatcagagtgtacagagaaagtaaatagtatttctaccaatctgcctccaatggttaaacgtcctggtcgttcaacctcacctagtcaagcacatagcagcaggactatggtaacttggtctcctttctatgccaaaagctaacttctgggtcatatacagccttgtttacatgttatatgctatgttagacactacctcttcatgaaaaaaaaaccctaaaatttatgcaggaaagtagtacggatgatattgctgaggtggcttcaaaaatgtccaatgttcagattgagaagatttcggccagtcctcctgctttgaagctcccacagttattcactttgacaccgaattcttctggaaagagtggatatacacataagcgttacacttcaactcctcaaactaaccaagtagaaagccagccagaaagaaaatctttggagcagcctttgtcaaataatcatacagataatttaccacaaggttttctactggcatctttgcccccactttcttttcttgtagggtgattaattactttaaaaaggaaatttatttccttaaaaaattgtggatgcttttcacaacatgcatgcttttttttctttcctttttaaaatttcttgtttcatattttgcagataatgataatttttatgtccaagatttaaaaagagctgttagagaagctgctttgtcaactcaatctttgaattcagaaacaccaggggacaatctttcagaagagagttctgagcacttctttttacctctatcatcatctggtttctcacgtattagccctgaattaaaaggaccttcaataagaagtcagacaaccaggagcaaaaggttgtttgcaactcaaaaagattcttccgtgcctgaaaatcgtgtctctgatgcacataccgaaagcaaatatgacgagttttctgacgttttaaatggtttggattcacttcgtgattttgaccaagtaaatggatttttttcggttgctggctcaaatggtactgcttctgatggacaaagatcattctatgacattgatgaagctcacgatcaggtcttttcacctcctctgctaatggactcatcactgctagcagatacttatgaggacttacttggtatgttgctttggccacaacgtttatctgttacgttaactatatatatatatattgttggtgagtgagtttattttaggaatttatttatctttgtgggtaagcttattagattaattgtaattacaaagcgagcatgacaagaaagcttggaatataacataatcgtagatattacttccagtgtcttctgacagttctgttaattgttttgcagccccactctcagaaaccgaaacagccttgatggaacattgagataatattctttttgagcaaacttgcttaaggtttgttgatgagatgattttggttacctacatcatagtattgttccccattgctcggaatattctcttgttactcgtgtttgtcagctgacatggtcctgccattggtttacgccttttctgatccttgttgacatatgtaaattttgtttctcatgcttgcatggttggtatgagtaaatatgaagcaactagaagtgagtttacacattcttcatagattttcggtaaacctgctagaatatgcagaaaattcaaactccaaccagcaccggcagccaagcacaggttatgcagagaattcctctggatatgtttgtaggtgttataagttaaaaagaatacgatgattgtaatttcttagctctgattggtatcaggttagcaaatccggtttccctagctccttctttgtttctatgaactgcccaatttgattattggactgattttcatattatatatcccataaattgtgtcttacattacatttacatatgcatcatctgaactgaaatttctttttgctcatatggagagtaattagaatattgttgatctgcaaggttgaattatttgtatttattgaaattcctttgttttttttttctttggtgtatttgtcttcccaatcaattgatcaactcgcaaagtttgactccttacccaactcaatttttcgtgtctttcactacacatgataatgagagcttaagtgatcaatctgtcacagttttgttacctataattgagggaaaatgaaatagaaccatttattgaacaaatggtcaatttaacttttcaattcagattggttgaaattattcaaagtcagattgttgtggcagaaagaatatagccatgaccaccctctacaatttcctctactaagttttaattgaagtgtttcttttctttttgacccataattgtcaaaactttagagtgactttcagaatgttttgtaatagttccattctgaactttcttttttctttttctttttctggaggaggatttgtaagagtcaacaagatttaagttgctagtaattggtaggttaaatttgtcttagtttaggaaccttgttgtactacacttgtttgtgtgaaagttcgttcgtactttcttatgatctttctttttagttgaatatgttgttaggattttcttctttttttactgtaaacaagtgggtaaattatttgttgattttactcattgaaggctttatttttatgtaatgtattatatccgattacctatatttgtaagaacatttttgtgcttttaatataataaaatttccttttttatgagcaaattatatttgtagacattttcaatgtcttccacatctgcacagtttgactttctttgatgattaatcatttgattaaaacagataatatatataattaactacccaatataaattaaaacagtggacctatgagaagaaaacgtaaaacactagtaaaactttatttagagaaaccccaattggaattgtatttaataatcccataaactcattatgaatttttatagtatttttcttggggtaattgtttttgagaaaaaaaaagtgttttgtagaagaagcatcattttggcaactgttcttgccaaaaaaaattaaaattgattgcattatcatcattattatcattggattttcatcactaatttagtgctttagtaataatattctagttttaacaaaattgttgtgtcagatacagttaatccaatcttatgaagcttatcaaaaagtaactgcttaagtaaaaaacaattttaattatactactgtcaattaatacaaattaataattatagtctaaaaaaagaaatgaaacagtgtgcaaaacacgcgccacatgaaagcgtcatgagtttcgaacttcatactctttcagcgcaaaattacagagaaagagaacccctttcctcggtaacaaaactaatcccactctcagtcaatgagcgcgtgtaatcaccacataatttgtcatcatatttccaattttaaccttttccctttaatccctacaaatacatacaaaagcgagtgaaatatggtgagatgaggggccaaattgaaattaatcaaatcatgtaagggtaatttcgtcatttacagaaaaggaacggtttttgaggggctggaaattgaaatgggtgagagagagaagaaaagttaagaagaagaaagaagaagaggagggcatatatgaaaataaattattaaaaaaattttggggttacaaattcacaaaaagaataaatttacaatacacaatcatcaacaacagctacggtttgctgttcttcaacacccaccttttctttctaattttatttaatttaattttcattcttcttcttcttctccttccttggctacttgggtcgattcaatctctctctcttccttagaagaaggagccaagattgtatttttatgtaagttatatttttatttttagcatttctttttcttaattgagccaatctatttatttcgctatgtttatttgttccaaaatttgaacttgatattgtgtggtggttgttaatatttgtttgcatgtaactgttggtggagaatgctatctgggttttctagatcgtgcccagatctttttgtcttttgatccagtcgaatagcttattaatatttatttagcagaaaaaagtggagagagcaagagaaaaggggggaggaaaaattattgtggaactcaaacttgtaaagatttatcttttaaaatgaatttgattttttttttggtgggtctaatttgatttgggatgtttttgttcaactgggttttgaaatataagtcaaaatgtcgagttttttttttcttctttttgaaaaagtttcaatactattgtttctttttgctttgtgggttgattttgttgtagttaattgattttagtagctagagataaggtttttcatttaagttttagcgtaatatgatttttgtatggtgtactttttatcgttttaagtgggtttgattgatgtctcttttctcagatttcccatcttgggctgcgacatttgttttttcatctggtaaaggtggattgggaagaagataagagatttgaagggtggtgatttttatgtaatcttaagctggtttgagcttttgtatttaatgcttttagatttttcttcatcattaatgctttaaaagagtttgataagagttggattatcaacacaagaaggagcttttgattttcaattttcagttatgatcaaacaatttcttaacaaacttcctaagaagccttctaagtcttctgaaaatcgtgaaggaggaggaacttctacctcttcctcgaatgctaaccacagttcgaaaagtggtgagttagctagcaatagacatgggaatccgggtagcacacctctatcaggccccaattctgctcctaattttggagtcagtttcgggaataggcttaaccaggctgtgaattcaaggcttaatggaaattcactggtctcttcatatgaggcattacctagttttagagatgttccgaattcggagaagcagaacttgttcatcaaaaagctaaacatgtgttgtgttgtatttgacttcactgacccaacaaagaacctgaaagaaaaggatattaagcgacagacattggtagagcttgtggattatgttgcatctgctaatgggaaattctctgaaactgttttgcaagagattgtaaaaatggtgtctgcaaatttgtttagagtactcacttctccgccccgcgagaacaaagttctagaagcctttgatgtagaggatgaggagccctcaatggacccggcatggccacaccttcaagttgtgtatgaattctttctaaggtttgtggcatcaggtgagacagatgcaaaattggcaaagaggtacattgaccactcctttgttctcaggttgttagaccttttcgattcagaagaccccagggagagggattacttgaaaactgttcttcaccgtatttatggaaaattcatggtgcaccggcccttcatcaggaaatcaattaataatatcttctatcgatttatttttgagactgagaagcataatgggattgctgaactattggagattttaggaagtatcattaatggatttgctctgccattgaaagaagaacataagctttttcttgttagagcacttattccacttcataagccaaaatgtatacccatgtaccaccagcagttgtcttattgtatcacacaatttgtggagaaagattgcaaacttgctgatacaattattcggggtttgctaaaatattggcctgtaacaaatagttctaaggaggtcatgttcttaggcgagctggaggaagttttagaagcaactcagcctgcggaatttcagcgctgtatggtgcccttgtttcgccagatttctcgttgcttgagcagttcacactttcaggtgggtaattttactaatttcctttgctttttactacttgctaatttcctcttttcttttgttattgtgatgatttctgaaattcagttgaaatcctttcaacctcgacaattcaatttaataggaggttcttttatttatttagtttcgggtgtcaaccacaatataaaattagacaatctttgaatttgaattttgttaaagatatcttgtactgggcaccaagatatcatataactcaataaataaactgctttataggagttttcatcaacagtttgttaccaaaagtcacaaaagaaaatatattttattgggtattttctatgtgttgggctagagtttccccaaagactaaaatcagattccatgtatcaattagattcaggtgtttgttctaagttctctgggaagcttagttctgctatgtctcagatgctaagtagtgtttttttaaattgggtggaaattccatttgtttgaatgaaattgtttaaattagatcatttgaataactgtttgagagactaggtttaaagaaacagatgatttcccagatctatagtcaaatctatatgcatcttttagtttatttacctgttgtgctcatccagaattgaaacccctatttgaatctttatttgagaaaaactaaaaattaaaagtggaacaattgggtagcatttgtgttggaagttgaatacactggaactattaggtggcgattggttcagacttcagtgtaatagattgggaatagtaattgattgtaataataggaatagtattgagaatgatattagtatttataataatgattaatggtgattacattgtaaatctataacaaagttttcaaaaccaaacaatggaattgtaatagtaatttgttacgattactattaagccaaaccgaacttgccagttcgtctcctcttgcagaaggtgtacttaatgattaggctgagggcctagcacttttattccttttcaaacttgaagataatgggactttatttcctaattttgtaggtggcagagagagctttgtttttatggaacaatgatcacattgagaatctaattaaacagaaccgcaaagttatattgccaattatattccctgcgttagagagaaatacaagaaaccattggaaccaagctgtacagagcctgacactaaatgttcggaagatattttctgatgttgaccccgaactttttgaggagtgcttgctcaagtttcaggaagatgaagcacattcaaaggaaatgagttcaaaacgcgaggctacatggaaacgcttagaagagattgcagcgaagaaagccactagtaatgaaccggttctagtttcctccaaaatagttcgtgcaccttctagctagctagttgaagatggccatctaacagcggtttcagtattgctaatggtatgatggcatataacccatataatttatgatacacgagatggagcctagttcatattatttttttcttggttgctcacattccgggtttttttgtatcatttcaggtattcaagtcatggtttaaaggatgcccactgttcgggcactcgcagccccattttgatcatgtactagattgtatatatatttgattggttggagtagaacaaatgggtgttgcacaggccgtcgtccaatcagagatatggttagtgtaattgatccgtttgccatccatgtttctaaaggtaacagataagattcgagttttgacatgatgatggtggttacattttgaatttggtttaatggaagtatgctcaatcttgatttacgtgtatgtatcatcaaactttgttttcttttgtgaatcatttctataaagaattccaggggaagcgagattagaaatatgccgaatatggcataaactgcttattgtttcatgatttcaaattcttgatcttctgcaatacaatagattattaagttatgcaaataagctaccataaattcctttaatatgtttaagcttatcaaagtttcttctcatgagctttaatagcattttggggttactatggattttagtacttgaattgttgatttgagattttttatctttgctatatagcatttatgttgtgaacaattcccatcaagcatttcatctgtcatgaataggggatttggttttcttcaaaagtattgaaatatggggtccccatcttcatagccataatatcatatattactatatatttattatgtaaaacaaggctttccatcaatgacagcatcttggtgcttgctcattttgaagttaagctcaagtgtatgcactatgcatttagagcatctccaaagagattgcacaatgtatatatgcagtgggtttcttctccaaggacacaccatattgcactgcattttgaggtgacatatacggcatttatatatatatata

SEQ ID NO: 14069 - DNA, 8142 bp, Cannabis sativa
tacacttcagagtccaacttttaatttgatcaaaacaaagactttagagttgagtggcacaatgattgtccctcttctgctttttcttagaggtttaaccgttttaatactatttgcaattgctgaaccatagtttttcctagctaaaggagctataatacaactgagagttttgttgttgagaatggaaaggaattttcttgatatgctttaagggatagaaggagacccttgttgatatgatgatagtatgatgttttatttttgaagagggaggttgattaattctgttgatatttgctacttgcttgatttgagggctgaaatgaaatcctatatttggacagaaaccgttcaatgcgttcattttttcattaatagagatgataggaattggtgctgatagagaaacattattgatattataattttgttaaacactacttattttgaagactcttatgaaatgttataattgaagaaaagcctttcttctttttataattggagatggtaaaaactgttgcatgattttatgatttttagtaagcattttacaattagagtggaacacatttgtgtgaaaactttcccacagtaagcactcctccaatagtttcaagaattggtgcatataaatttgcacgtgtgttgttttttagctagcgtctcgtaatcatagtgggtcacttttttattacaagacttaccctaatgaacatgtttctcgaagacctgtctcttcaatttttttctactaatactcattatgcgtttaagttataaagtgagatggtattctcatcaattctacatttgcttgtttcagtgcggttgcttggtgtggtaagctgaatgcgatagcttgtgcatcggaaacatgtgcaagaattccaaggttaacctagttcattccttttcttctattttcttagtccatcagtttgaggccatagtcaaggcgttctgtttaaataatgctaaattactgtgtagtctgtgttgataagatatgttgtcatttattgcttttctaataaaaaccttgctattatcttctcttttaagaaaactgtctggttctcacccacattgatccttttatttatcggatgaaaccctatctagttattttcttctaaatgttgttataatccttatcggtaatgctttgcttgtgatagttccaccgcaaattccccattttggatccccattcatattgtgatcccagaacgaccaactgagtgcgaagtgttcaatgttgtagcaggtattacgcacccttctttgcaaatgttgctccttttttactgtctatgactatgtgtttgtgcttcaattataaatcagatacttcagataactgttaaggtatttttatgaaattaggaacatcatatttgattcatagacattttaataacaaggttgattaaaatgtctgtcatttgttgctttgaattgagagcagttgattattttatacaatgttgagctcttttattttctctgtttttggtgggtttggtccatggtaactcatcgagccaaaaaagggaaatgtttgaaatctgcttcatcaacttctctgcacattattttatcttaaaagaacaaaaacaaaaaactttgcaaattattgacggacgtgggatgaggcatgcaaggtggcaagccatattatttctgtttgtgcattcttattagtcataattgataatttatgagtaatattgaatatatgtcacagattctcctcgtgattctgttcagtttattgaatggtcgcctacttcttgtcctcgtgctttactaattgccaactttcatgggagggtaaccatatggactcagccttcacaggtaagctgtttctgttacactgctaaaaaaatatgtcatttgagagacccttatggttaatttatgttgtttttatcggttcagggttcagcaaatgtagtacgtgatgctacctgctggcaacgtgagcaccaatggcggcaggatattgctgttgttacgaaatggttatcaggggtatctccggtaggcagttttcatttatttgtcctacaatgaaataatgcgtgtactttatttttgttctacattagctctgatttcttctttttcgtatgtatacctatttcctatgttcaacagctacatgaaacattctaattttttttaataaatttcctttggtattaggtgtctaatcttgtttgttatctgatgaatcagtataggtggctttcctcaaaatcgagtactggtgcaaattcaaagtcaacttttgaagaaaaatttatttcacagcagtctcaaaattcaggtttgttgcttaatgtagtttctctttcagttgttatgtagtttttaccgatttatggtaatgatttgcttttagaggtctttagtttgttgttttttgtatccttatgtattttgattcagcacttgtcatagtcgaaatcaattttttttttttctgaatgcaagttcgaaatcaacttaaatatacatctgggcggattttaagtctgatctggtatatttgtttttgtttcagctaggtggccgaattttctttgtgtttgttctgttttctcttcgggttctgttcaactacattggtcacaatggcctcctaatcaaagtattgctccagccaagtggttttgtacaagtaaaggactcttgggtgcagggcctagtgggatcatggccgctgatgctatcataacagatagcggagccatgcatgttgcaggtgttccaatcgtaaatccatctactgttgttgtttgggaggttactcctggccctggaaatggatttcagacaactgcaaagagagtcacgagcaatggagtcccaccttcaatcaatccaccttcttgggcaggtttctcgcctttagctgcatatttgtttagctggcaagagtatttattatctgaagcaaagagcggaaagaagcagacagattcagaattaagtgaaactgtacaacttcattgctctccggtttcaaacttttctgcatatgtaagccctgaagctgcagctcaatctgcaacaactactacttgggggtctggagttactgccgttgcctttgatcccacacgcgggggttctgttatagctgttgtcatagttgagggtatgaacttgtattcttgttctaaacaatcttttagatttgattaatacttagttgttgatttcatttggtttaattattttttaaatttccaaacctgtacacttggcatatattaggcaagaaatcctcccaattgtgaccttctcttgtttcctcgtttctttgggaaaaataaaacctggttctggtgtttaaaacattgcggagaaagttatatgtgcttcggtgcttgatagggtatgtttataaatcatttttgggtgtcctttcttgttaacatgtaactgggtttgttaagttgaatttatgttagcttatttgaaccgaaaggattattagctagccaaacaagttgggcttgaatatgtggaggtgtatgctatttgagtatgatttcttgttttatcatgcagggcaatacatgtctccttatgatccggatgagggtccttcaattacaggatggagagtgcaacgctgggaatcatctgttcaacctgtcgttctacatcaaatatttggaaatccaacttctagttttggtgggcaggcacccatgcaaacagtttgggagtccaaagtgaatacatgcatacagccaactaatgactttaagtgttaccaatcaactgtaactgcaccaacacccgattcaattgcggagaaggcaaaacgagtaacctttgatcctttcgatttgccaagtgatgttagaacactagcaagaattgtctattctgcacatggtggtgagattgctgtttcttttctccgaggtggggttcacattttttctggcccaagctttgcacctgttgataactatcagataaatgttggatctgcaattgctgctcctgcattttcatctacgagctgttgttctgcatctgtttggcacgataccagtaaggatcgtaccattttgaagattattcgtgttcttccccctgctgttccaagtggccaagacaagacaaactcatcaacctgggaacgtgcaattgcagaaaggtactacttcttaatgatagtaaacctctcattcttcgtaagcaattgtgaacttcttttgtaagaagagtggttgaatgcatatatgttgatgatctgtgatttaattggtaacagattttggtggagtcttatggttggagttgattggtgggatgctgtcggttgtacacagagtgctgctgaggatggcattggtaaaaaaatagctcgattttatttatgctattattatccaagaacgaatcttttgctctatatgatgtgcagtagctagtgtctgatatctattgtttgttgctacagtttcattgaacagtgttattgcggtcttggatgcggattttcattctcttccttcaactcagtataggcaacagtatggtcctgtaagtttcaattgtgctaaatgtgtaatactccagtagtgtgtatgtataaagaataacttttgttaggaagcaattttcttattcttgttcttttgtcaaaaatagaaaattctaagaacattaagtttctttcagtgtaagattttcatgcatttgcatatcacataaatttctgatctcgttgactgctatttttttttttttttttttcgattggctaaattattttaaactgttaatgcagagtctagataggataaaatgcagactattggaaggcacaaacgctcaagaagtccgggcaatggttctggatatgcaagcaaggttattactcgatatgctggggaaaggaattgaatcagctttgataaatccttctgctctagtagctgagccatggattgcatctggcgagaccttgtctggcattgatcccgaagcaatggctgttgatccagcactctgttccagtattcaggtgtgctttttttaatgattgaaattcttcacttttttattgcctttgaactttgtcggttgtttgttggattctaatgattcctaaaatttgaggtttcgcctactgtaatcttttacatcatatctttaagagcatattattaaaatgaagattaccatattgatgcaacagtagtcccgtccttgcaataattctgatttttcctttttgttgcaatgattcccgtgtgatgcaggcttatgttgatgcagttcttgatctagcttcacattttattacacgcttaaggcgctatgcaagtttctgtcgcacgttggcaagtcatgctgtcactgcaggtaccggaagtaaccgtaacatggttacaagtcctactcaaagtgctgcatcacctgcaacaaatcagggtcagtgtgcatttgctttttttctttcaaaatcggtctttttaggtacaaaagatcataatatatgtattgtttgttttgttagggagtcaaaatggaacaacaaattcgactggaagtacccaaatgcaagcttgggtacaaggtgccattgccaagattagtagcactaatgacggtggtgtgtctagctcagctcctaacccaataagcggtccatcatctttcatgccgatcagcattaatacgggaacttttcctggaaccccagccgttaggcttattggcgactgtcattttcttcataggctttgccaacttttactattttgttttttctttcgccgaacgcaactgcctcgctatatgggtagtaatgcacaaagaaataccgatacaaatgtccaaaagcctcagtctggccagcctgggaaagtagaagaaatgggttcgggacctgtaaaaccatcgtcagtagtcagaccagatgaaaatcaggtaaaccgagctggtcaggttgtgcctggagcaaaaggggttgaagaaggaagtgctggaaggtcaagactgggttccggtaatgctggtcaagggtatacttttgaagaggtaccgttgatttctttcacttctttgttgcaattagaagttgtttgtataagcagatctcaataacgaaatgaacatgttctgcttctgtgtaggttaaagtcctattccttatactgatggatctttgtagacgaacagcaggcctattacacccgcttccggtatctcaggttggaagcagcaacatccaggtgcgcttgcattatatcgacggtaattataccgttcttccagaggttgttgaagcatccttgggtcctcatatgcaggtatagttattgttctttcgattatttatttttcagagaaatcggtatcctccttacattttctaatttgataatatgggctatgcagaatatgccaaggcctagaggtgctgatgctgctggtctcttacttcgggaattggaactccaccccccagctgaagagtggcacaggcggaacatgtttggtgggccatggtctgatccagatgatatgggctcggtggatgacactcccaagccatctacttattcgactcacccacttgacttcagttcagtggaaagtaccgatgtttactacggtactcaaggcttgtggccaaggaaacgaagaatgtccgaaagagatgcagcttttggacttaacacatctgtaggcctcggagcctatctcggtataatgggatctcgtagagatgttgttactgcagtatggaagactggtcttgaaggagtttggtacaaggttcgacattaaaccattttcccgatcgaattcttttgataaccatgtttttacagctaaccaattcattgatctaacattatgcagtgcataaggtgtttaaggcaaacttcagctttcacttcaccaactgctaccaatgcagctaatcaaaacgaccgagaggtttggtggataagccgttgggcttatggctgtcctatgtgcggtggaacatgggttcgcgtcgtgtaactgagaagcctcggttgccaaagggagcgctaagcgacgaagattcctcgtacactggaagatttcaaagcttttcaaagccattttttatcgaaccgagctctgcgtggcgatatatttttgtttatttttagaggagaaatagttggtagatataattgtgtacacttgaatgtaaagagagagagagaggtagaggtagagtgagaaagagctatatttagattaacagacagtagtgaaaggactatgattacccttttttgtaaatgggtctaaatgtgcattagaattagatatttttgccaataaagtcacctgtttttattgctatttttggcttttgttttaatttccttctttatttgtatcatatatataaggattcttgtccttcaaattttgacaaaatctaacagttcgaaataaattttaacgatcagaaaaatttaaagaacatgattttgtatatgtcaaattttaaaaagtaaaagttctaattagcttttaaataactcaaaattatggtaagagtttgtgaaattccctattaaagtattaaagcatgcaatttttttttgaacttgtgcaaatttgtagaattttatttgaacaaattgggatgttttgaattcatagatatgaatttttctaaaagcatttggttgtattaagttttaacagttaaaattgtaaataatttatgtgaagttaaaccaaatagaaatctttgtggtcaaactctctaaacttgtgagtttgacacgatcaatctttttaccgaattttcggaataaaatatttcaaacttcaattttgttttgatctccacttttttgtaagtttttggctgttaaatactaaatagacacagtgccaaactcagtatgtataattagagtttgtatggaattttactttcaaaaattcagtagaggagttgatcgtgccaaactcaaaagtttagagagtttagccgcaaattacccgtttttaaataataattattattattttaagagtaatttgcggtaaaaatacctaagttttatcccgagtagcagataaatacctaagtcgtat

SEQ ID NO: 14070 - DNA, 4248 bp, Cannabis sativa
cactactacaaaaaggaaatttagcaacagttatgtagcaacactacaaacaaaagtgttactaaatatgctatttttttaattataaagacttgtttgaaaaaagtgttgccaaatctctatttagttagatttttcatttatttatttattttagtagtttattaaaaatatcaagtacaacacttctaaataagcgatgcgatttcaatttacaccattaaaatagcaacagtttttataaaagtgtgtctaatgatatttttaagtaattttttttctagtaataattaataataatatattttttaaaaactaaattaagaacacgtactcaagtacatattctaataactgctcatacttctttcgtgctaaatttcccattcctgcgcataaagaacttggtttcctctggttttctttatgctgctggtaagctcttttgaaagttttcaaagcttcatcctcactctcccatcagaattgaaggtgatcttctttagaaaggttgaaaggtcactcccattcaacccttctctggtttttaaactttttcttattttctcgtatgtcgtatgcttagggtgttctactttttagttgaaaattgtaagtttaatatttataatgattacttataatttttactaaccatggttcaaagagacagtgcttctatattttacgaggactattgaggaaagaagaacaaattaaatttaaagaatgagagacaatagagcagagtaaatttcaaaccaattaaaactaagcaaggtaaacccttaagaataaagctctatatatcaactttttcttgtcgaagttataaatttaggactatttgaatttcttcttacacaacaaccattttggattttaattatgttttagtttctgcatttatttttcttaataattaattaattatttttctccatgattcattgatcattgtatgattaattgattacctcattttttttcttaaaattgttctatttgatgtatctattagttgctttcaatatatacatatgattgacttaccaggtacttttcttataagcaacattcatttattcaatttttgaaagtaaatgcattttccatggcggcttcacttgactattagtcgtccattttatgcaaaataatgtgtctaaattctaatagtgaaatttattataatctagtgttttgatggatgacttgtttcctactttttgttcaataaagaagtcattctagttctttatttaatatccatcgaaatgtgcccttggatcatgttagattaggaatgactttttctagcgtattatgttcttaagtacaatatattggcttaccattaatgtggtaacatgtccactagatttcatactgtcaaatggtaagtaatacatagtagctaaaagtactcagcaaactgaactatcaaaaggctgaattaactatttcatccattagagatggctttctctaatgaaatctcaatattagttcatgtaatcataacaaaaatcaatatctatcaataggttcaacattataatttaaaactaagaaatacactcatataatctatgaaaataatttttttgtgagaagtgtcaataatatatcaaatgaaataaaaaaaaatggcatcttgaccatttatgcttaacaagcctacttgaatattattttctagttgatttatattttgttcgtactttgttctttaattaatttagtctcattatcttttcttttgttttctatgaaaagaaaattatattaaactgaaaatttctaaaaacagggcacaagaaaacaagttcaagaggatatgatataatccacctccacagagttcagaaaaatcaaagaaagacacaacaaagcccatgcagcaagcttgtgagcatttacattaagaactctatattatcttggtatatatgcttgttgaatgttgtttcaatatggtcttcatcagtctaagtggtagcatggtattataatttatacatttttagaaattgaaagatggacaaggatagaattctaattatgaaagaaacatagaagttgtaattgagagattgataattatagtaaggagctaagttaatttgcttcatataacattctagattgtgttattgatcagggaacaaacacttaagggatagaaggtgaggagctctaaacctgaaattttgttaagtattgtgaaataaattcataaaagaaataagcatatactagttgaagtaaatttataaggtttagataatacttaagatttttaattttcttagagtactacgtgattggccactcattgaaatgacataagaaccccaagcttactagaactgtgaatcgaacctcctcctaatataagtttcctctgtttctaattttatttaaaaagaagtatatttttgcaccatgttgaaaaataggtgaatttctttctttgtgattatgcaacttgttttaatttctctatttattatgtatttacacatatagttcaagtcttagtcgaagaaatatatttctttcgtcaaaatatatttaaataatatacatacttgtgtgcactgtctttttgactctttttgtgtataataactcaccaagtgtcgattatcttattgaggaacattacgatttgttgcaatgatctattataagacggcatgtcgagtgattcttagaacgtgcatgtcgagtggtccttgtagcatgcatgcttagtgactctcgtagcatgcatattaagtggttctcgtacgatgcctgatgagtgacccttgtagcttgcatgccgagtggtcctcatagcatgtatgtcgagtgactcttgtagcatacatgcttggtagcatgcatgtcgagtggtactcgtagcatgcatgtcaagtgtagcgtgcatactgagtggcccttgtagcatgcatgtcgagtgactctgccaacatgcatgttgagtcactcttgcagcattcatgccgagtgactcttgcaacatacatgccaaatgacccttgtggcatgcatgttgagtgaccctcatgagcatgcatatcgagtggctcgtgagctatatatatatacatgccaagtgtgtatagtcatacctaactttggaggctaatctcgctaatctttagaataaatcattagctgatctcgaaaattgtctttgctaacttttggggttaacctacacacatacatatatcttactttttttcaattcttcaatcatatatttttactattatctttataaaattataattataatttttatttttatttcacatatttatatatttaataaataattttaatttattctcatatatttatttatgttaccaaaaatttatatttttcttttctataaaaatagatatagtttttttattaatgtagaaaagaaatttttgtctcccactgtagatatatatatcttttactggttgatctaaataatttatctctaatagtaatatgtattgtacgttatagtcaaacttattatggtaattgatcccaatgtttgtactgtggcaaatattaaagtaaaatttctagcaatgacagattaaaaatgtatgctatgatgagatatttttatatgtactaaacatgaaatcagatttaattatacttgattccagatttaatattcttttaatgcatgtatatcactatataagttactaataataaatatatttttttttgtgcagtgccagtgattcggatggactaattgcagtttgatgaagagagtggacaacacattatttctatgaattttttgtttttatttcatttaattgtcttgcaaatcaaagtgataaattagaaattcacattgtcgatatacacaatttgacatatttactgtcttcattgtaatagtttatgtagagctttgtaatacttaaataattttgtattaattttaaattatgttctataacttttacatttaatgcgaaaaaatttatgcaaattctatttgatgtacgtatttgattttttatttattgtttttttttttatatatatatattgggtggcaatactaatactaatgtatgctcggtgaaaaatttaaatttaattatataataatttttataatacaacacttaaagaaaaagtgttgttgtatgctatattccatattgcaacgttttttaaaaaagtgttagctatatatgttta

SEQ ID NO: 14071 - DNA, 5517 bp, Cannabis sativa
aatttctttgattagcaaagattgcacaatatttgaaaaagcactgtagcgtgccttagcattagggcgttacaaattggccattccaactcaaaccatcctccatcatcaaattcctcacacacaaatcatcaaacatcataggatttaaacatcccgagtcaatcaaatccccatcaaaacccgaccattggtggttgccaattttgacttttgcttctcttccaataagccagacactattcttcacaatgaaatccttagtcgcccatatgcttttggccaccggcgaagcatttgaaggcaaaaccgagtccccaaaagctgtctcatggtagtatctatcaagcaaaattgatttccataagcaagtttgcttcgaagccaaagtccaaccaaactttgcaagcaaacagaagttaatgtcttccgccctcctaaagcccaaaccaccacaagatttaggcttgcacaaagagtcccacgcttttaaagagaggtagcgtccatccttagcctgtcctgtccaccaaaaccttcgtataataccatctatccgattagttgtcttctttgggagcttaaaaacagacattgtgtaaatcggaatagccgccaagacactcttgatcaatgttaaccgagcagcctgtgaaagaagcctcgcccgccacccctcaaagcgggaactggttttatcaataataaagtcaaaatccttacttctgttgcctttgaaaagcaaaggatttcccaaaaatctttccccaccattcatttcctcaaagcccagcaggtttttaattgaatctcgacaccgaagggggcagtttttggagaagaaaaccttggatttccttacattaatctgctgcccagaccaataacaatatttatccagagcatccaaaattgcagtcacattaccattctcagctttagcgaagataagaagatcatccgcatacatcaagtgtgtaatcgagaaaccctctctaccaatcgaataaccacagataagaccttcctcttcttttgccaataagagtttagagagaacctccgcatacaaaatgaacaataaaggatatagcaggtccccctgtctcaaaccacgattaggaacaaattttttggtgatacccccattaataaggacctgaaagctaacagaagtaacaccaaacatgatcatatcacagaagtggttattgaaaccaaaagctttaagtaccttaagaaggaaattccattcgagcctatcataggctttagacatatcacatttaattccaacaaaggcttcccttcccctctgacgcgtcatgtcatggaaaattttgttagcaataatagagttttctgcaatattacggcccttaacaaaagtcgcttgaaacggggacacaagcttatccaagagagacgagagcctattcgccaaaatcttggaatcaattttgttgatggaattacataagctaatcgggcgaaaatcatcaaaacggcaagcatgagccttcttcgggataagaacaatgaaactcttatttaccattttgcagaatttccccgaatgaaagaattctttcacaaactccaccacttggcttcccacaatgtcccaataaagtttaaagaattttattggaaaaccatcgggacccggagacttaagcggaggcatcgaccacaccacttttttgacttcatcctccaaaggaataacacataacaaactgttctcctcatccaaaatggaccgaggaataaggtcccccaagtcatcatcaatccgaggatttgtaaaggtgaaaatttcttgaaaatttgttctgaaatagtgcacaatattatctctgccctcaatcaaagtcccatcctcaagagtcacatcccatataaaatttcgttttcggcgaacttcaacagaggcatgaaaaaatttagagtttctatcaccctccttaagccaactctcccttgatttttgtttccatatagactccaaacgaagctacgattcctccaattccaacataatggtcccttccaattccacattctcattagaaggaggccgcttttgaacctcacaaagcagtttttcaagagctttgattttggtttggcaatgtccaaacacattggcattccagaccttcaaggctttagcagtgaaagacaatttttgacagggaataaagctatgaaagccgccaatagcttccctccaagcctcctcaatcacccttctacgatccggatctcgactccaagcgtccaaatatctaaaaggcgtcacaacattctccctttccatatgagtatccaaagtaatagctccatgatctgaaaagtggataggcaggttcctcaccccaactttcttgaaaagaaacaaccaacttgaggaaactaccacccgatcaagacgttcccgaatcagcctatccaaaacttggccattagtccaagtaaacaggacacccgcactctccaaatcaacgactcccagattaaacataaactctctcaatccttggccctccacctgagaaactggacggcccccacacttatcatccggggataacaccgaattcaaatcccccataacaatccaagggtcagaaaaactttccatagtaacacaaagatccctcaaaaaaaccagcctagtgtctcttcttggcggagcgtaggtgaaacaacccacccaatccccggtatttccattaccgccgaaacgaaccagaatcttattaagatctttttcaatcacttgaatatcccatccgcgtctccaaaaaagagctaaaccaccagacgggccaatcgaagagaccgtcgtcccattaagaaagcccaaccgaaaccatatatcctccatgtccaatgcattattcttaatctccataagaaaaatgacatcggggttggcactatgaattaatctttggagctcattaactgcctcaggtttgccaagccctcggcagttccaagataagactaacatggggggttgggggcatgatacggcccgcctcctcggccccagcaaaatccgacccattctcaaacccgtccactgaaacccctccatcgaccacttctcccaccttctcggcattttcttcccccaaactaaccaccttgatagattcaaaattatccaccgcaccatccaatttcaccatatcatttccatagttccattcacaaggcatagaagagctttcaacattactcttattatcaaaaaacaaatcagtggcagagaaaggagactttgaaggcctataacactttccattatccacttcatctattcttctttttttcccaggcctaaccaaaacattaaaagaattaatgggcccctcattaaaacataacacaccttgttttcctttccctctagtaggcctagagctcttatgggccgaccccatcgtagagcccaaagtggctttaaagaccatagcaaaatgatccacatgcggaatattctctccaccaacctttttgtcattttctttgccattcaaagaaacacaatggtccccagcagaaaaaacacacgtgctcccagactccccactaacctcaatagcttccttactatgcacgtcttaaatggcagttaaattaccaatctgcccctcacctgtaacggaagcagtcacgggctgggcctcttccaccaccgcaccttctatctccggaatgggttctgtcaacacagcaacctctagatcattacccgcattcacagccgcagcttcgactaaagcttccaggtgaatctcagtccccacgagagccggttcgaagttatcctcccccggcactaggagagctcttgcctccacctgtgatcgagcctctaccatttcacggttcatatgatcttgttcatatatttcatactcagaaaagcaatcctttttacgtgaacccaaccgcatccaaggcccatacataggcacagttttattaaaatcatcagcaatcaatctcctcaaccgacggcagaagttttccttatgcccaacgataccacatttgtaacacacagaagagagattttcatatttaaaataacaccaactcacaccttcttccataggtaagaaaagaccaacaaacaaaggtttattcaagggaatactgacctggagacgaatgtactcgttggtcggaaacccgtttctccaaagacgatcgatcgagaccaccgttccaatcttcttagctatagcatttgcatttttcaaagtccagtatctaggaggaacttcatacaccctaacccatatcggagtagaggttaggtccgcagaggtccattttccatcctccggcatctctttgacaaccagaaaaccattccccacaggccagggaccatttcgaacaatgttgatggcttcttgttttctcgtaagcctaatgataaacgtatttggaccgacttcaatcagcttccacccattttccaacctccatttcctcccgagaatggatcgcaacaaaccattaaacatcactcttttagaaactaacttagctacgaccgatttttccaccacatcaatccccagctcaggattttcatccaaggaaatcttaaaatcctcaacaatgcacacctcaacctccgaacctttagaactgctagccatttccagaacaacacagacacaaaacaagcagaaagtctgagcagaaccagagagaaagaaagaaaaagagccgtataccgaaaggatacgagggaataagagccaaaacccaaccctagatcaccagaggatcaataaaagctgcccaccagagtatattatcgttgcacaccaatcaggcaccgtacagatacactacctcctgctgtacgacacagagaaaacctcatagtgtacgaaacataacatatacttacttgtttaacttgcttaaccaatgttagagaatctactttcacatgaatgtttggaatttttttttttttttttttgttatggacaaagaagttgggtttttttttctttttcttttaaaaaaaattaaagttcattaataaaagaatacttaaaacatggtcattacatataatgttcattgcaatagttgttacctccaacataccaattaagttctgctgatacactcaattagccacattatggcccgtaaaattacaaaattaaaaaatacaactcaaaattatttgaattataatttctcttatatcttataattttgctaattaagtgtatgggcagtttttaactaatacttatgttgaggtatcaactatgtaatgttcatgtggcgtaagttttcttttattaataaaagctaatttttcttttaaaaaaaattctttgtccataaaaaaaaaatgattccaatcattcatgtggaaatggattctccaacattggttaagcaagttaaacataatcatgagtatttgtcttcctggaatgatttgacagttagaaataa

SEQ ID NO: 14072 - DNA, 8592 bp, Cannabis sativa
aaaacacagggtccaatctgtaacttttgcaaaacacaggatctaaaatagtatttacccttataaatttcataataattgattcgatttttctaccaatatattacactcacatatatataaatgatgtaagagattatgtacacactgtacaaacctggatatgcaagagtaaacaatatcatcatcagcagcggaagtagagtagtttccatcaagatcttcattgtaatatatatattatatatatatatatttatatgttatatatagagtttgctatttatctagagagagagagagagagagagagagagatcagagtactgagtgagagagaagaagcaaattatatatgtgctgtttttataagaaaaagatacgtacaatatatgtggctataattgtcttttgattaattaattcactgagatatcattcctattatatattgatcaaccctgttttggtaaaacagtaatatcagtatccaaacttaattaactttaaaaagaaaaaaaaatccaagcttaattgctaacattttgaatgaaatgagttatttttaaagttgaactagaacattcaagtaagtacacattaaatttcttcttttcctgtcaggtatatacagatcagaaattgacaattagctaagaataggagtgaatttctcctcaacaatatggttaaatgcattttattttatttttttggcaggaagtattaaaattaatgatgttagtctcagtgcgtatagaaaattaatgaggtgaaataatatattaaaaaaaaagaattatataaatgttagaaaatatataaaaagaaattcaagtgaataaatgaaagttaatattctactaagtcttaacctcataacctcatcatattcatatggttttggtaattaataagtaaataatgtatttggtgtatttatataaaaatacaatgaaaattattattatcatatgaaaattaattttgatttaaatgaacttaacaatagtttgatttctataatttgttttggaacaaattaaaaattaacattattatttaataaagtaatagtctgtgcattcaaattatgttctacaatactaaacttattttttttattcatttttttttttgctaaagtctagacttgagactgatttttttttttttttaatgagtcaatataaatattaaaaaaacagtgtatgtatattagtacagatagactaataaagattaggacagttttctatgattattttttttagtaataacttcatttaaaaaagaaattataatgtcatacaaactttaagttttaagaaattccaaaaatgaaggaatctcatcaaaccatactagttctttatccacccgaaaaacatgtcaaactaattcatgtgcaatctcattggctgtccaacgaacatagatgatattacgggaaaattggacatcaaactagctaaaacctctaagaaggaactaagtttattgatttagcctgattgaatgataaagcaatataatgtctagaaaaagggagcaatatacaatgttggaatataacactcaaacgaatgattaggtgacaaccaaattaacacaaaaggtacataataaataaccaagattattacacaaaagaaggaaggaagatgagaagagatttataaactcaacacagtttacaagtaaattaatatgacatcccttaattcagtattgtcactagcttcatgtttagttgatttaatttaatgagtataaccctctaatagtggtaaatctttcatccaataatgcagtccctcctttgtttctaccaacagcagagaaagtaagaaactactagagatacaaacatggtcatccttctaaggaggcttcataaacataacaagattctttaaacagtttatttacatggttattgaaaaacaaatgattgtcagtcgctctgacacgtacttgtgtgctttctaacctacttggaagaaataaaaaattgcatcaatcatagtatcttcctttattctccaaaggatgcaaaaaaaaaaaaacttactatagtagtacttactgaactttcaaatatggagagtagtttacactttgtcaatcccaatatcaccattcttgaacaaatgcaattccatcgaaagtcatcttttaattatgactttcaatttcttagtactcatctgcatattaatgccaaaattataattatgatgtatccagaaactatttaattaagacttggtgaaatataaagatgaaactaattacttacctcataatatagtgtcccacaatatactttgcaatgacacaatgcagaatctttggataaggactctccattaagtaactcagacctgttactgtcatcattttttttttctgacaactggtatcctaagacccagaagaaagaacaaacaagaaaccagtaagacaacaaaggcttcagctaagtggcgaagacataagcttcatggtcattaagaagaccctctgggagtaagctcattgccaggcagcattcgaaaccggttctcaaagcccacttagcaaggttgtgagctgcgaaattgcagcatctaggtgtgtgtttgatcgacctgcagcatcattggcattacaagaaccataatcctcatcaccatgcacctggagagagatccggtgtgaagcaaatttctctgatctcaatttggactagctcaattataaccagttaaaattttctttcattgtccaagactatggcttgtatcatgaacactcaaatggttctgctcttgaacatttgtatgcagaaaaaggaatatgggaaatagcagtcacaaatgagactaaaagaaatgaacatattttcaaggtcaccagaaatctccacaggagcaacatccattcttgaagtggtggaagcggtatccatctcgcactacaagttcccttgaggttacaagggaaatgagctttattacctggtgacaatcatggcaaactcgaagatttttcattacatggattggcatccaagtaggtaggctcattagcccaaaagccacagcaagtttttcactgtggtagcatggagaacgaagagcgtttgtaggactaacatagagtcctgtactttctattttcttaatagtctcctccagcattttatagatgtccgtgatttgcggatgattagtgtcatcgacaaagaacacatgtaccttgttgtcaacttctatccaactacgacctggattcttctgaattgttttctccctcataagttttctcacatttgcaaagtcctctagttttccagattctgaatatatattggctaaaaggacataacatccagagtctttaacatttaattcaagcaaattcttcactgcaaattctgctaattcagagttgtgatgggtccggcaagcacttagcagagccccccaaatagtagcatttggtttagagggcatttcatcaattaaattcttggcctcctctagtaatccagctctaccaaacagatccaccatacaagcataatgctctaatgtaggggaaatgccaaaatcattagtcattgaattgaagtaatacttcccttcatttataagtccagaatgactacaacctgaaagtacagatacatagcttatatgatctggtttgcaatttgtcttcaacatatcctcaaaaatttcaatcaccttattgccatggccattctgagcatatcccaccattatcgcgttccaggatatcaaattcttatcacatatagaatcaaaaactttttgagcatcttcaacacggccacattttgaatacatagtaacgaaactattggcaactgagacattagagccaaaccccaacttttcagcatgagcaacaatttgggttccaagtttaagtactgctaaactggcacaagcactcataacggttgcataagtgatccaatcaggattttccccttttcttctcatcaacttatacagcttgagaccttcttcccaaaaaccattctgaacatatgtgcctaacattgaattccatgtgatgacatttcgatctggcattttatcaaaatattctcgggctttttcaacattaccagcctgagagtatccagtaatcattgttgtccatgatattatatctctaattggcataagctcaaaagctttatttgctttataagtttctccacacttcacatacattgtaacaagagcattccccaggggtacagagtagttcattccagccttgactgtaaatccttggagctgttcgccaacaaaaatatacttatgaccagaacaaaccccaagaactgtggtcaatgtaaaatcatctactgcaacagaaccctttctcatttggttaaacagaaacaaagcttcttctgcaagaccaaactgtacaactccaccgatcaaagaagtccacgacactgcattatgttctgtcaagctgttaaacacctgccgtgcaaagtttaatcgtccacactttgcgtacatgtctattaaaccactgcccacatgaacatctagactctcttctgtacgaagaatccgagcatgcaaatggctaccccaaccaagatcatatatgctggcacaagcactaagtacactagcataattcattggattgggcctaaaaccattgttccacatctcaacaaacgtactaagactctcagctcctagaccatgttgagagaagattgaaatcattgtgttccatgatacattgtctcgttcaggcatatggttgaacatattataggctcttccaaccccataaagtttagagtaaccataaatcatactattccaacaaaacaaactaggtgttcgaattcttaaaaaaaaattctcagcagaaactactgcactgcacttaatgtacatatcaataacagaactctgtataggcatgttgcttctgaaatccaatttctccactagattatgcaattggcgagctaatttgatcaggccaagactaccacaagccttcatcgcacaagaaatcgaaaatgggtcagaaacagaaccacaacaccggatcattgtagcaaaaactttcatggtttccccaggttgtccattatggaaatagccagacatcatggtagtccaagatatatgatctctctcaggcatttcatcgaacagcttctctgcttctcttatttgaccagaattaaccaaagcattaatcattgtgttccaactgaaaacattacggtattcaatactactgaaaacacggcaggagtcattaatcaagttgcaactggagtacatatgcaagagatggttttgaaggaaagtcgaattgttcaagcctaaggagatgagttgaccatggagttttcgtgcaatgggaatggacctgagagctgaacaagttttcatggcttcatataacttctgggaaataaccatataagattgttgcactatagggtcggacaaaagaacacatttggttgagaaatgattgttaagagccatgagagatgagcaacacatttcaaattgggggcatggatatggagactgaaaaatagtttcaaagtaaggaaatcatttagtaaaagctatatataactcacaagcaaaaggatcaaatctcaacatctactgctttacccaataacaagaggtggtaattgaataaaaccatcttaaccattctttaataatttcataagcaacaacaaaaatggcaatagaaatcttaagccagtctttttatcaggaaagaatatgtatgactagttcataataaatgtataatatctcaaacctgtcctcaggctagtctacttatttaatgtcactagaatttgtcttccagcatggcttgaagcttcaccaaatatggactgttgagctctgcaaaagaaactatcaatcacctaatgtcatcaagagaggtatgcaaaattcctatatcacaaccactgattgggaaaatttacttgctcttcatatcatatatatgtaatatggcataaattatcttcaaaccaaaggcatttttgtattttgaaatcaattaaccacaaaacaaatgtcattaaatatagtgtcctactgtcctatacgagaacaatgagttcaaagataatagtatcagtatttgatttgacagtttgactttgacgcaactaaaagttgaagatgatggaataccttgataaccactaaattcttggctcaagcaaggatgccacatcaattatatcatttctatataagtatttatgtgttccaaatcaaaattcattttgacaattaaacaacgagccctcaagttgtaaaacaaaaaaaaaaaaaaaatacataattattgaagatgcgctaaatataaataaatgaaaacaaaacatatagtaaagaaaagaacagattgacaacaactaaaaataaaaatagatgtgcctggtttaagccttgtgcttactttttcgctgggctgcttgttttgtgtagaagaatttgagtgttgtaaatggagaagcttcttgctgcactttaccatcacttgttgatcataattttccgtttgagaaaacacattagaggaaaagacacgatgagtcttcaaatagaaccttaaattttggataggaaataaataggattataaagcattcttgtgagagtaaaaagattgacaaagaaaaattggtacccaaatcagatgagtaagcattagatggagactgtagagatgttaacagcaagtggtttcaaagctagcagttatggtttgtcctttagcttgtgtaagatatgcattatataattcaattaaatatcaaattgatcatacaacaacaatccgaactaaaattgaacacaaaaatcaataaataaagagaaaataattgatcggtagatggacaaagtagaacaacaatcttaataagtttcactaaaacaaaacacaataatttatccaaatcttcttttatgtcccaaaataatagcaaacgtttgaaagctataaataatattctattattcaaaaaatttacaaatgctatacgttctaaattttacatagattgctacatacaatacccttgaaagttacattttctcctttttctgttttcttctaatatgaagtttaggcaaaatatgaagaaccaaaataacaaaatggaaaaccaatgcaaacacaaaaacacaaaagtatttaaaaaaaaaaaatgaagaaataaacaattacgaagaaaaaaacaggtaaagtgcatagccaaaggttaacgctaatccaaaagcaacgtttctttcgtacatttcgtcgaacagtttacacgcataggaaatattatcaccacacttggaaaataattatgatagaaaaacaagaatgtttcttcgcatacatatttagaacatgattggttagtacatacccatcttaaaaaagcagcatggagagagaaagagcaccttgtagtagcttaacaatggagcaacggtgaaaacgtgagtccacgctttctggtttaagcattaagcatgggattctgggaaagcaaagaaagaaagtttgagtaatttactgatttattattatttacattattattataacaatttcacttctctcttataaatttgtcactgttaacttaggaagaaggaaaggacaagtgaaaaaaattggaaagaatgaaagattggagaatgaggtttaggaatatttaactcctctttagcggagttctaccgtcaagctcttggtacaactttttagtcaacttttacgttcgaaaacacttgttggtatattttttttttcaatttttctcacgagagtgttctatatgcttacaacagcatgcctgtaaatttttaaaaaatttcgaatagtttacagtatcgaaaatatgtttgaagttttttgaacgcacttggtaaactgaaatatcaggaattctgttttcagtacggtaaattattcgaaatttttcaaaaatttacaaggatgatactataactataactaataccacaaaaaaatttaaaaaaatatttcggcatgtgatttcaaacgtaaaaattgattaaaaaattataattaatattccttaactttatatacatttcaacctgaaattaacaaaagcaacaagctgatgatgatgatgatgatgatgacacagtgggcgagaagaggaactattatggccttaacttttttatggcctagaaaaagatatattttctgaattttctaaaaaaaaaactatgaaatttttgttataatcctatcaagtatcatggcctcaaaaaattatattataattaaaaaatcgcttgcacatgtgttaagtagtcaaaaatgtgtcaattttttaagaaaaagagcattttatgacacattttaaaaacaagaattagaaacaaataaaagttgatccttttataaccaaccaaaaaaaaaaaaaaaaaaattacatgatatattaacttttgttatttttttacaaaaatactgttagacggtattttttactttttt

SEQ ID NO: 14073 - DNA, 4713 bp, Cannabis sativa
gtccaacaccttttataagtagcgctttatgattggttaacaatatttcttaaaagttattttttaaaattatataagacccgatacttaattataccaattgcggtatgacaccgaagaatgtgttaagtaccaataatgtcttttagcaattctcattttatatactatgactttactcctgccttcgacaatcccaaaaatcacatgctaccttgtagcctataggaaattcatacatagcatccccttcattgggccaaaagcaaatatgccttaagagctcccatcccttaagtgcctctcaagtctcaaggatgcaacttacttagttttattaagatttcatgctcattttggacaaaatttctacaattctaatcacccaaaactattatatatattatatcggtaatctcttatgcattgacgatagaatttgaaggttaagtttccattttggagaaagataattttttttagaaattcgttaagtcttatttcatgcatgccataccaaaaaaaatgattaatgaaaacatcaaagttttcactacacgtatttttttgccctgaatttttagttacacaaatataattagcattagaggcatagatatcaaaactggtggttcatgcttcaaatacttcttcacaggttttaatccaaacaacatttgattattccttgatcaaaaacgaactagtgcaaataaaattatgcattcatgaaactgtgtgttactaattgaaagattttgattgtttattatatttattttgtaccaaaagaaatatgaataaactagttgtaatttgttgttgaaaaaataatcacaaattttctggctcttctttcttccaaactccacccctaaacccaatatcttgaataggaaaagacaccaattcagggcaccaactgccactaacaacccttagtgatggcataacttgcttcacctttgaccattcttcttcaaaatcagagagagactccaacaacagtccctcaattctccaaacagaagtgttgtcatcaccccaaaatcctctgttcatcttacaaagattgccagaacatattgagaggtaccttaacatggggagtgaaatggggtttagccacattggactaatctttcctggatagaatttgagactcagctcatgaagctgttcaggaggaaagaacttgtctagtttcgctatgatatcatcaccgtgactgtcgaaacaacttattgacagatgctgcagctctggtagtttcaccatcgaatggacttcggtgtctgcaatctcgtctccacgagtgagttgaagcccgagtttccttagtctcattaagtttttcaactctccaatgcgacatccttctagctggttagatttcgcgggtttgaaacctagtaacacttcgagctgtgacagtcttcctaaccctttaggcaggaaatcgagtgaaccacagtggctcgcgtctaacaccctcagtttcttgaatgtgactatgtatgtagggatagatttcaggttttgacagtagcttacatctaaaatctgcagattttgaagctttttcaatgatggtggaagtagaactaacgggtgagtgttgcttaggccgagataagtcaagtgttggagagatccaacttgacttagcagaccttttagaggggtttcaaagattgatcttgaaagatcaatggctcttaagtagtgagaatcacagaacttccttgctatgtttaaagcaatctcgttcacttccccggttttggttgtggacagcaatgctcgtagcttcgaattggcggtcaactgcttgtttgctatgggggtatcaatgcttaaatggcgcgtactcgaataatcttggcccgaaaatgcatcttttttcgcaatatcaatgaccaaatcacgaaccatatcatgaaccttacaactgtctatcgcctcgtaataagttttgtcaaccacttcaagcaaacaccgatttgttaatcccgcaaaacaatcctcaccggcttcagtagctgatcttccacatctcagtggcacaaaaccttctccaatccaccaatgtaccaactgatcctttgttatgacacaatcctcaggataaagagacaagcagagaaagcaagatttgaggtaagatggaagttcatcatagctcaattggagtgaagccatgacagagttatcattctcagctaactcatctcgaaaatgatctgcaattcgcttccattcagggtaacgcggtggtttacaaagcataattcctccaactgccttgattgctaaaggaagacccctacacttgtcaacaatttcttctccaacaccctccaattctggatatttgcacacccctccatgagctgcaaatgctacatttcgaaacagaagccaactgtaatgcttattaaggcactttggtctatgcattcttgattctttcacagccatcttttgtgcaacttcagtaatccttgtagtaataataacacagcttccattcccttttggtaacccttcatagattctactccaccaaccaatatcaccatcccaaacatcatccatcacaattaaaaatctcttccccaaaagatactggtttatcttcctcaacagttgccctgcatcatcaccaatgctagcatctcccaagttcctcaatatgcttctcatgatttgttcttcagtgaatgtttgagaaaccgaaacccatattctcctttcgaaataatcctccatttccctctcattaaacactgtctgagcaatagttgttttacccaatcctcccatccccacaaccccaattgccaaaatttccttgtcaccttccaaaagccagttctttaacttcatagtatcaccttctaaaccaacaactttggtatgatcataaacaggagagctccatcttggtatttggtcatcgtgtggaccataattccctggttggctcaaaattggcactccaagataagttgaaatgttcttcttgatttcaaaaatcttctcaatcatttcctcgaggcgctttccagtttgatactgcaatagaatctttgaaggattgaaacacatcaaccaaccactagacaatgaagaatcattatccattgattggagttgacaatcagcaagcatgtcttcagcttgataaatatgctctctcaagttcaccatgattaggcgaagtgtttggttttttcttttgagcctctctgcatctttgagaaagcattgcattaactgaagctcattctgtagagtttcgaattgatccctgaattcgatcaaaacccgactcccctcagatagagcttcaagcagtttttctaagaacacagacacaacagcatcaaccatgtctttgactttgaagatatctaatagaaaagagaaaaagtaatacattcagtgttttcccttcttgggaaaataataataaattctaaaatactccattctgatacaagcacatgaaattcaaatataccctttagctaatttggtcacattactaagttaaattcttctaccgcagtctttatggaaatgctcatttggaaaggggttttattattttaagttaaaaagaaaaaattgaactattcctaatcatgctcaatcgacatatatagtaatagaaatagaaaaaggaggctttaaagtttcaaaatcacccaaagttcaaaattatcttcataagtatgatttttaataataataataataattgagttgagttgagtagaatccaaaacaggttatagaaaagggttttttgtttgcttaatttcctgtcaaatttgaaccctgaagtttcagtagacactaatacaatcatatcaatggatataaatttcaactaagctagcaaaacccacatcaagaattactaaaggggaaaaaaaaaagtgggttaaacttacagtttgggttttgctagagaatgtgatcagaattattcaaattattctctgaaccttttctgttcttcttcttctaaagatgtcacttttgaacaaaggaaaatagaagaagagactgattacaaattcctgaacttgaaagatatgagaaaggttttgccaaattacaaaactgacatgaccttaaagggtatcatggtaaattcatcagatgctagtcaagtcaactgctctatgttatgtgtggtggtgttgctaaggaaaagtctttagacacggtttggggtgtggccaaagccaaacttaacttacccaaaaatcaatgtttgccaaattacactcaaggtgtctagatgttacactgtttaattaaattggcacgattcaattcaatctaattcacaaaatataaatattcacgtttatataaattggattgaattaaaaattttaaaattcgtatttgtacaaatttaatattaattaacataaaaaagtaatcaatccaatctaatttacacatattaaaacatatattttttaagaaaattatatatacatatatttcagtgtaaaatgtagtaatttaaaaaaatcttcttttcttttttttaagatgaactgttattatattaaaaccagattcataatacaataggcattaggggaggaagcatttcctccaaccaagagcaaatagagtccaccgaacgagaatcagacgagtttcgagaggtgatcttgagagaga

SEQ ID NO: 14074 - DNA, 7399 bp, Cannabis sativa
gtaatgggttttatttagggcacaaaacccaacattaccctgggtgctaagtccaagtttttgcccattggaagttccatttggtacttggaaatatttgaatcttaatctttgctgaaaatagagaatatgcatggaagagttttcgaaaaacatcatcgaaatcggtctaggttgacaaaatctcgacttgggcattgggccttgcttttaacccctaggaagtgttatcatctcttccccgattgtagtacttgtttccccgtttttgatgaagacaaatatgatgcaaaaacagatcgttgatttgatacttggaagtcccctagattgataaattgtcaacctgagctttgggtgctcgtgcaccgagtcctgtgggtgctcaaaaaagaattttctccatatctaattcttatgcttcaaatatgttcgtagtatgtctagctcatgttccaatacaatgtttggcccatttgcagtaagacggtcccaaaaactgaaactctatttaggatgtcaacttaggtgctgggtaaaaccctaggtgcccaagtagacttttggggtgcaagttcatgtaattttagctcccaaacctggatttgattgctccatgtcttaatggcacataataatgaaagatattcagttagaaacgagttatgaaagtcggaacttctatctatgagttctcgaagtcaacttgggcacatggctagagactcctcccaagtcgactactatgactcaggtgatctacttaactttatgacgtcttctttcttgtcatgagtcagacattgatgtccatgtcactagaaatgtttttttgagttaataaaactcataaaggaagtctaacttatttaaaattgattttttacacattaaagagagtgcgcgagaggggctgaaaggggagcaatgagtgagcttaagcttgaggatttgtcaatattaaccttagtgtagaatagagacttgtcactagtatatgattctcttcttaatcagagaagatgattgatttgctttattgtcatgttctttatgtgtttgatggatcatgacaaatataagattagtcatagtttgttggaacatgaattgtttaggctctcgtaatagaattacttacacaaatatttcctaccccaacaagtgagaaattaaaagtcatgaataataatatatatagctaatgatgagaccacgatatattctggcataattatatataaaatcaattgtcattattaagtagaatattgcattttatataatatcaattgaattccattaacgtaggagctgtactcaacagcctgtccaatgtgttgggtgcaaatttccttgcaaacaaatggcaaatattggttctcatccagttgttctcacatttagttccatgcctaagccattccaataactcaatattcacatcttctctaacaaacatccttggatggggttggatcaatccagaagctttccatccaacccaagtcaatgacctatttaacgctatctccccaaacttgatattaacaaatgtgggaaggtagtgttcatcagtgatacatctgccacgacaaaacctcacaaagagatcaaagtatttttggtctgaaacaacctccattgctaaggttcggtctatagcgaaccactgtgaaccctttcgccattgctgcagcgtaatgagtgggctcattttgatattgtacctgccccggccgaccgtggtatcggagtcaaaaacctctagaaaggctttggttgtgcccatgacatagttgtacactatagagaagttatataggggaatgcatgactcagagagtagaataaaacgtttgtttgaaaagtcaagtaaagcattggctagtaggcgcctttcggcatcaaccatgctagcacctccccattctacttcctgcaacaaattaatcgttcaaaacttcaccatttgtatgggttaatgatgtgtacatataatagtacaattcgaaaattatacttccaaaagaaagtacacggccatgaacattcgattaaaatttcaatcatagcgtacgttactgagcgaacaaaaatacttgaggaaaagtataattattaattacaagagcatatttaagcatatgtttaattgttattactcgccaaaagattttcgccgacaaagaaaaatatatggcaaaataattttagtgagatcaaaatataccttaaaaaacaaaatgtacgcttttagtattaaagaaaaaaatgtacgcaaaagtgaatcactcccagtatagtaatgatacaactatacaaaaactggcttctttcgtcataaagtattttcaagttgaaaatgaaaagaaaatgaatgtgtcgacattttactaaccttactaggaatccatctgttataaaaggcagattttgtaggcattgttttgttgaaagagggagtggaggaatgaacatagacggagtaaaagccttcgtgccctttgaagaacctgtcccataaaggagccagctccaaatcacctcttgtcaagaacatgaaggcgacttttggagtgatttttaatgggtattggcttatgttcggtaatatagaagctctccaaagcaactctttatcatccatgttatgcctcacatcgtgtaaatctgttcttgtggtctggttcatgagtaatgcttcatctttatcatcaaatgttgggattgctagtggaggagatattatgttgaggtggagataggattggaggttatataatagcattgtgccggtgaataaaattaaggtgaagatgacaaaagatgagattactttccgtaaacttataattttgagagccaagagcttgatatgtaaggctatagaatattggtatttctcttttgttgacaccatattaaataatgataaatgcacgaagagaattgttcaagaaaaggaataatatgatgaggacagagattttggatgttaatgcggtttatggcatagatcttaaacaattctttgtcctcagtaacgaaatgatcgtaatagaaggagcagagataaatcaaaatgtcctcgatctggtctacaaagtcaacttttaattacagactcctgcacttggaagattataagaagttattataacttgttttacatcactttgacaatgagttcaggaagaaataactatatttctttggtggaaaaaaggaacaattttttcttacattgatcatgtaattttcatacttccatgaaaaaaaaaatcaattctagatataattttcaatgcaagaacaaaagattacttacttgaaaagttgaaatgatgaccaaaatctactgctttattctaacaacagcgccagcatcgatgtttttcataattataagcttttgcaaacatagtaaataaaatatattgggggaagaggactgggtaaaatctttgtcaaccccattcaagagaagataatgtaacagcaatatgatatgtttctgagatattcttggcatatagttataggaatcagtaagcaaaaagactaactcttgccctagcaatccattggggatttttacccaacaaaagaaggaaaataaatgagacaaataagggaaacagatgattttggattttcaaatgtgtttactgtttaaagaaataattaatatatatttatttcagatcatgaattcagattctagttatacataaattaaattttatttaaaaaaaatatatatattagttttgagtcctttcttttcaatataaatatattgttgtgagtacgtggctaaatattactctcttcctattatactcctactgcaactaacttaaccaattgtctgttatgatagttggtactcaggtctacaccaaagcctataaagccatcattcaagttagttgggtaacacattaagagagacagtcagatcgagatagagaattttaggagttgtttaaagagtaaaggaagagagaagtgagttctttagggcattaatggtgtgatgcatttctaatcataattactgcttaatgaggttgtttataacagaagcaaagcttcttgagttgtacagttaaatcatttgtaatcctctgttcttcattagctaataaagactctcaaagccttgttgttgttctggtcagggatataggcaagttggatcatcatcatcttgttcgtacctcgtaaagttggtgtgttcattgtgtttgattaactctatttttcattgattattgctgcattcaaattacacttaaactctaattggtttcattgtcaatttcttgtgttaaatgttctggttgagttgttgttttcccaacaatagttggcatcaaagttcagttcttgaagcaaaaataggatcaagaaagggattcatcgctttcgcacgttgtgaagtagacaagctcaatggagcaaatgatttcagattatggaggattaaaatgaaggcctttgtttttttttattatttctctgatttattcactcctccagcagttaatttttctgaagttgttgtttgtagtcctagtacagtcacggttgaacaaaataacatgctccttgaaccggttttgaatgatgaaataaaaagagctctcttccagatgcatccggataaatccctgagccccgatggcatgacaccgggcttctatcaaaaatgttggagtgcggtgacttttgatcatgttatgtgtttctactattacctataatgtcactcatgggggtcattctatgggtccaatttttcctggtagaggcctaagacacggggatccactatctccatatctgctccttatttgtgctgagggcttttcggctctattgaagaagtatgaaaggcatcaatggtgaactgggtgtaaagtgtctagaggtgctccaagagtttctcatatgctttttgtggatgatagttatttgtattgtaagtctaatggaaagtaagctcaaaatgttattcagcttttacaaagctatgaattggggtttggtcagaaggtgaattttgataagtcttcagtttttttcagtaagaacactagtgaggaggttcggagtcaagtttgtgcaattatgggattggtcgaggccaatgaagatagcttatacttgggcttaccttgcattatggggaggaaaaagaatgcaatactttgtttcctagaagaaaaaaagaggcaatatatttttagttgggaaattaagtttttatccaaagcgggtaaggaagtgttgattaagtaggttgcttaagctcttccaagttatgctatgagtgtgttccttttgactaaggacatttgtgctagccttgaaggtatgatggcaaaatttttgtggaaagcccaatccaactctacaagcaagggagttagttggtttagttggaagcgcctttgtcaacataagcatgctggtgggttaggattttgcaatctccgtgattacaacttatcttttttgggaaaacaaggccggcagttactcacaaaaaaagatacgttagtgaaaaggatttataaagcccggtattacccaaatggttcttttttacaagttgagctcggacagaatccaagttttatttggtgtagtatttggtaagcccaagctctagttaggaatggtgcaaggcgatcaattggtactggctcatctgttagtgtcctccttgatccgtggctgccaatggttagtaaccccttcattatttcagaacatcaaggtctcgtgggtgacagatcttaggacttagagctacttgatgatatatttgtgaagagggatagaaatttgattatgagcattcagtgaagtagttctacagacgatgattcttggtactggaacatggaacactcgggtttatatactgtcaagagcgcttgtaagtttctgcaatctgctactgggagttggctgcatctagaagaggaaaattgctggaaaaaattgtggaaacttgaagtacctccaaaagttcaacatttcttgtggagggcttgtacaggctgccttccaacaaaggttcaacctagcacaaagcacgtaatgtggatttattttgtccattttgtaatgatgagcatgagacaattttccatgttcttgttggttgtggattcgctcgtagttgctggaatttatcagctattgcattaaattctaatttataccaagaatttagcagctggttttttgcactcttagacgaggaccgtggtgatattgttcttgatgcagcaatggtcagttagagtttgtggaagatccaaaatgaggttttgtggcagcaaaaaccttgttctgcttctagtgtggtgaagtcggctcggtcagtccttgaccaatggaagattgctagaacttagtcgtccctctttcagactagtgtttcttttcggtgcaatcattggggtaaaccagaaagtttaaaggtcaaggtgaatgtggacagagctatcaaaggttcgggttttgttgtgtggttcgtgaatctaatgaaagattaattgaatccatttcaagtagaagtgattgttcttcctgaaattgctgaagtgattagaataaaagaagcgttgagttgggctaaagataaaggttggaaagatgtggttgtcgagtcggatgcgttgatggtggttcaagcaataaatagttcagtccagatgccatcacaatttggtttgttggtggctgactgtcgtttaattttattatctttaaagaatgttttaatttcttttatttgtaaatctgctaataaggtcgcccgttgtgttgctagggggtcttgttttacgtcagattgtattttcaatgagctgaatgctcattctgctttgcaaaagtttgttatgtttgaggccttttttaatgcataatcatcctttgttcaaaaaagaaaatgaaggccttttctgttcatcaagaaatctatcaagccattgataaggaagagtaaaaagaattgggaaatgacaagaagaagatcatagagattgagacaaaagcacatagtgccatacttgtttgaggtgctgagagaagtgtcaagtgaagaaacaacattcggtttacgggagaaattggtctcaatctatctgaagagatccttcacaaataaattgtacttgaagaagaaactatacacacttgtaagtgtcattattttgtgacagtttagttatgtacaatatctagtcgtgtttggagtttttatctgttatatctgcattaacgttctgttaagtcggttattgttaagtgttagttagtgccaggtggactgttttgtggatatatatagtcggttttagtctgcaaacag

SEQ ID NO: 14075 - DNA, 6918 bp, Cannabis sativa
  modified_base (6868)..(6882): a, c, t, g, unknown or other
cttatttaatcaacttctctctttcctaattttaataatacaagtaaacaaatgtaagggaatgattaccttactattgattcccattacttattagtaaacatgcaggtcgtacatctcattagtttcctctaattctatttgactgcaccaacttttgctacatattagttttaaggtagaaaagtatttgtatgctcattatgtaacagtaaaggctgtacatttcattagtcttctgtaattctgtttgaccacaccaacttttgctgcatgttcgtttaaaggttgaaactatttgctatatatatgctcactgattatgtaatattaaaggtgtttataaaaattttaaattatatatatgaaaattaattaaaaaataaaactatatcaaataattttttaatataaaattatatcaagtaatttaaaatatatatttttttataatatattaaaaaaattattttaaaaaataaataaatagatacataaatatttaaaattgattatatttgataaatagaaaatttctttgactttgacgtacatgcgaagagcctactccaaatcctagtatgatttgattttgatgtgagtttccttatataatcgactagtcgtgtcatatttttaatacgtaatgtaaattaggtgctataggttttgagttcttcatattggtggtttaaggtttttgagttttggcctattattttcgtctaaattggttgtgtgtgttggggttcgatcagctgggttatgatcgagtcttagtaggggtgtctcatccaattggttgtgtggtggtcgactgagttgtgattggggcggatgaggaggagaaaacttttgatataatgtggtgtttagtgggggaggttgcttacatgaagggttttaaactttaacgtctttcagaatgtgatggtgtcattgtggcagttagggcaatgtatgtttatcaagaaattagacaataatttattcatctttcaattttatcattaagcgaatattgctagtgctattgaggggtgtccctggacattcgatcataaacatcttattctgcaacgtctcaaagagggagagaagtcaagttaaactggttggatttataggttcaagtgcatgatttacaattgagatcacgatctgatagggtcttgaaagtcgcagcaaactattttggttcgtatgttgcatctaatccaaagaattttaatggggtgtggagagacttttttcaggttagagtgtccattgatatataaacctctgaaacgaataatgaggttgaagaaggagagtgctgaaactttttgggcaaattttaaatatgaaagggtccttactttttattttatttgcgacatcatgggtcatgtgcaaaagaagtgccctcgtgtatatactacactggctcacttctgtgtttggtcgaatggtaattttatgtgtgttacgtcataaaaatcttcacatatgattagagccaggtggttgcgatcgactccgatggtggtaggggagaataatatgggtgtttacggggacggatagggcagtggcgtcagctggggattgtgttgtaaacaagaaatgttttgttaatggagtacgggataatggtaaggttgtggtgggtggagagggttttggtgttagtaaggaagggtttgtcaataagctgagggttgacgaaaggttgttatatgtcagtgttcttgatttggtggagatgaaggaacgaaagttaggtgctaagggggagggtgtgttgattatagttgttatcgaggtgatggaccatgatgctattgaggtgtcaaaaatgttcaagggacgggacctatgaagcaagccgcctgtcaatatgagtatgttaagttggaattattgtgagcttgggaatctacgaaaaactcaatcctttatgggtcttataatccaaaaaagaaatctaattttattttttttatgtgagacgatttgtagtaaggaggttattgagagattcaaggttcgtattggttataaggggtgtttttctattgatgctcaatgacaaatgggggtattcctatgttttagaaggcatttgaggaggctactatacttggttattcaaataaccacatagatgtggttgttgcggttgggggtatggaggcttggagacttacaagtttgtatggggagccaaataggaggtttagacgggatacttaggatttggttcgtactttgaagaaccagtccactcttctgtgatgcattattggcgatctaaataataaggggagtaattaggagaagagaggacggagggcatatctaaactggctattggatggatttcgaggtatgttaaatgactgtgtgttgtttgattttgagttgagtggatatcgttttacatgggagagtggtcgtggtacgaatggatgtatggaggcctgccttaataaggctcttcttacgcaatattagcttgatatttttaaggaagcttatctggttaatcttgagtttttaggctcagaccattgttcaattttcttaaattcgtgtattcatgttatttatcagtgtgttaagcattttaaatttgaaaattcatggtcacaggagcctatgtgtgagcagttggtgaaggggttggggaggggtagtttggaggcaagtctctttgagaaaatctctaagtgtggggtggttctgagtgattggggtaagagtgccaccacgtgttttaaggagatgttgatgtagtgtaagagacggttgagggagcttcgttaaaaaactgatgttgatttacaaaggttgtataaggttgtatgagaaagagcaacataagttttatgagattctggctgaaaaaagaagttttttagaagcaaagggcgaagcagttctggttgaaagagggtgataagaatagttgatattttcatgcgatggctagtgctcgtaaatgtacaaatcatatttctaagttgcaagatgataggggtgattggtttacctggaatgatgggcttccttagttagtaaaaaactatttgcaaggtattcatattgcctcagatgccaattggggtaacctgcttaatgatattcaagttttggtttcagattctcaaaatgatgatttagtgtgtctcatttcggaagagggaattcatagggctctgttttaaatgcatccggagaaggctccgagtcctaatagaatgagtctgggattttatcagaaattttggcatattgtggggcgaatgtagtaaagttagttcaacgggttttctcttcgagtgagttttcaattggcattaatgatatcaatattgttattattccaacaaataataactcgataaagatggtgaatttaaggccaatctcttttgtgtaatgtggtctacaagattatttttaaggtgatggccaatcattttaaagtggtactgccacatgtaatttttgacgcataaagcgtatttataccgatttagttgattttcgataatattatggtatcaattatgcactatttgaagcgcaatgcttccgggaatgagggggttatggtgttaaagcttgatattagtaaagcgtatgatagggtggggtggaattatctcaagtttatgcttcaaaaattagtttttcacaacattaggtgcaactgattttaggctatttaataaacatatcatattcgggttgacacaacaatcacgaaattgacccgttaatgacctattttaagttattttagtactttaacatgtcataaatgagttataaacgtgttgaatacttcataagcgtgttattgttaacatgtttaaacaaaatatgcttataaacgggttacatgagtcgtgttgtgtcaactcgcttgtaaacgggtcgtgttcgggtcaagtatatacatgggtctcgacaggacatgaacacgacccgcgaacacgaattgccacccctagggtcgtggctgggattttgggactgcggctttagcgtgtttctcaagagattgttgaagttatggctctcaaagaagtgctttcgtggttaaaacgtgatttttcaattgttagtataactaaatatgattgtttgctattggtacaaattgttataaatttaaatattttgtcacccacttttaatggtattgatgaagattgtaaacaacttttattttattttattaatgtttctttacattttgtcaaataatcttttaattgatttctcactttattgttagaacatattgtttataggatgatcgtatttgttcatattataatcttagttttgatgttattgacattgttgattacgaattagtttagttactaaaatttttcagttaaaaaaaatcattaaaaattacaaagtgtaattgaaacaactctatcatgtttaattatatatttattcttaaaaattacaaataataataaataaataaataaaattaagctaccaaacacgcctaaaagaattaaattggcacctgtttgggcttaggaaagtaagagcgccccacgctgtgcatattttctttccaaccgaggagcacaaattggacccagatctttccatggcgtctccatctgattcttctgcacagtgagttcatctatctttctgtgaatttcaaggtattttattgtcttttgttgttctttgtgcctaacccttattatcttacaagagaggctgcagtaaggaagcaaaagaagggacccccaattaagttcctggtccctcttatatatgcccctgttcttcctctaagtgagtttcacattttttctctattagatagatagatttattaactgtgtgattgtattgttgcttattgtttttcctaaccgggttttgtcccgtgaaatgttctggttttctgggtaattttcagttcggctctctctgcgaaggaatcctgtattaagggatcgtttgtttggtgctgttttggctggtgcatttgctcatggcttttatttggtgtatccttttatgttgttttggctcgtttcattttatcatagatatgaataatattctaaataatccagtaagctcttaatagcattgttttctttaaaacttaagagataatccatgtatgtcattcatgttatgtttgttaggcttgcaattgtggaaaaattagtggttagggatgaatgattgcaatgagatttctatcatttgtcccttatttctacttagtgaatatatagatagaaacagccaaattcatgtatatgctgataccatttttaggagttttgtacacaataacagcttgtattatgtcattcccggatttttttttttctgatgtacattagactggtagaactattgattgctgtctctttaatatatttattttcttacttatcatagatgtattacgagtgccataagagagaaatgagattgggttttaaattccttgtattgaaaatgggctcctacattagtatggtgatggattaaggttgggttttgctgaaagattttttagatttcacctcttttaaagctagttcaggtccatccgtgtcttcgcaatttggaacaattgttaacctctgaagtatagagttactaattcactaggtgtttttgtagattgtagtcaaacatgttcttttgatggagtgtttatgatacagaataagaataagagggtagccaacagcatgtattgtcacccaaagttatgataaactcttctttgctctaatgatcttgtcatttgaatagtgacaatgacaagatcattagagcatagaacttttggatggaagtgtaaatagcaaaatagaagtagagtttggagggttttaccaccaaaaaatcaatttgtgggattaagtgtcacaattcgtttagttcatgtggttttgctgccaatatcccttatatgtattatatttttttaaggccgttggctgcacactatgagggtttgttatagtttcattttctgtcattgattaagaactagtttctgtagatgagaatgaaatgatggttttcttgttctccaacattgtagatttcagtcagggtccataaacatttcaagtcaaatttccttagacccatattattatgttaggagttcatttatttatttattttataaaaaaaaaaaaaaaaaaaacatatataattaagtagaaaaacaaggaaagtggaaggaccatacctaagttttaggaacacataatgcatatgcttaattgaaatggtgaataaatatatttcattattcactgtcattgaacttcgtttgttgtcacctttcaatttcctgcttctgttgttgtattatgtatgttgtttttccttcacagataatctcagaacggatatatatgatgcggagagcaagtaaattttcccaatcagtggttgtgatataggatttttggttacctctcttgatgacattgggtgattggtggtttcttttgcggtgctcaacccttggtgaagcttcaggcaacacattctagtgacctttaataaatagcctgggacaggtttgagatttacatttattttattatggagtagtcgtacatgttctttcctaataaaaggattggcttgagatttctattgccattttagttgattatttagtaattaaagaatgcttaagagggttttgttcaattgccacctcttgttatgggtaaagccatagatgctgagatttgatccttttgtttgtgtgaaagatttatagccatgagatatcactttaaagctataagggctcgtttggaatgtcgtattaggtcgtatnnnnnnnnnnnnnnntatattgaattggattatacattatatttttatata

SEQ ID NO: 14076 - DNA, 3674 bp, Cannabis sativa
agagagagagagagagaggaaatagtgaatgtgggaatgaggcatgaccaaataaactttatataggttctggcatgcccttctttccaaatatttagtgagcagttacgcaacccacaaaatagccatgcaaaagacaaacaattccctagtgggaacgtgagcaacaaaaaaaaattataactgaagttgtcatgaagagaaatgagtcgtatgagagcccaagtatctgatcgaccataagctgcgctacaaattaagactctaacagtcagaactgaagttgaaaagtccctatctatacaagcatctgcacaaagacatggggaaaaatgttatcccaatttttacacacatgacatgacatgtccacataagcaagattgatgccacgtggaatacaacctgtcagtaggaggaccaattcatcatgcacaatttactagttggcgaagtgtaaatattcaagcaggacaaagatatatcaaaaaggccaaccaggagagtctggccggaccacccctagccggccagccccaaacaaggggtaggccggccaacttccatattggcagtcacaattgatgtttctgcagctttcaccttggacgggtaatggctcactctcagctgcgaatccactccaacaacccacaaaagtaggggttcaacttcagatatttatctattctttaggagcaattaattggttattttttgtatatttattatgtaaaaaagaggcaatgtcacctcatcttaaggaatattaacctactttgaactagatcttttgtaagctctcatctatataaagagcattaggctagactaaaaagctaagtgctaaccctaagtcctatgtgttaagcattcatctcaaaaccctaagtctctctctctctctcacgcctcttgttgtgtgcaatacaccaagtctatttctcatctcacccattaaagatttgccttacattgttctcgctattgtactattcatagaaagtcactctagaaattacaaggtagaaacctgtaatcttagtggtattatctctcgaatcaatacaattaaaagaagtaaggtcattacccattaaccaagggagtcgaacctctataaattgtcgtgtctatttatttactttctttaattatttacacgtggcaattttgatcataaataaggtttcactactagttgatcaaatctgaggttagcaccgggtataaaatatgaaaatcataaaatttcacatatattatatataatacttctagaattcaaatatatctatataattgcataaataataatctaaagtctatttctgaatataaggcctaattatctactagttcttaaataaaactaagtagtcattacattaaaagtgacttgccccatatgtgtgtgtcacatttgtatgtgatttatgggtatcattattgttaattttttaatcataaaagtgaaagtgaaattttgtcttctaaaattttatttttttaaaacaaaaatgaattttataatcacctttgtttttttaattttaaaaacataaaacaaaaatgtgttttgtatttttccttttttatatttgattttttttagtttgggtccgagtctaggtttgcgtttgggttcggatctagatttgaatctaggtccaagtctaagtttggggtcggtttgagtccgaatccaaagttggggctggggtccaagttcgaggtaaggtctatgttaggatccccattttaggttatttggggcccaaactagggtctaagtcatcagacccaagttccaaggtcaagttagagtaggtgtcaaaaaaaaaaaatgttaaaggaattttggaagtgattttttttaaaagtttttaatattaattctcaataaaaaaaataaaaacagtttttagaacatatttttttaaaaatatttttactatcctattaataaaaagcataaaaattgataaaaaaaaaaaattcttctatatcttcgtattgcattgaatagtttttttacgttccatttgaaaatgaattagccaccaaaataatggaaaattcataaataccaaacaataaacaaattagtaagaagtaaatttttctttccatttcattacctctaaatgacctccacatttttgctctaataattttgatataatgtaaattttgtcaaataggtaaacaagaatatattaacgtaaatcccaggtaaccatgttcataaaacttgctctaagttatccacgttaactagtttaccataaaatttcaatatttaatttaagataccacatttcaccatcaaaatctccattaactcctcttacattttatttaacaaaaaagcttatacattttcataatatatatatagagagcctcaacatacaaagtgattgaagcaaacatagtataagccttgattggatacatagctagattaactatgattacacttaatctgtcttgagagacagaagattctcaaacttagcttgggcggtggtggtagtggtggggcagagttttgggcatcccttcacctcataggagcaccaacaacgagggcacagagacctatcacaggcacaacctccactgcagttcgatggacacttaccttgtctcgtatcactacgataacacttcccagcttcttcgtcgcactcacagcttaaacatttcgtcggtcctgatgaataataaaaacaaaaactataattttactatacaaagatattattcattcaaaaaatttggtagtgtaaaagactcaccaggtggtgggcaaggactattatcaaacagccccagaaagtccacacgagcatgagttgttgcagccacaagtgctaatagtaggaacgccagcaaagtcttggggaaagccattgatattggtttgtaaagagtaagaggtgataaatttgggttagatttgtataaatttatataagggccaccaacaacatttacatttttaccatgtgaaaattgttttcacttttcactaaccaaaccggtggagttccatattttatcttcatgagaaacgtgtcatttaggtaggtagagacgtgtacaatttcgggctagaatatatatagctttattaatttttcaactttttagtagtaatttgtcaatggtttgaattttcgacgcatcacgtgaacactatatggatcagtttttttttcttatttaaaaaatcaccaaaatcatccataaacatacagctaaacgctaaagagtataaatgccaaaaataaaataatagacaatcatctagcaaacaacttatttattcatttaaaaagcacagctacttcctgtgcggtcacattagcccactgatatacataaattaaaaacaattttaaaaatttgaataaggtacttgttacttcttctaataatagttttagatataattaatatctcctaacaaaaatagacacaattactaaatgatcagaatcaatctatatacgacagattaaagatgctttatctcatctccctgctacccacgtttctcacattcaccgctcatactttggctgatagacttgctcattgggcttcagggttagacgaagctactatttggattggtgatgacccttgtaatcttactgaatttc

SEQ ID NO: 14077 - DNA, 14646 bp, Cannabis sativa
tacggaattctacatagaaatttttattgcaactagcgaagcaacttaaatcgcgaccaaaaattgtatagcaacctacatataaaccaccaaaaaaaccactttaaaaatccaaactgtaaatttaaaaaaataaaaaataataatatatgaaataagtcaataataatatagaagcataaaaaaaatataattatatgtaagaaattaacaaaaagaaaaacagaagaagaagatgccgtgtgctaaagtgccacagccgccgttcactgttgcattcacggcaatacagtgtcaactatagtctccttggagcagaagtcagcaccgaatccaacttatactaaatttaagctctttccatggagaattctttacagtttggtacttacttaccagttaccaccacctcctttttgtgtcaaaatcggtacttgacaagttcagtcaatggttttggtccctaatgtcacatgaacacatggctgctgttttttggtccatccacaaggagataagtgcttcattcaccattaatgaaatggagccatgggaggtcaagccaacttaaccacctcattaaagacaagcaaaacactgtcactgtcgtaatgccccacatctccctatgtcatttggaccctcatctttctttgcactggttttactgtataattgcagatacaggaagacaaataaaagaaaagatcacaaaatggggacactatctcggatttaaaaattaaaaaaaaaaggatcattctaagtttcaccaactacatgtgtaaaacagctgtttttaatgcagattttttttatctcatatttggacaattttcttaaaattgcattgttacaaatttcctaaataaaaaaaatggaaaatcaccacctagaatggcgcatcccttaataatttactatctagtgtagagatccaaacccccacttggactataattctgaagtggacccctctcattaaatttctactacagtacaagagtacatgaatcatatactatgctaccttggatctgagtaatttacatcgaagtagcagcaagggaaaagataccatctttcccaccagatttggatttgtttcctgaacttgcttcttgcagcatgctcaccactattcgcattgatggccgagtaagcggatgtgggttgatgcagagaagagctatgtggagtactctgctaatttcttccttgtgagttatgacatcaagtctggaatcaattacttggtctgatccattttgttccatagtagcgcagacccatttaaccaaatctttgtctccgtattctgaatcaactgggagtctaccagtcaatagctctagtaacaccactccaaagctataaatgtcgctcttttcattcactcgaagtgtataaccatattctgttttcgtcaattgaaacaacacaaataaaaatgaatcaatgaacacttaagattttaccaaatgttaacaaagaactgtgtaccaaaaatgagttacaagtgagtaagaacagacctggtgcgatataaccacaagaccctgcaataatagacatagaaagaacatctttactgactccgcctacaattttagccaccccaaaatcagcaactttggctccaaaattttcatccaacaatatgttgttggattttacatctctatgaacaattggaggtacacaatcgtggtgcaagtaagaaagcccctcagctgcatctagagctatcttgtaccttgttggccaatccaacatgcctcctttactactatggagtaaatcccccaagcttccattaggcatgtattcataaaccagaagtttgcaataatcagagctgcagcaacaccacagcctgacaatattcttgtgcctaatctttccaagtgtttcaacttctgcttcgaattcatctttctcccgcacaacaggacaagtgtcatctttctttactcctccccaaagcttctttactgcaactttctcaccgttgccaagcaccactttgtagacttttcctgaagctccacttcctatcacattgtcctcgtttaggcagtcgactacatcaaactcattgaaactaagtttatggaaagacctccatatggctgtagtgattgtttcagtgttcttcttataggacatgtacttccaatagaacccaaaaagtccaacaagaaaaacaatggctgcaagaatgaagattgaacgtaaaatccaaaggtatttcatcttgttacttgtaacggcccgagaacaaagatcagggatgtcaccacacaagcctggattgcccaaaaaactacttttgtaattttcatttgcataaagaggaggaagcgcaccagaaagcttattgttcgacaagtttagcatattaagctttaaattctgcaactcggatgggattttcccagagagaagatttccagaaagatcaagatagttaagaccaaacacactcccaatctcacttgggatttgaccagatagcttattgttagctaaactaagctcattcagcttcttcatagaatcaattccgaccggaatctgcccagatagttggttgttactaagatcaagccttcccaattggctcaacttagtcaaactcgccggaatggaacccgatagcacattatggctacaagataattcaacaaggctgtccagtgaagcgagctcattaggcaaggccccagaaaacttgtttcgagatattaacaaaagtgaaatgttacgtgcaccagaaattttgctagatatgggaccagaaagtgaattatgagcaaggtcaagcaaggagacacgggggagaccccagaattgagcaggaacaatacctgaaagattgttgtgcttcattctcactctgctcaaggactggcattttccaaggctcggtggaattttcccggaaaatgaattgtatataataataaggtcttccagtacacccttcacgcacaagctttctgggatttctccactaaacccattgtacgaaacatcgagcctctgcaacggcgagttcttcccgagttgactgggcaacttgccgctgagtttgttgttgaataatttgagttcgtataagtttggagactcagctatactctctggtagtgtcccttcaagccgattatcaaacaaattcagcgactctagttgcaaaccgcaaagctcattcggaatcgtaccagtcagttggttcatggacacgtcgaatcttcgcagggtcttcaatgtcgacattcccggaggtaactcaccggaaatagaattgttgtaaagctcaatctgttctatacttcgtaggtctgtaattgaactaggaatagctccgctgagtctgttcatggaaatgtcaaggttcttgagccgcgtcagcaggcccaaactcgccggaatctgtcccacgaggttacaaccactgagccataagctctcaagactagtcaggttaccaaactcactcggtatccgactcggcgagaacggattataagcgagaaaaagctctctgagactagaaatgttaccaagagaactgggtataactccgtcaagaagatttccggagagaataagcgattcaagtttctgaaactgaccaaagcttgccggaattccaccagtgaagttgtttccagtaaggtccagttgccggaggttagcgattttggaaatacttccgggaatgggacccacgaggaggttctgagagagaacgagggtctggagattccggcagtcggagatagtgttcggcagagaggagttgatagagttattagagagaataatggaagagagagactggaggcgacaaaggaaaacagggaaaggtccggcaagctgagaactccgaagttcgatggagataactcgacgagttgagttttcacaggtgacaccgaaccagttgcaaggatcatcgtcccggtcattccaggaggagagggactgagttggatcggaaaggccacgtttgactcggaggaggtagagtccctcttggtttagagagagagtcaaaggaggagagagaaagagaaggaagaaaagtaaggtgagcaccattttagaagaatggagggaaaatgagttgagttttggaggtgaagacgaagaagaataataataaaaaagtagcaactttgagtgtgaaagtttggacatttgaagcagaagaaggtgggccctgcaaatttaatattaaattgttggaaatgtaagattttattttattttttccaagaaaagggaatgaaataataattttggaatttgaaatagaaaacaagaagaatgtgaagatgagagtaattaattcgttaattattattttttttttaaacggattaattcgtcagttaaaagaaagcaaatcattaaaattagtcaataattaaaatgaaactgtacacactacacaaaaagacgaaaccgtgacagagacagaagaaagaagtagtatatagttatgtttttctatttcttttttctttttgaaaaaaaaaaaacctatttttatatgtttgttacgttaaaaaaagtaaatgaaaagaaagactagatggtcaaacaactaacttcaactttgttttttcgttattgtttttattggttcttttaacaaattgagtcacaaaaggagtttaatataattagatttcattgggagttgcaagttttaattaatcagctatgaggggctaaccgaatatttgagaatataggaattatggttattgatatttttttttattattatctttctttatttttgaagaatgattgttgatagttaataaaaatataataatgggatattccttacgaagctattgaagattgtattaatttgttttctcttccttccaaagaaaccggaagcaatcgaaaaaaaaatgcaagatgggatatttgttattaaaccataaattaaacaaagaatcatgttatacataatattaattgtgtgatttattcatgtttaatttagtcaacaaatttggtcaaaatttggtatttaaagaaatttaccattgctccttagctattgttaagttcaaaagttaaggctacctttttcaagataagtcacctaggaaaacaacaaataaggtgtgtttatttattataaattcaaataccaaatacgtatcaacatataaatacaaaattatcaacactgaccggaattgttgactaagttaatatcattaaataaatttggaaattgcaattttaacaagatgatattattggtcttataagttaattaactaacttaataatatactcctgagtgctgacaaaaaaaaaataatacctgtatattgtttaagatgaatgattgggacagttaaattgttatttgaatttgtatttattattaagtttaaaaatgaaaaaaaaaaaaaaatctaatataaaaatagagatattgttagaaataatgaatagagaaaagaaattaagtaagcatgcttgggaattgaacccgcatccaggccagtcctgtgcataggcgggctaggcctgtgcctaggacccacccagcttaagggcccaaaaattttttttcctcttttaaaattatacattttttttattgattttgaaaaatactacattttttctaacataaaggcccaaaaaaaatttttcctgtggcccactttgtttcaaggtcggccctgcccgcatcgttagcttggaaggctaaaagttgtagtcgacgttgattcatcagttttaatttaacatctctaattcaaaactgaacgtgaaactttgatttcattcgattctttatatttcttacacaaaataacttacaattaaaaatgatacggtctcatttaaaaatatgaattgctaatatttattatacatttatctgaataataaataatataatttaagtgtgtatctaacattataaatattatttattttactttgtatgtaataaattattgaatatagtatggtattaaataatactaatacaatataatgcagcttatgacttaaaagtataccttcgtattttagtaaaaaaaaaattctttaaccaaaatagctctaattcacttagattcaaatatattaatattttttttagtgaaacctaatactaattatagaataaaaaaatatatatttatttagtatcttagttttaattaaaaaaattacaaatatatttttatttaatttaaccaaaaaaaaaatatagaaatacttggactatactatcaaatgttttctgattttgttttagtttattcctcctgaactatttagattgttgtatttaaggatttgtaactaatttcattcatttttggtaatgtgtcgattgtccttatactaaattgtaccccttgaactttgatactactacatcatgccctggaattttaacatgtaacaaattgtgctcttaaattttcatccacgtcagatttcttttagtaaaattagacaaaagttcttaaatccaacgatctcaatagtttgaggataatttttagcgacttaaaaagttcatgagccatgatttggtacatattaaagtttagagagcaaaaatctaaactagcctaatatataattctttataaaatttcaaaaggaagaaaaaaaaataataaggattatagtgaattaatgatatgttaatgtgtttcactttattatttattattgaattttcattaatattatgagtaaaaaattcaaataaccgtttgcgaagcgcagcatgtttcctaattgataattaaacgggctataaatattttgttatttgcatgctcttgaatttggcttacatcgcattgatttggtgtattgatgtttctaattctaactatgtattattacatggaaaacaccaaaagatgtcatcagcatatgattagttagtgaatcttaattaatacaaatacaatgctgcttgcatcattgctttacttaagaatgtcaaaagaggtcccataatacatgtacagttaacttactcaacattttacttcccaaatgcatccaaattaattaaaagcaaatgtagtgtattgctcatctcaagcaagcatatggaccccccaactacactatagtctatacataaataaaagaaatattataaatataaatatatatattatattatattaataaataaataaaaaaagtactgtaaaacggtgaaagacccactatcgtcctggttccagagtcctcttacagtctttatttatgttgaaagtatggtggtggagactgcagagcccggccaaaaggaccagcagcaatccctttccaaggattttttaaaaataaaatcccgacttttgttccccattgaccacctcctatatagccacattgaccaactactacatttttctggagtgctattattaattactacttcttagtaaatctcccagcgtttgaaaatacaccatggaatattttttttcgtaacaatatttataatattatctttataattttttaaaaactaatagtttatagtgctgaaaatagatttgaagttttttgtacacgcttggtaaattgaaatatcaaattaaaattctgttttcgataatgtaaactattcaaaattttcaaaaataatttacagagatgatattgtaactataacgaataccgctataaaaaaaaaaattccaacaagtgattttggacgtgaaggttgaataaaaagttgtaattatcacccctcctacacttttatactcaccctaaatgattagttatttgttaatcaactattaggtgacgtttaatttactgaaatgtaattgtaatgataataaaaataataatagaatgtaatggtaatagtaatgatgtttggtttattttgtaatgaacattataattaatttcttttatttgatttgggataaaaataaaattaaataattaagtaatatattgacaaaaatattctcaatttatttattgtcaacgtagagaaatagagcaaggcaaagagagaaagagagtttcagcaaaagcttaatattattgatattataaatcctttatatagagaatacagaggatacattaaccaagaaaataactaccttaactaacaaacataattaactaattctatccaaaacagaaataacagccattagttaatattatttacatccccttcaaacgaaaagggatattagccattttgagtttgaatttaaggtagatgaatcggtctttagacagaggctttgtaagcaggtcagccacttgatcaacacttggaacaaaacgtactgaaagttgtttggccaaaatttgatccctaacaaaatacaaatcgatctcaatatgttttgatcgagcatgaaaaatagaatttgctgcaaaagtcgtagcactctgattgtcgacttaaataatagggcattgtgaaagagtgatcttcagttcagaaagtaatgagacaatccactttaattcagcagttgtgttggctagtgcacgaaactcacttttagtgcttgatctagcaacaacctgttgcttcttagagagcagctgatgagagcgtctgtcatcaatacagctggcccaatcagcatcggagtaactttctagtgtcaatgaagttgctggtttgatcaacaaaccctctgaagtggtgcctttgagatatcttagcaaccgtttacaggcttcccaatgtgagattgttggagctttcaaaaattggctaagtttgttgattgcaaaagcaacatcaagtctagtaagactgagatattgtagtgccccgattgtaatcctgtataatgttgaatcatcaaataattctctatcattgagagatagtttgaaagtgcttctcagaggagtagaacaagttttgacacctttcatgtgaaccttgagtaagagatctgttatatactttgtttgtgacagaagcatgccatgatttgtctcgatgtatttctactccaagaaagtaatgtacttcactaatgtgagcttggatttaagaagtaaatctcagcttcatcgagatgacgagcctcgaatcctaaagagttatggttgcaagccataagtctcaaagggttgaaacacgtgattttcacgtgtgcatgtgatccgtttaacaatgtgattttcacgtgatgttcagtgcaaacggcaggatgccgtttaaccattctcatatatattggcacgttctcataatatactttcgattggcctataccctactattgtacccaattttcaatcatattttcacctactgttacactatttatgattttcaacaatcttcaattatttctttttaacgacaaatttgaaagtaattagtcaaatgtttagacgttaatttcctcgtatcacatgcatgtatctcgtttagttaaaaacaaaatagggtactatcgactttttgcgatgagatgatttgtgaattgtgaaaggtaaactttattcttatctatgttttatttaacgatctaattttattaaacttggaactatcacaaaatgttggtggtagatgcattaattggtcaagcttttacaattaattagccaaaaacaataattaattgatttatatgaacagtcaaacaaatattcatgataaaatgatatacgtatcactagttggtggcctaattaatcgtaaagttaaagacaaccctattcaaaacggcactggtcatgaactaaaatctattctaatgtcatacataacgtaactatatgtaaacagtgtgcaccgtttattacatataacaccaaaatgacatgtcgtttttgggtcaagggattcaaattaagcaagtgcgtttcaacaaatttctattgaaaagtgaacacaacacaatacaccatatatctcttttatttagagcatggaatttaattaaagtatgataaatcctatcaatggaccaatttgtgtatccaataattgacagcatgcaattaaatcatatttccaaggttgttgcttttgatcttgaccatctttgtaattattattattattatggggccaatgcatgcatgatgaagaagccaaatagtgtttgattaattttaaataacgtacgattttcatgacacggtaaaacttttaattagaaaggagttaattgtcaaaggaacctaagcttctgttaattcaattactgttagttatttttgttgcgctcttttaggactgttgtaactaacttttgttagtcttttctctctgcactttactcatctctctgtatataaggaactttgtctcttttcctggatcaatgaaaaacacttcatcttttacctttgtctcatctttctcttcttctttcttttgtttgagcattaacatggtatatcagagcttcacttgttctttcacggagcattcatcagcaatcaacaatggagcctcgtcaaatcccccaggtatctctcaacaattcaatttaccaaaaactaacctagtttccttctctcattctctctctgtgcgattggatgagtttaactacctaccatggaagtaccaagttctggcagcaatcaaaggtagtcgcctgcaacgatttcttgaaccgaatcaagcgctacttcaattcatcacagttgaagatcaaactgcaaacacagtcaatcctgagtatgaggactgggagcaacaagataatatcctcgtgtcttggcttctctcttcgatgtctgaaaaggtactcacaagaatggttggatcggattctgcagctcagatctggattaatctttgtgaatactatacttccctcaatcgagccaagatcggacaatacaagactctgctgaggaatacaaaaatgcaagcttctctcaatgactatctgctcaaaataaaaagtgttattgacactttagcctcaatcggtcatcctacatctgcacacgatcatattgaggccatttttaatggtctccctactgagtacaatgtgttcatcacctcagtcaatacaagaactgatccttatagtgttgcagaaatagaggctctaccacagtgtcagctctgccacaagctcaaacacacagttcaacaatgcttttacgggttcgataagtctttcactgggccagagtcatttcagaacattcaaggcaaccacagtgctaatattgttgagatccaagcctattatgcaactcatgaaattgtaaatgaccttgattggtacccggactcaggtgccacaaatcatctcacccctaatgagctaaatctcaacactagcaatacctatcttggtgaacaacaagtgcactgggcaatggaacaggtttacaaattcttaacactggtcaatcttcattcatttccccctttcattctcaacatttgtttttaaacaatttattacatgtgccaaccattactaaaaaccttcttagtgtctctcaattttctcaagacaaaggtgttttttttgaatttcacccatttcattgtgttgtgaaagatcatgtttctttgaggactttacttgttgggaagcttgaaaatggcttgtacaagtttgactctcaccagctcaatcttctcaactctcataacaagcaaccctccccttctccaccttctagttccaagactccagttgcctttactcattgtaattcaagcagtttatctgatgtacatgattcctttcccttatggcataaaagacttggacaccctcactataggactgtccaacatgtactcactgcttctaatatcaaaaccagcaataaaaacaatgatttctctaaactgtgttctgcttgttgtcttggaaaacaccacaaacttcctttccccacatccaccactgtctacactacaccattgcaacttctacactctgatttgtggggtcctgccccaattaattctgcttctggttatagatattacatcaattttgtagatgctttttctaggcacacttggatttacatgttgagaacaaaaaatggggcacttaacaccttcatcacattcaaaactcaagttgaacttcaacttgggttacccatcaaacaaattcaatctgattggggtggagagtatcaagctttcacacaattcttacaacaatctggcattgttcacaaagtgtcttgtccacacatgaacaaaatggagtggttgaacgaaagcataggcacatagttgagagtggattaactctactagctcaagctagtatgcccttaaaattttgggatgaagcctatagatcggctgtgtttcttattaaaagaatgccctcacctcagctcaatcacttatctcccatagaaattctctgttcaatatcgaacctgcttatcactctctaaaggtctttggatgtttgtgttatccaaacctaagaccctacaacagaataaagatgcaatataggtcccaaccttgcacctttattagttatagttcttccacaaaggctataagtgcctatctaaggatggtagagtgtacatctcaagagatgttctctttgatgagaacatctttccctatgctactgagtcccaacagtcttcctctcaatctatttctccctcatctgttgcagcagctattccaactcctcaaaccagtaaaagaacacctctaccattccctccccctggttttcctcccctcaactcaacccctcctattgctatttcttaagatgaccctgctgctgttgcagcaaccccaactcagcctaatgccactcataattcaataccaactcccatggttccattgccagtgcccacaactgctcctaccagttcttctactgatcatgttgagtaacctacccctagtgcacacacttctactgatgtcgataacattactgcatcaacacaataagttgctactgctgtgaacaaacatcctatgaccaccagaggaaagtcggtctccctctactctccgtcgcatacgtcgaaccaccaccacctcccgtcgatgtccctctcatcttcgtctcatacgttggaccaccaccacctcccgttcgtctccctctctctctttctctctctctctctctgagctcagtataaatacatttatttatttacatacttttttatttattatatatttattttattattgtataaatttgatgtgttttaaagttagttgttattgtaacaaaattaattagttgttttattttaatttaggtaaaattataaaactaatggaggaaaaaaatgggagaaaatacagatttttttgccattatttttttctctttttttttttacattcgcctataacagggtataggcgacggttttaaatcgtcgcctattctgcccattttacgacagtcgtataagtgacggttatagaaaccgacgagaatattttaaacgactgtttaaaaaagttgggaaaacccatttttgtagtagtgttcactaactttttgttattataattaattatcaatgcatacttagtggagtttgaatatctcaaatatttaggttttgtgatatattgtactgcggttgattgggtgtaataatatgcatgttagttgagtttgaatatcttaaatattcaaccatagtgaagtaggttatgcgaatataagtactgctgtcggatgggtggataaattttgtactgttaatgtttttttttttgtttttttcgtattgttttatttattttgtttgttattttaggcatttttaaaaaaatttaggaacgtccaattacagtcattatgctgccaaagttttagtagaattagaataaattttactaaaaaatgcataaatattaacggaaaagtgcatataacacaaataattagttcattactagctagttataagaaactaggtgatttaacacaaataattatatacacatttatataatttaatcatcacatattctatataattatttctgtctagctatataaaagctacaattattaaaactctaatagtaaaattttctttacattttgacataatctaaatattattagaaaggaatcactttttacctcattttattttgaaaagataaattctatctccacatgaattacaattctaaaggaataaattttccaattataaatgtcaatccaaacaaatgaatggattcactttaagaaaagtcattccattcctggatccattccaatcaactaaacactatcctagttaattaattacaacttatttgacttaataacatgaactaaaaattcgtttaaggaataacttgttttatttttatttttaatttagtgctatattattctttaataattaaaaattcgttttcaaagatttcttaaagacttaaggctgatggatgctgccattgttgaggtgagtttttgttttctgtttttggtgagtttcttcatgtttcggctggtggatttcggggtgagttacttttggcgtatttttcgtgattgttgcgaaaattattaattactacgcaagtgcacgcaatcaagtagtatactcacgcaagtgagg

SEQ ID NO: 14078 - DNA, 4958 bp, Cannabis sativa
  modified_base (2952)..(2968): a, c, t, g, unknown or other
gtatactttgagaaatttttgtacacttcattggtcaatagtgtggcataaatattgtctccgaaaagctcgtgaatctagagtattatgtggaattcatatacgagatctggacttatttttataaagaaaaaagaatacttggaggattttcttaggcagattgacaggcccaaaactcattaaactttagctaagtgtcacgtgtcttccatttgaaaatgaaaataacaaaacttatttagtaaaaaaaaattaaattgtacaaatctaaccttaccaaaccacgatccccaaaacactcaaaaaaaaaaccacattttcacatagccaagtccaaataaatatgcaaacatctaaagaactaaactttcactactgttaataacaaacctaaagtacaaaaacttagaaattgtacaaacctaaagttagagcactaactttcctatttggcttgaattaattgttcttggctctagatacgatcatcttgctatttggaccactagagtcaaaaattgtgactcaaaattatgaatagtggacacctcattaacggttagagattaagggagtgagaatgtgagatgattggcttcgtaggtgctgggtgcgcaaggtggtggtgtgtcgctatggccatctacaatccaggaatccactttttatattatatgtaatgagaaatttcatttattattcttaaaataaaatccaattacaaaaaatactcccctaattattttatacaattttattctaataatttcctactttacctgaaaaacccttcctattttttttaaaaaaaactaaataaacacaagcaatctctctcctttccctttctcatcagcccaaaagtgcaaccctaatctctttacctccctcctaccagaatgtcgaaagtaacccaaagtcattgccctcctcctcctccaaacccaccaccatcgtcctccattgtagcccagacttgtacctcccgtttgtcgcccctctgtctcccgaccgtcgaagacccacccgtaccacctactaattgaaagttggagcttgtgggttagtgggtaagtattttttataacatcttgttaaataattgtaaaagtatagtctaattttggtaaatctatgttgttgttgtttgtatttttttgtttttgatatatttttcgctgaaatccgaactagttttttagagtatcctgtgtatttgtatttttctcgatggttttttgatacgttctcgacacgaatgtcctaaggtcagggaagacctttctcgacagttgtcgatacattctcgacgatttcttaacgtgaatatcctaaggttaagaaagacctttatcaaaagtttttcggcaggttctcgattgtttgttgaaatggcgaatggttttgcatttgcaaccattcttgatatgttatctatgtaatttttttgttatttttttattctgatttagttgttactaacacaatcctacagaaattgcacaacattttatatgatgagttggagattgacccattggagtataatatgaaattggattttttaataatatctcatgtgagggctccatatgctatcattgcatttttttttttataatttaacgatggtatattgatatgttctcgatgttttgtcgattggttgtgcagtcctttagaaaatttagtaaatattttctatgatagtttctcgatagaaatttgatgtgttctcgatggtttaactttgattagaaggaacaattacactaatcatctctaaatatataaatctatacaaaatatttttctaatagaaggatgctattaatttaattttcttttaaatacaattacttttatgttatcgatgctttcacgatggtatatcgacatgctcttgatacctcatatatagtagaaaaatgttcacttattcatatagagaacctaccgataattactcatgcctgttgataatcagttagttttatgttatcgacggtttcacaatgatactatattgcaatgctactatatcgacatggtatcgaaaatgtttacttattgctatcgaaaatctatcgataatatctcgatagttagtcagtgataacgaaccatgaggacaaattacaaatacttaatgtagtaatcaattgataataatgaactatcacaacaaagagcaaatgcttagtcccttcgataacccattgataattagtccataatagtcgataataacctaacttgcttcatgattatttccaagaaaatataaaattatatttcaacaataactatgtgccaacaatcaccaaaaaatatgtacctagtgttctttcaactaagattctaatagaataggtctacaaatcactgttctcgaagcatctgtatgttcttatccgtgacatcatttagggaatatttcattttcagatgtttcacctactcaatcgcataaatatcacaatcaccattgcatcaagcgaccatgaagaaataaagccttcatgtgtttttaaacttttcaatgattgtagtgaatatttcacttcccctatatgtcacacaacctgtaaagtgggttgaagtgggagcaataagctctggagtcatttgtaatagataaacaatcgatctttcatgaagaactagtccaaaacccatcgataaccacgtaaaagcaaacatgacaacaaaaatgaaatactaatcctatcgagaccaaatatgataactaaaaaactaattcttaatcttatcgagaacttgtcgataatatgtcgataatcaagtaacaaaaactaacataaaaaaaaaaggtatagttgttatcctaccaaaattttggcagcataacaattataatttaacattcccaaaatttttaaacttattataaacaacaaaaaaacaatatataataataataataannnnnnnnnnnnnnnnnataataataataataataaaaccaccatccaactacagtataaataatcacataacctacttcactactaatgaatatctaagatactcaaactcttcaaatattgataatatattaaataaataattttaaaattatataataatacctagctaattcaataaagttgatttgggttcttcaatcaccaaatatcaattaaagtatacttacaaaaacaacaacaccaaaaaaaagttgtattagttggatgagcatatatattcatatcgataacctattgataacctgacaataatctattgataataaccaaaattccaatttttttgcaaaacttgacaacacgataacctgtcaagagcctatctatattttgtcgataatttatcaataatcttgcaatgataaccaacatagcaacaacaagaagaattctcacttgcatcgagaacctatcgagaacatatcgataaccaatcgatagtagctaaagataatgactaacaataatagctaaattttatcgataacttatcgacgatccgtcgataattaatcgagaacagacatcatttttatttttctcaaccaacatcaatccgaatcaaaaaacaccataaccaccatttaaattcgatcaaacactcaaaaaaatccatcaaaaataactttattttaacacaaacaatgaacagtcactctcaatcaacgagaggctttaagcagattgactcttcaatggatgagaggcgtggaggacggcgactgctcctatgggcaaatgagaaggagctagagaaaaataggggaggtggctgctgatggggggaggggctgtagagagagataagtttatttaggtttttccaattttttttaaaaaaaagtgtgaagggttttttaggtaaaattgagaattattaagatagatttgtataaaacaattaagagggtattttttgtaataggatttttttaaagaataataaatgaaattttcctaagtaaattaattaattagattaaaggaaaaaaaaaaaaaaaagatagatagatagcacattattttaataggagcacctatgtttatattttttttgttgaaaagtcaatatttttgtccatgaaatggcccaatactgacaagcatcaaagaaagctattgtattgaagttggtctaataagattagggttttgggtatgcatggtagtgggaagggaattcaaagagaaagaagccaaagaaagaaagagagtgaatgtttttgtaacattgttggtataagcaaattttttttgataaaagagaaattggaaaatttgcggtaaaagtctccaaaagtatcgctttgaactgattagtctccaacctctagaaatagcggtaatagttcccaagctcacgttttttgtaagtccgtcaatacccaatttaacagctctgttaagtgttgacaaaaataccatgtgtcaaaagtttattggtttacatcataattttaatgaaaatttatttaaaaaataaaataacataataaatattattaaaataaataaataaataaaactttaatattctttttatttctttattttttttttttggctgagattctttttatttattttgtttatatctctcgtctttttcttcttcttatgggatttacacaccatggccatggaaattagaggtcaacgaacaagctcactgcccattcgatctgcacaactagccaactatttatttttttatttttgcaatctcagtgctcatcatcatctcttctctttcattgattgatccaaaataaaaatttgtaggttgtctcgttgggctttgaaacacctagaccagagccatcgatggtgaggcttcgacgacgtgggtacatacaaaggtcaaagatcatgaggagagaagaacatcttagccttggtacaaccagatctcgttactggaggaagaacatccagcccttggca

SEQ ID NO: 14079 - DNA, 15096 bp, Cannabis sativa
tttaagtatttatgtcacaaaaagtaattattattaattaaaatagacaatttatttttatatatccgcgatgtttactagtttaagtatatagtagatatattatatcaggtattaaataattaattttaaaatattatcatctcaaaaaaaaaattataaaatattatcttgagtaatgtgaatgtgtcgttcattaaaagaaaaaaaaaacaacttagctgaactcgaatccactatttaatattgtttttttttttccctttctttctttggcgtgtaatgtaaatatgattttgataaaaaaaaaaattagaaaagtgtcctgttgtttggaaagaatttattattattattattattatttatgaaggagaatttattattattagtgtgctatataaacaatatgatttttctagggagatgccatgctaaataaaaaaaggcaagtagagtttctttattgaccaaataatcaagtttttgatttgaaactaatttaaattcgaactgggaacctctaactatttatttatgaaccaccaccccaacccaatccagtaaaaaaaaattgggtgaagatttaatttcatttatggcaatcacttaaagtgataactattcaaccattttacacaacctatatagcagaggaatcctgtgactgcattaacaattttgtcatttgggtaggcttaccttttccttttatgctaccaaactcacctaagcaacttacatttttatttataggattgatccagctccatgatttatttatttatttatttatatacatattcttggctgattcatttattagttatatcaaaaaaaaaggaggatatatatatatatatataatcatatgacaattaggctcacataaataaattatttggtgtgatggtgtctcttatatatcatcccatgaaaatgtgtggcacaacaagaatgcggtatcattccatatctaatattcagaatttgggactacttgattaactcaattgtgatgatatcattatgtcctttaatgctaatagtcctattattttgaaaaagaacgtatcattatttaaagaagataataatattacaaaaagattgatgggattccttccatttaaagagaacaaataattttctttgtgtagttaaagagcatgttagttaaaccatttcgtctgcgtaataaaatatgataaacattaaaaataaatacttaaaaaaatttgaataacaactataatcaagatagcatttttaaaatattaatactaagataaaacattttagtactggctagtgctagtattttagcaagtggtttgagcttctttttttccacgttattaatgtctattaacaattccaaccatatgaaaacaaaagcaaaaaccatcttaaaagaaaccaaattattatgtaaatatttctttaaacttgaatatccattaagtcttcacataaacctaacgatgggcctactctagaaagaaacccatatgaatgatagtagcatttcaacttacacacacctcaatccccaaaccccactaatttgtcccataatctaagctaagggcaagggcttagcaaatatcttcttattattattcataaaataattaatggaactacaaaatttcatattgttttaataacaagtataccaccagtttagcaaagaacaaaaacaagtgtaccaccagaggaagggagggggaaggttgcataaatgtataaacacattacacatggttaatcaatgaattgtaagatatttattattttactcaaaagtttaagtttagtttaagttatattgattgtgcacatgactttcttcattggtttgtagcataataaatattgacatgtggttttattggtttcatcttgtaacaataaattaggaatgaggagtttatttacactttaaatataagcacaccttaatattaaaagaaaatgaaaagaaacttcaaatagtttttaaaaaacaactcttaatattttttttttaaattattcttttcatattattttggataattttaatatttattttaatttttttttatattttttaatcatgaataatggtttttttaattttttccaataaaagtttatacatttttttattataatttattttcataattttttttttgaattatgtatatttttttttattttttctaatcaaattttatgcaattttaattttaattttttttttgcgataatgtttaaaatatatattatttttgttttataattatatatatattttttaagaatatacaaatgaaaaaaataaaaatttattataaacaaaaaatatatttttttataatagggtgcaaataaaactccccaatcttttcacaagaattttttttattatctttttaaagaaaaatggaaaaatcttaatacttttttgtttggaactaatactttaggaagatttttttttttaaaaaaaaaaactatgataaagtgtcattttaatttctacagtaacagaaatatgttttcgatatagaaattataatctaaattttgtataagatgatttatattacaaatattatacatctctaactattttcataaaattttgaattgtgtacaatgttaaaaatagagtccaaagtaaaagttttgttgcaaattggatagttactgctgtattatcttactttaattaataaaagattgctcataaaaattctacaagcacaatgaattttagtccttttattcagatggagcattggtcagttcctattattgatgtgatttttgtcaatgtagatatttttgtcacttcttaagctttttattttgaaattagacggcttgcccgtgatcatcatggagctgtcctttatcattggtccaacacaattgcctgaccatgtctctcctcttttggtagaggcaattgggttgaaggaagctttgagctgatcaaagaatggagcctaggtcaagttgttgttgagtcgaattgtaaaatcatcattgatgctatgtatagttcgtctcttttattgtctctttttaatttagttatttttgattgtcgtactttaatgtctgattttaataatattttttgtgtttttgttaaacaatttacgagcaaggcagccaatcatttggcgattgtcgcttgtttctccccaagttctagctaggatatggggtttcttcctattacttttcaagctattttaataaatgatttgtccggtcataaataaaatgcattttttttttatcaaaaatatagaatttaaaataattaattgtacaaatataaaaaaaattataaataattcgttatttaacacatataaataaaataaaaaacattttcgaaattttttctaaaagtttacctataatttatttacacgattatagaaaaaaaaattgtactacaaaactcttgtattcattaaaaagtagggggtctaccgagcgtacattttagagtatcaaaaaaaaaaaaaaaatactgatgaacatgaaatccaaaaacattttaaacaaaatattatgtgcattaaataaaagtaaactaccatgatttatgacggtaataataataacacaacagatcagaacagtaccgactcactcacacactattccgtattgagtaatttttttgaatagatttttggtcattctattctagaaagtagaaacttggcaacaaaaatgtacgaaacaaaataattaaaataagatattaacactgcaaattagtcgcacctcatgatctcctaatgatcttctttgtctgtgaaaagcaaccaaatcacacacccttttctcttctctctctttttagccatcaagtttcagagagggtacgtttccacaaagtcaatgcacccactaaacagctttccttccatggatctaacttaactctctgctagctcattttgagttggttaaacaacttttttctctctgatttttttcttcttttctttctttcttttcaattgttctgtttttgagtttgtttggtggggttttggaggagaagactcaagttttaacacaattcttaaaaacaagtataaaactcaggtaaactgtgtttggagtttatatagaagtttagaccatttttttaagctaacaaattatgaatgtgctcaacatttttgatttaattactttcacattttttccttcacatttttcttgaaaaaaattccacaccctctgaattatctgtaaacagagtatctcttttagtatttttaagtgttgactattagttatttttaagtattagaaaagagaatcttcttttcgttttctgatgacattatcacttgattgtttatttatctcggcggcaactgattttatttttgtttatgtttgtgtcttttagtgaaaaaaagaatcaaagaagtattatatatgtctctcagtggaaaatcttggaaaagattgactagtgtatccaaacccgtgtaagtattttttgtttttttattttatgaaattaaattagtattgggattgataaaattttaattgtttaagagtagtattctgaggtctcagcttctgatttagtcaatgtatgtaattttctatgacagagaatatgcctcaagacggtctaagatcatccatatacaggtcttttgtcacatgtaatgatcctaaaggagtaattagttgtagaacaatcataaaatccaaatcatattctcagaaaatgaatcatcacaagagagaacgccaaagaaagttgaagagcttaagtacaccatctttgaactacgaaccagagttagaggagataataatggcatcatctactaaagagatcccagaagaaattcatagcccagctgcttttcaactcatggaggtctctaaaggagccaaaaaacttaaccacatgattgattcttggactaagggtgtcaagtttgatgggcaatctaaagatatggcaaaggatttgttaaaaggtgctcttgatcttcaagattctttggttatgttaggaaagttacaagaagcttcacagtacatggctcacctaaagaagaaacagattgagaaaaatgaaagaggaaaagaagatgatgaaccttggattagaagaacaagctcagatcagtttagagaccatttttcagtgacaggttatcaaaagcctcgtctttctgttgatgggtatcctagcaattcaacagaggagcttaagaaggttataaaagaaagccttgtgagccaaaatctgttaccaaaagctagaaagcatcatcatcaaaagactcactattttcctcatttggactcagcttcaacttctgagtctccatctgcaactagctcaactagccaatcttcaatggctcgtgtcactactaactccccaactgcttctacatcagtatcacctcaggcaacaaaaggtcttaatttgatagccaggctgatgggtttggaagaatgccctttgaaacctttgcaaattacaccacagaagaagacaccaaaccaacttgaacccgtcttagatattgacaagccaaaggtaaaaacgtctcaatgcagagctcagaagactactgatccagagagaaagactttggatgaaatacttgaaaacatgcaatataaaggacttttgcgtagtagcaaagctgcaaaagaggttcagctgccttgtttggatgatctcaatgtgtctcgttccagacagagactactaagtgataatggtccaccaccacctattgtacttatgaaacctctgagagttccattccaggtaccaaaggagacaaacagaccagtgtttgaagaagatgaccctttgtacagaagaaagatgctgagaaaattgagaagaaaacaagagctttatcccaaaggaataaactacaaagatgggaatttgaagtctggtatggttgtaagcaggagaccaaatggagaagagactagaattcgagggattaaggaggaagcagctaaagataaaagagtagtagttgaaactccagtggatcacaaagaagttggtgtaaacgaaacaagtgttgtagtaaagttgaaagcctatcaatctgtaaaccagaagcaacaaaaaagtgaggacattgacaatagagctaatgaaaacatactaaaggtgaccactgctaacaagaaatctttggataaagatgtggtgaaaactagaagtgttccaaagtctcaagttcaagccaagaaaaccttaaataaggcggtaaagccggagtctgaatcaaacatggcaaggaggaaggaaatatctagacaaccgagtaccaagccaggttccgttaaaaatgcagaacaaggtgcagcttgtaattccatttaccaaagaaagaaccgcctgaagaaaggcaagcctgtgaacaagcctacagcatctaaaacagttgtgagtctacctcaaatctaagtcttttgtttaaattccaatataaagcttatgttgaggtgaaaatattgtgtcaaagaaagaaaataagtttgttcaaaacttgatgagctcttctgtttatccaggctgaaacttgtgtacgtgaagtagatgaaaagatggacgataccagggaaattgattgtcatgtagtaagggtcagcagtagtgttcttgagcaacaactccctaaacttgaggatcaaccccttgaagaagagagcatagatagttctggttctcatattagaggtaagaaaaccccttattacatgtgcatataagtatatactgtcatgttaaatgactgacaaccatattcttacaccttgtagagcttggcaaagaagggaagatttctcctttagaaatcatattaccaacaccaagcgccaacgatgaaatggacaccaaaaaggaagagaaagaagaagatgaagaagctctcaaaaccatagatgtttgtgaaatcacatatgacaaaacttccataagtgaaaccagtttgagagatgtgctattgagtagtctatcttttcaaagttgtgcagaggagcttttcgatgtgaacatgaacaacagtagcagtactaacatcattcaatgtcaaacatcttgcattgatgattttgaggctcaaacactgagactgcctttggaatgtgcaaaagaaatcatggaacgtaaaagctttcaaggctcacaaacaatctatcctttgttaccatgcatagctaaatcaagaataagcatctccatggagatgttggttgaggatgtcatgaaagggattgagagtcttgccatttacagaaagcttggtggtgaagatcttgtggattgtttgtatgcaatgttagagagagacttaatgtgcaatggagttgtgaatggaatctgggattctggttggaagactggattttctttggatgaagctgaacaagttgtgaatgatatcgagaaacttgtcttgactgggttgattgaagaggtatttgtttgatttcagcacagcattgtaacaaaataattttctttgctatttttggccaagttgtaaacaaagtctttttttttaatttttattttagtgtaatgttagtttgtatgtatatatcatattaagaaatgctaagtttcttacatgggaaaactaagaagaggtagacatctttttaactaatgtctttgttctgatcactgagaacctcagtcctcacaatggctttttattgtattatgattatttttatttatatcaaatattcaataattaggaaagaaatgagtaaagagatattattaaacataaagttcgaataatcatcacaagtgcaagaacgtagtgtagcaatgtggtaaaaaaatgaataatagagaatctatttaaatgttttttttttttaccatttttctatatattagaggtgtatctttttttgcataatccattgtagtgttgtatagaataacacaaggatgatttgtctccttttattgtattgatttatgttgcgtagagtaagtagatgacgaaagtaggtttgatttgaaatgtattttgacatattgaaaaacattgtcctacatgaattaaatgtaaaactattaagccatataagaatatgactactccactcatcaccaattgattttgagatggaaccccatgattctcatcataacatatcacttaattcttctttaaaacatattattatttcaaatttttgtcttattcttttctatttcattaaacggcaaatcacatgacaatttcccatatgagatagccgtacatgtggatatatagtcttcagggtatttgtgtgtctttaattttgttgaaattttatgtattgaataagttaaagtttataggacaactcattgcttaatttatgagaaatgatcatatagtaatctattttttatattgtgcagagtccaatagcactttccgttaatgaaattgaaatggaacagaacatcataaaagtccttcaattcaacattcttaatacagtttaagaaatatttttaacaaattaaaaaattagaggtataatttagttcaagtcaaatttcctaaaataaatcctaattagctatttatttttgaataatttgcaaccttaattttataaagttagtttcctcaaaaagaaaattagaaagttagataattaataatttttttatgggagatcattgtatgtttgtgtgtgactcttctaaatacaaattttattgtttaaaattatatatttgaaccaataaggaaaaaaaaaaaaaaaagacacatacgcactttttttaactataacaaaatgtaaaataaagatttagatattggctgtctttatttgttattatttatatttttacattttacataccactttattatagtttcaaaaatatatatattttctcaaaaaaaaaatatatatctcagtttattattattctataaaaggaaatgatcaaatgtaatttaataatttaaaatccacagcacatccaattaatgaaaaagtgtttctttacattgatatggctgttttcacgtgtaatctcttttgcatctcaccttctccaaacggagacccagcaataagtcattggaacaaattaataaagagacaagtggcgaaggggaatccatggcaggctattcggtcatatacccacatgcaaaaacttggtctttttcctgataattttacgttccccattcttctcaaggcagcggccactgtctcccatgctccttttgtgtttggactccatgcccaggccattaaagctggctactcccatcacgctttcgtccaaacggctctcctcaacgcctactttactgttggacttgttgaagatgcacgtaatgtgtttgataaattgtctcagagagatttagtagcttggaactccatgattgatgggtatgcctctaatggccagatgggtattgcattggatctgtttgattcaatgcctgttaaagatgtttcttcctataatataatcctagctgggtttgcaggcttgaaacaagttgagtctgctagacaagtgttcgataaaatgcctgttagagatgttgtttcgtggaactcggtgatatctgcgtttgttattgctggacatatggctgaagcgaatgcgttgtttgaggagtccccgctgagaaatgttatcacatggaatacaatgattactggttatgtacaaaatcaactctattctgaagctattgatttgttcgacgaaatgagaagtggtaataattctgaaccggatcacttatcagtgacggctgctttatccgcttgtgcccatttgagattccttgataaaggcactcaaatagacttctatgcgagaaaacatgggcagttctttactcctcatgttgtgactgcactgatagatatgtatgccaagtgtggtagcatacagaactccttagaagtgttctataaatttgaacataaggatgtttattgttggaatgccatgatctctggacttgctctccatggttatggtgaagcggctttgaaattgttcgacgaaatgagagagaattctatgaagccggatgatattacttttattggcttgttaagtgcatgtagccatgcaggtttggtagaagagggatgtgagttgtttgagtgtatggaaagggatttcaaaatcactccaaagatagagcattatggatgcattgttgatcttttaagcagggctaaatttcttgacagagcctttcggattattgaaacgatgccgtttaaaccgggagattccatattgggtgctttgcttagttcttgtgtgattcatcaggaccttcacactggggagaaagtgataaatttaatctttgacaaggctaataatgatggtcgtaataatcagttgagtgatggggaatacatgatgatctctaacttatatgcatcttgtggtaaatgggaagaagctaataaatggagaagtatgatgaatagttcaggcgttgttaagactgctggaagtagcataattgaagttgatggaaaatttcaccattttttagctggggaggttgattttcacccatactaaaaaaaaaatacccatttgggaatcgggataattacatattttatgtgtacctactgaggaacaataataatgcaaaggattcatttaatttatttgtaacatgtttaaaagtatgcttactttaaagctggaaagcatcataatcatcatcataaaaggctcactatacccctccgatgaatatctgagtctctagctaatcttcattgaatatatttatgaaacttagtaagacattatgggaagtgaacattggtatgaaacgtatttttctttcctattttacctcctatacaaaccagctcatctatgaattctcggtactgttattttctgacttcaatgaaaaagagttcctcttctttttttggttcctttgtatggtgaataatcactattttgtttgttttttgtgagtaagggttcctgggcatttgccataataaaagtatttccaccaaagtcgaacagaaagtcaccttacaagtatagaataatcacactactactagtacaggtactacacaaccagttctttatcgtccctaataaacgtactgagaagttcacatgtacaaatactacaaaatgacttttgcctaaaagaatcagatccagcaaaaataaataaatattaaacaatagaattttgaaatggaattgcctattacaatccagtatcatcaacaaaactatatttccaagaaaatatttctacactaacatgacaaacgatgttacaggtgtcatcagaatacattacaacaaccaaaaatttgacaatctgatcaaatcaaattagcacaaacaacaaattggttgccaggcctttctgaggactcaatgaaagaaacccaagagatatataagcaaacatatctgctacagctaacgtcttcactcagcttctgttaggtctactacttctatcagctggtgaaatctgttgatcaacagttgacagcatctggggcatcgacatgcctccggaaacgacaatttctgcatttgagaaaaacacaagggagaatctctgtgaacgttgttttaattaatggtaaaccaagattttgttcacttttgaggtcatacttaactcctgtgctttatgcagcagcagaagtaacaatcaaaaataactggaaactgatagtatattaaggaagatgttttgtacacactattaagaataaggcatctaatgagggtatgggcattagagagtcctaaaactgagatccggaaaggtatgtatcgtagtaagaatagataatgtgcaattctaattttatcagttataaagagataatcattatttatcctcaaacagtctagatataataaaaatattaaaatcaaagtactgaccaattccttctctaactgataaatttggccttataacatcgttggcgttcacgaggaatatatcaccaatgtataaatggttggtcggcacataaacacagcatagctcctcctctccggaataattctgcatcagggaaaaaaactcaagtgattactaattggtaatattcaaataaatgaatccatgtaatctattaaaacttgttaggcaccaatattcattctcacaaatcacaacctcaatttctaacacatcattaagaaataaaatggcatgcccaactctttacactagacagaaagtaggacgtaaagtagtctttattttcagaagaaaaagaagtacactctaggtggcaaaagttaaacctggctaatcaaacatattcaaggaattaatgcaattactttacagagctgaagcaagtttcacatatgaaacactgacctcaaaagaacacttaaatgaaaagcaaattaagcctaagaattggtgatttggtagtatgtagtgcaagcttacaatcaagtacattggtaagaagtctgtatgcatatgatcttgtttgcttaaaaattgaaatcaaggaattattaagacaatgtaaaaaatcataagcaaaaaaaatgtaatcaccaccataagggaatatattcaactaaaggtagtctagatatgattatagttccagaaaacacaaaaatgataaacaaacctgcagaacaacagatgaagtgatgaatccaaatgcatattcaccgatacgtggatgtctaatgatagcaacctccttgaaagcttgtgtattttgatctgaaattgtgaagccatttattatgtagactgcattccagccagcgtacctcactttgttagtttaattaaaataacaagttatagtaatatgtagcagacctggggatatggcagaactaatctgcttggaagcattgtagatatgacgaacaaaaggcatccgtttgataaaccactccccaagatttaggaccgaagcacccaaccatgatgacatgaacaccccaaccaagaagatgaatgttatggaagttacaaatccaagacctgatgccaatgtcaaagtgacataattaattaaatactcagtaaagccagaagaattgccaagtgaaactatcacgatgatgacaatattagattctacaagacatgaagagatacgttctagctcagggaattcggttgtaggtgtataaagtaagatggagaggtaaatcattaaacgtagagagagaataaaataagaggctataagatatcaggagaatattcggtttcaatactacagaaaacatttttaggccactctaataaaacgtggcatattaataaaataatcttaagcatacaaaattgttcatttactattcctgacccatgagagaactcattaacaacattacaagtcaacagaagtaaatttgaccaaaacaaatgtatttgagtaatgtttttcataataaacaaatataaagaacggagaacagaacatactgccagatagtggacatgcttaccaaaaatatcaattccaagttgagcataaattggtgagaaaaaaccgtccacaaagtgaataaaccaccatgtaatatagaaagttatagctattggaaataagatcacactgcaaacaaagcaaagagttaaaatataatacaacagcaaagacaagaaaatccataactaaacaaatgggtgttctttattaaaataacaatttctgcagctacatactgagtcaaatcatatttgtataaaaagaatgacataattgtacagctaactttaatagcagccacctccattaccaatcataaaacataaatacagtacaaactttttttttttttaatacagtgagactttgagagagccactctgaatattagcataactattgcatttaataaaacagaattccaataataactttaactccactctgtctaaaaccaacaacctatgtatataatacaattaaatatgcatagatgaagggcacgccccaagcctaaagattaaagagcttaattttcaaaatcatgagaactttgtttgtatgatttttggctagaaaaatatatagggtacagtacaaaactttagtggcagtagcagttgtttgtaaggttggctgtagtagcagtgtagtggtaatggtggttgcagaacattagtcttcgaattttacatgcagataaattatccacgtccaatgtctaaaccctattaagtaaaagactcgaatataattaaaagatgaagaagaaaagcgcaccatcctgtcatgaacttttttgacgcccagcttctaacgactttgctaaaagtctacaagtgacataacaaagttgagcaagagttagatatacaagacagatacacaaatgcatgtataatcagaaaaaatcaggttacaaagagatttaagaaaacaggacatgcataaatgatgtgtcatggacttatttaaacatgtatgcatcatatttctcaaaatcgatcacttgaatcgaccaaaatgcaataaaagaaaaatagaatcagtgatcgttcaccgggcataattttgtttaacccttattattacacttaactttctaaacaacgctaaaatccagttgaattaagttttaaagcaacacacaccaattaaaatgataaataacaataaaccctttatttccttatataaatctttctactagagtctagtgtgaaatccgaatgacccttctaattccagcacgctttaaatttcaatcctcatcaaaagtaaatacaactacaaaacaagctgcaaaccaagcgaatctaagttttgcatatcaattcactacaaaaatgagaatgaaatgtactaggtcaagtcaaacacagctaaaaactatgactcggacacagacaatcaaagaagctttcccattaccaaatccacgatcaaaaaaaaaaaaactacagaactctaatcttccctgcaattctacaaaattcggcaatccaaacagaactaaaaaaataaatcaaatcaaat

SEQ ID NO: 14080 - DNA, 6596 bp, Cannabis sativa
  modified_base (6543)..(6546): a, c, t, g, unknown or other
ccccctgccacaacaacagtcacaacaacagccttccttgagtcttcagcagcaacactccccaagaatccaggggccctcaggccaaaagtctcttagcttaacaggatctcaaccagatgctactgcatcaggaacaactacacctgggggaagttcaagccaaggaacagaggcaactaatcagcttcttgggaaaaggaagatacaagatttagtttcacaggtatttgctgcatttcaccctgttatcatttttcatgttgaaatttgatttagtctgaagctcttattttgttattgtgatacaattagttactctcatcatcctttggaaattcaggtggattctcaggcaactatagaccccgaagttgaagatattcttttggagataggcgatgactttattgacaatgtaagacatgttatcatagttttcttccttagatatttgtatgtatatgtttggatgaaaaactactagtttagcacatttaatttaaagtaattacaagaaagctttatgtgtccatttatctaatgttttgtcaaagatatctctagactccactggcctatttttagagagcatgtgcggaattttatgtcgtatcctcttgtcccttcacatacttaagttgtataagtttcacatcatgtgtcattgaggttatggtgtgagttcagtccagagtgtttcaacatatgttataacatttttacgagtcagagttggccactgcagagtagacctagtgggccgctgtggatgtcggctctaaaggcgggtgtattgttaggataccacattgattaagtatgggattagttggtgttatataactacttgggcaccttactctcttatgttagcttttgggagtgagttgagtggctgtatcacattccaaatgtattttactgttccttggcaacccatcagcgggggtgttatgattgcactctgcaaatattcaacataccatattcataagtacgtgtgaggaagagctttgtttgtctgattggtaattaatttttccaaaattatgaaatataaatgcagaccattggatagctgatccataaaaggtatactttgctttgcagtgattgatagccaaatgcacgattttttttgttgattgaagcatttatatatatacacacacgttacattgcacaatttgagattcgatcccaggaccttcacatacacccttctaaccccgctatggccacttgagctaacctcaagtggttggccaaatgcactatttataactatgagattttcactaagaagctatgcacatatgtgtgatcactactgtgctggcaattatgatttcacgtggttggaatttatcattcaacagtttctgctatttatttatgtaattattaatattgcctgtatagtaagatacattttatatcaaactgtcctctattgttgcaggtgacaacatttatatgcaatttggcaaagcaccgtaaatcttcaacagtagagtccaaggatttattgctacacctaggtctgaactttttcttgttggaatagttatctatgcttgtttaaaaatgcatattgggtacaacagcttgaatgcttgttcctccatgaacttcgcatttatgtctgtttctacattatgcagtttttcttgtcagcccatagagttattattttaaacgatccacattttaatatttggggtagagcataagcagtgctttctagtacttaaaactgctgcagtcatttactacgattatttggatgcattttactattaacacgtgaaccacgtttagaattagagatggggatagggtttagtagtgatgtaaccttgtaggttttgttttggtgaagatgttatgagttaagattatgtgttgcattatatgaggaaactagaaataataataataaaaagaaaagtgaaactatgaaggaattttgggattagttgtggtttttgaggttaacctcttttttattttatttttaattttcatttttttggtacaattagagacttacttatctaatgtgtgtgcagaaaaaaattggaaattgacagttccaggatttgaagaacagaagttccaaaacagaccagtaagtactgtaactatggtgtataatttttacattgggctatctgtgctaaaaactcttctttaacaaataatttaatggcaagcttgagaaaaataattatataatgatgtagagaaaatagtgtatactttgtacctagttgttttttttattcttgactattctcagttatgaagaactactcagaatacttatgtgggtttcttgattgtgaacttgcagtcagtaaatgatcttcacaaaaaacgtatggacatggtaagtgtcatttttgctcaataaatatttctatggaatttgaagtttgttgacacaatttactaattcttttgtcagatacgaacatatatggaatcctcacgggctgaaacaaacacaattaatcgtaaagatattattagacaagggcttggtaacccagttggcactaaccaccttcaacgaccttcccttagctcagagcagttgattacacaaccaactggttcccaaatgttgcagcaaatgacacgatactaatcaatatacctcgttatatcatacttttttttgtttggtcttcttgctgatgattgaacacaaggcctgtacctcatcggtaagtacatttttctgagatagtcaaataactttgaacaaatgcatgccgtctttaaataagaacaaggttgcagtaatgctgtaccgtaagtaaaatctctttcactttgtacaagtctctagtagtagtcgtcggctgttatgtggtcttggttctcttacttttaaggctctcgaatcgaatttacttgtcattgtttagcatgcttcattttttaacaactggagatttggttgacaaaaaaagggtgttgttctaacctctttacctgggtgccaatttgtaactagtttcactgagcaatgaaaaaatgtattgtttacttctttttcctatgaaggtggttagatacacaattgtggctatagaattgattgtttgagtaatctaaatgtttttacaattacgtgtatggcaggttgtttttggccaaaagcaaagatattgtttggaaatgatgaaagcacaacacaagctgtaattagttttctttagtgtttaaagacctgagaaaaccatatttgataataagtcaaaatccacctctaaatcactgttcctgtgtattccttttatcatttgattcgccccaagtgccatttgaatgggcatatgaggccaaccacattagagcttttcttggttggtttctgtaatctaatttatttatttatagacaaagggtgttttttttttctttttatttgtcttctttctacttggaatcttttttctagtctataaatatatataaatatcttaacctgaaaatggaacataaatgtctttgtatacttatattaatttctttgactttcttattaatgaaaggttagccaggttctttggtctctttcagtctcaaactactggaacgtaatataattattgatttttttgggaggctaaaaaacaaaattcctaaaatgggattttggttctctattagccacctttatctgggattctgggttctgtcaatttgggaaacaactgtcaccaatcaaatgcatctttattttcatttatttatgttaaatctaaaaataacttaaaacttatatcatcaatacttaattatgcaaacttatacaatgatggaatgcaattttgcaaacaaataaatttaaaatacagcacttaatcaaagagcggcaatggcagcgggtgattttagaaacggattggttgaccgttgtgcaggctctacaaagttccgtgcatatgatttcgctatttggttaaattattaatgattgtaaaagttaactttctgttttgcgaaatgtttctattgtttttgttaaacaatcagctaatatggtagctcataattttgctagagcttctatattatattttggtcgtcagttcagtttggaggatgtttcaactgacttgctaccttgtttcgtagtagaatttgttggttaattttaatgcaagaattttccattaaaaaaaaaaaaaacacatccttcttgcaaccctcttttttgcaaccctaagtgttgcggaggtctctcccttcttgttaagataacacaattcgaaattcacacaaaattcatgaatttcagtttacataaaatgaatttagatcattttcaagtcaacttgtggacttcatagattaatattaatggattatcatgtttgatcccactcgaacaagattaatttataagttagttaagctggtggtatcttatcgactagtttataaaccggtcgtggttagattttattttttgacgtgattattaaacgtattgtgttcgagtcgagcatattcttataatacacgagacaagaatatgaccggttaacaaggtgttggccatgcgactagacttgtcttggtttagagggatttcctactgcttacatgggtaagtaatttcatgattgataggaaggagagttgtgggacaactttttattcaaatccaacgtacgcctttggaaaatatttattggctgtggttttttgcctttgggtttgggtattgtggctggctgggttgccttagtgtttttaattagttttgtgtccttaattttatgttttacatttgtgaattggtgggaagtttgtgttggtgtttcactcactttgtcatgtttgatccttgtcactattttctgagagagagtttcagtaatccaatactgtaacaaaattaatatatatcgataagcttttcattatgagctgtatctttttgtatatattgaccgactaatttgtacatatttaaatagttgggatttttttcaggatgttcatcatctgattcaatatgtattaatttgcttatagtacattagattaattaagtgtgaattttatattttagattcaatctaatttgtacaataattcaaatctaattaactcgaaaaaatacggattgaattggtcacattttaatattgaataatttaatatttattaaaaaaaatatttttttcacatgattaacaaaaagtaaaataaattattgttattttatatctctaataacaaaataaaaaaaaataataaatacaaaaaaagaaaaaaaggaatatttaattttgtattaattatttataagaatgaaatatatatttcatctgttgagttttgaaatatattttatgtgatatgtattaaatttttaaattactattttcttacattaaaatattaattgtatacataattttttttaaaaaaatatatataaatatacgtgaattaaactaaaattgaatcaattacttttatatggcaattaatatctaatttggatttttcaatttaatttaatttgcaaattgaattagattagactgaatattttatgaacaattctaaatagaataatttattttttaaataataataattatataaaaaaactccacatcacactggtagagttttattttttgtaaatatggataaaatagtagaatttcaccgctttattaattcgtaatttgtgcaatataggttacaatattttgagttttaatagaatttacattttcttttagccaatttctctgttctgttatttaaaaaattaaataaaattgtggagtactatagtttattaattaggagttgtagactttgaattggaacagtcatcacttcaggcagacaggttagttggtttccacagcattttgcatgtccatttctggcccaacttatatgtggtcctatggtttacattaggacaaacaaaacatataggacaattttttttaatgaattgtttacatttctaaattaattttcgtactactggcttttttttttaattattttaaatttgtaatttagcattatttagtccttctttttatttttttagattttttgtttaattgatctatcattttctcatttctttttatttttctttctcagatggctctttctttagactatactatgatttggtggtcaagtttaataaattgtgtttgaatcgttgtggtattatgcctttgatgagaatttctccatttaaaaattatataaaaaagatataatataaaatttaacaatatgtatttagtagaaagtataattactaaactaataattacacaatataataattaattttttttattatttttttaaagtgatctgtatcacaaacaaaacgtcgatgaaaaaggatatccaattaaataaattaattgtctaaccaaaagatatacaaggtcaaaatgtgaattattgcttgtgacttatataaaactaaggtgacgttttgtaacacttttttaatcagttttnnnnttttaaaattgaaaaagtgaaaatattttttaaaaacacgttctataaaa

SEQ ID NO: 14081 - DNA, 15104 bp, Cannabis sativa
atggggcagcacgccacactgggcggtggtagtaaaaaaaaaaattatacttgatttaatttaatttttatatatttttatttttaatattttttattttaaataatttttaatcaattttaaataaaaatataaattaaataatttggaccaatcaaatcgtgacacctggacagtgacatggcacttaacagcaggtacctacagaacttctaaaagtgtgacagaaggtatttttactgccaaaattttaacttaggtattaaactgcaactagaagataaacttgagtatttatgccgcaaattactctattaataatgatataataattatcatatatttttagcatttttcataatttcagagcaccatatatgaattatattgaaattaaaaattatagagtaatttgaggtatagatatttaagtttaactcccggttgtaaataaatatttaaatttaatttttagcggtaataatacttaagttataattttagaattttgtactcataagtaaattgctacgtgataatctctcattagtttacaccattaaatttttatttttttttaaaaaaataaatttaaatataccaataatacctataaagttacaaaaatataacttaaaaatttaaacttaaatatttatttacattaaaaattaaacttaaatattcatgtattaaattactcaaaattattactattttgtattttacatgtcttttttgagaaaaatttgagtaaattgaagtcaagggacgttttcgtaattgaagacttattgaaaaaaggggagttctattttcactccataatcttataaatacatctcattattaaaaaaaatataaatttaaataatttaattttatttgataggtatattttttaagaatatgaattggaagaaaattctgttaaaaaaaaaaattggaagaaaaaaatttatattattaaagatattaattttaaataaaataaaaattattaaaaagatgtctttaaaaattcttgggccgtaaataaaatttagcctgaaaaagttggctcgattcaaaattttgaaatccagtccccaacggtctactactacttttattttaacctcaatcacatctcgaccgtccatttgaacactttggatctcagtcctcagatcagcatcatcatcatctccatcatcatcaccaccatctttcatctttctttcccaaaattcaaattcttttctttctttccccccaaaccagtcacagagaaaaactctctttcttagccctaatttcactcgatccgacctccatttctcaactcaaaccttttttctcacataaacgatgcccttcatatcagacgctgcgagtgccatcaagagccggttcggattccatgaccacgcgccggagacacttccttcggtccggagcactcctgatatcttcaaatctgcatccaaagaaaatttctctcaaacttcggccgtacggagcatacgtgactgggatgacgatgacacttgtagtgtcggtggtggcgctatgccggcgtcttcatcgacccagtacttcgagatttccgaggatccatcgttctggaaggatcacaatgtgcaggtagttaaataacttgtggttatggttttaagtgctctaatggataaatgtgtatctaaatgttccgttttgagatttttggatgttttttatggtttcatttctgcattggctacgctttgatgataattattttactaattgtgaatgtttataatgaacagtttttatttcaactagacatgttgggatttttggatttttttaatggtttcatttctgcattggttaagctttgaagataattgactttagtaattgtgaatgtttataaagaacaattttttttatttcaactatgcatgttgggtcaagcttgttttcgggttttgtttggtcatgagcgctgtatatgtatttttttttttttgtgcaggttataattaggattcggcctcttagtagtgctgaattatcattgcaaggttatggaaagtgtgttcgtcaagagagcgctcagacaattacttggacggggcatcctgagtcgcgttttacttttgatgttgttgcagatgagagtgttacccaggtattgttttaagttggcatattgttttaaatgggtttgtatttttttgttttatttggctctgtgattttcatttggggttgcataacaggaaaaactatttaaagtagctgggttgcccatggttgaaaattgcatgggaggctacaacagctgtatgtttgcttatggccaagtgagtgatatactattttttatgtcttctacttagattattaaagaacataatacgatactattgtagtagaatcattgatttgataccttattttgtaactttagactggaagtggaaagactcacacaatgcttggagacattgagggaggcactcgaagacacagtgttaactgtgggatgacacctagagtctttgaatatttgttttcaagaattcaaaaggtttgtggcttttaactttacaaacccatactaaaatttgattatttggtgactttggagaaacttgttacacaatctttcttatgcataggaataaacttcagcatcttttttgtgttcagttgtggtgatttctacaaagaaactaactattcttccttttgaatctatgaatggaaacttatgccactataattttccaacaggttttaaaaggtgttgatcatttttatagaagctcactatgttgaaaaacaaattatgtgtcttccttaaattttcttttatatatacatcaagcccgaaacttgtgcgaaagtttgatggaatcttttttggtgaacaggaaaaagaagcccgcagagatgaaaaaataaagttcaattgtaaatgctcatttctggagatatacaatgaacaaattcttgatcttttggacccatcatctagcaatttgcaggtacatttgtgacacacgtatttctcttggctctgttattttctgctaaaatcatttcttgttaatttactttatagttttgtacaaatattgtggatgtgtaacagatacgagaggacgtgaagaaagggattcatgttgaaaatctcaaggagatagaagttacaagtgctcgagatgttatccagcagcttattcaagtataagataaattatgtccttagattcaagttttcatcttttcagctttctaagtgtttataattgattttctttttggctttattttagtattgactattgtgtatattggccacaatcttacattaattttgctttctagggtgcagcaaatagaaaggtagcggccactaatatgaatcgtgccagtagtcgttcacatagtgtgtttacgtgcataattgaaagtaaggtgagttagacagtggtttggttgcttctgctcaatattttagttgctttgtttttgttttgttgatttatcatccttatctttttggtcaagtttgctaaaaatgtccttttcttttttagtgggagtctcaaggtgtaactcatcatcgatttgcccgccttaatcttgtcgatttagcaggatctgaaaggtatagtgatgtatagtgttattttttcaatttatttgaaggcaagcggacaaatcttcttgtactcatctggttggaagattttgagagatgataatactcacattagtgttttatttccttattacactttcctcctaaatacagctccccaaaaataaattgatttttttttcttctgatttgttgacctgttgatgacagacagaagagttctggtgctgaaggtgaacgtcttagggaagctactaatatcaacaaatccctgtcaacattggggtatgacttctcattttattttttaaaattttatgattcggcaatgaaagctttcaactgatttttaaatctctatttgcagacttgttattatgaacttggtaaacatgtcacatgggaaatcactccatgttccgtatcgggactcaaagcttacatttctgcttcaggttggtggtgatgacattattagcacatttttagaaaaatagaataaataaaaatcaagtctgccaagtcggtttcagggatttctaatataaagtgaaagattaagagcttttaaagagcttctgatcaatctgatttcctctgcaggattcactgggagggaatgcaaaaactactataattgcaaatattagtccatctagttggtgagtggattaactatcatgtttagtttttatgtattaatacttatttcttttgtattaagcaatttttaatcatctttgtctgtaatttggattaattgctttctgaatacgtgtattcactgaatgaatgcatgagacattggttcttaaccatactggtttatgtacttttgaatatttgtattcccttaatgcacttgacattaatgcttttagctaattgtattcagagtatgaatgagacattggttcttgacctttgggtcatttacttgattaaaactagaatttgcctttcgatcacatttctagtttatttaacattttgttttgggatcctttcagctgctcactggagactctaagcactttgaagtttgctcagcgtgcaaaatttataaaaaacaatgtatgtattatagtttgcaaagacggattatctaagtttgaactttcagtacggctgaattgttttaggacatattttgtcattgactattactgagaataatcaatattgctagttatgtgaaatagcctagcttatcagctactcttgattccttatgcaggcaattataaatgaagatgcttctggggatgtgattgccatgaggatacaaattcaacaactgaaggtttttattttattttatataattttaatatgattttttttcctttattttaaaattctcattgtctcttatatttcatatacatgcaaacatattctttgaaacatcttttaccaaagtatgggcattgaaaattactaggttaataattgctactgtataccacgtaatgttgaaagatgaattattaggttaaccattgcgactctaaactgcataatgttaaaaaagatgaattcagcatttgtattttgtactaatcatcaaaacatatttgagttaatttttgttttattttcagctcacactgaacatgaaatcttaccacatttgacacttcatatatatgcgcacctttatcttttttaaaaagccattttagtttaaagataagacaaaaaggggattgcactactattactaaccttgtgatgcaatgtaaaaagacaacagaaaagtgatcaatttgtcaggaatcatgctttattatagagtttaccaactggctgttttgcatttctattaactatacttatataccctgcatttttttatattttaaagtctttgtatgtcacatacaatgatgttatgtttgcttacacttctatttgtttacagaaagaagtatcccggctacaaggattagcttgtggaggcattgaaggtcaagataataatacattggcagtgagttttccagggtcccctggatgttttaagtgggaaggactcaatgggtcatttagtccacttaattctggcagaaggatgtctcaggtacactaattttccttgagcttgaaaaaatgtatagtttggtatttctagtttgtaactgagtttgctctattttcagaaaaaagactatgatgttgcccttgttggggctttcaggagggaaaaagataaagacattgcattgcaggcattaactgctgaaaatcaggcagttatgcaactggtatgtgtcaaaaattgactttcttatgttaatagtaatagttcggttgctgctcgcattttggttgttatcatccttacatcaatttctaattgtataaatatatttcttatagcattggaaaactatttttagtaaaattttattctctccatgctaggatctcatccacttaaatttcatttgaaatagtgattaatcgatttatcttttcgcatggttcattaggcaaagcaaagggaggatgagatacaaggcctgaaaatgaggttacggtttcgtgaagctggaataaaaaggctggaggctgttgcctctggaaagatttcagctgagacacatttgctgaaagaaaaggaggaatgtttaaaagaaattgaggtccttcggacacaggttaaccgtaatcaagaagtgacaagatttgcaatggaaaatctgagactaaaagaagaaattagaaggtaagggattttgatccagattaaatcctctttagaaacaatatacaacttgtttaatcttgatcttttgcatgagtgcacaacctttaaatcttccaatgacttgaaattaaattgggaaaggttttgctgtagaaagttggacacacaggttgttaattccttttagctggtcacagtctcaccatcataaatggaagtagttttgtccacaaagtaagaggttcttaggctggacatatattctgaaatcaaatgaaaagataaacaaaacttatatttaggcatcaatttaattgaactctttcaatttcttttcaaatttaagtaaaagctccaaacaattgatatttatgttgcttacttgcaaaacatcatcagattaaagtcattctatgaggaaggcgaacgggaaatgatgaatgaacaaatcatggcattacaaaacaaggtatacatttttcattttttcttacttgtccttactctgcagccttacaagagtaattgctaattcagttgattttgggtaaaatgcagttgctagaagctctagactggaagctgatgaatgaatcagaatcctcaatggtttggactttttccaatgactttttaatgatattgttataacattattctataacttttttgttcttcaactcacttattttgcatgttaattttattttttagaaaacaaattcaaatgtgatgatagaagaacttcatggggatgataatctggtttccaataaggtgtgactcgaaaacaattatctaagctgttttttcttttttggtcttttgctgagaatctgagttgtttaacttattgtcatgtatatgtgaatactttccattacctatgcactatgtcatatgccattatatgttttacaatggtatatatgattgtcatgtatatgtgaatactttccattacctatgcactatgtcatatgccattatatgttttacaatggtatatatgatcaaattagtccattgctagtattctgtctccgggagggagtgctaatttttcccattacaatttttgttttaagagaaacatgggcattttggtcatagaaaatttctagtaaaagcaagaactttgcactagtgattgtttgagtatgcaatttgcattggtgaaattttgagcagtgtctatgctgccattctgttttttttttcttttttgttttttatggctttatgtgaatatgtttactctgataaatttaatttagggtattcattaatttaaaattctgcaacaggaaccaggattgccttggcaatcctcaattagcgaggagaatgaatttcttcgaatgcaggtaaagtacataaaataacttccttcttaatgaaattgtttttcctcaactttggttaggttttttatattgcattctatattttgcaggccattcaaaaccaagctgaaatggactcacttacaaagaagatgcaactcttccttgaagagaaagaagagttggaaaagtaggttttttatttttcaatttttttgtagattaattattcacattattaacatttcaacgttggctaggattttacttttgatttaaacagcagttttttaattttcccttgttatttccaggattgttaaagatctggcgacaaaacttgaagaggaaagatctgcaaaagcttttaaagaagaaatgccgcaacttgagcttaaccctttgtcaagtgatatgcctcttattaatttcagtgatcaaatggagctgaaaacaatggttgatgctattgctgcggctagtcaaaaagaagcagaagcacatgagacagcaattgttatgtcgaaagagaatgaggagctacggatgaagctcaaggttttgcttgaagataataacaaacttattgaactctacgaaaaggctgcagcagaaagcaataacaaaattactgctgatcctcagagtgctcaagagggtattgaaatgcacaacaatgatggtattgaactcagcaaagagagggaggttgagatgaacaaagtagttgagaacttagaacatcagcttatggaaatgcatgaagaaaatgataaacttttgggtctgtacgagagagccatgcaggagagggatgagctcaaaagaaagctttcttcttgtggagagcagagtgtcaacaccaagagagaatttgattgtgcagagaaggttgttgaagttgatggagaaggaattaaccaaattcaacatcttaaactgaacacacatgatgccattgtggatgatgtggttatgtgctccaaagagactgatgacttattaaatgtacatgatattgctggttcagctggtcctcaacaagattcaggaaatggcctcgatatggaaataccttccacttctgaaatggaattgtgtagtaccaaagaggctggtactcaacaagattcaggaaatagcattgatatggaattatcctccacctctgaaacagagttgttagattgcaatacagctaaggttttagaagatcagagattggttagaatgaagctggaaagtgctgacaagcaacttttagattccacccaatctatgtctctttttaattcacttgagaaattagtcattgaagtaggcaaactctcaatggaaattgaagtcatggaagatgccattcaggccaagcgaaaaacctctgacaccctcaaagatgactccgtcgaaatgcaagaaggaaagactctaattcagaaaaagttaacagctctcaagtactctttgtcaaacttttcttcatcagtggcttactttgagcagcgagaagctcgggcgacattaagggtaaaagcttcaacagtttatctagaccaaaagaaaaaggagttggcccgtctaagtgcaaagaaagacgaaattcaagcttctttgagtaggactaaacaatctgaagttgaattgagtaacaaacatgcatgtttgaaatcgaaactggaggaagaaaatcggaaacatgagaatgaaaaggtcctttttgctatagataacattgagaaagtagacccctcacagaaaagctggttgggaggcaaagcaactgagttactgaagacagaagaagaaaaaaccaagctacaaaccgaggtgaagctttctcgagatagacttggtgtcataagaaaggaacttgaggatttgaacattaagtctgtgaaagtgaatgaggcaatgcatactgttgaattggagtttgagaaagcttctaggtccgctgaagacatggagattgcccttcaaggtataatgcaggagaagaagacgctgttggaaatgagagagaatggaaaggcagaaatcgaaagtatgattctcgattaccagcagcatctttttatagcagatttgaaggaagcagagatgaaaatcttggaggaagaattgttggtagagtctaaaagagtacaagagttacaaaaagcaagggctatggctaccgaaaagatatctcaattactagacacaggttctcattcaggtttcatatctgaaaagatggaagaagagctacaaagtgttagaaaatctattgtggaagccaagctattgcttggagttgaagaaagcagcagttagttccttggtatattgtgattcattccactaactgtatttccacagtttagcattctttcacttgtaattaacaatcgttgctctttttattttggatgagccaacaatgctagttgtgctcataactgtactaatttttaattctgttgttaactgattgaatggcttgtatcattgtagattatgatctgttcaaagtatcagcacttggtggaactattaccaatcttgtacggcttataatggcgatttatatcttagtgtgacttttgccatattaagtgaagtatcttccatttcaaataaaagaaaaagtgtagtaactacgtgtttggtgtaaaaatttcacttggtaaattttagttgaggggggttgagattaaaacttaaaagaatttcaaacacaaacaccttagttttacattcttatttaaggatttaaatcccaataacaaacaccttataaaaaaattatatattttttaggacttatacgtactttttttttctcctattattctaaaaaatacatataaataaaatatattttaaatatttgacaaaaaaatggataaaaatttaaatataaataatcgataatgacttctcacatgtttgcttgtcacatttgtgtgttatgttcacatattactactcataaataattacattatttgttttcttaaaaaaaataaatcacatgcttaaaattaatataaaaaataaattaataatgtataaaaaatcgaaaaataaatatcaagaatacatttaatttagtttatttatttttttaataaataaagtgtttttacatatttatggatggcatacctatagtatatagttttttttattgacatacctataatatttaatatgtagtaagtaaatatttatgtagtttaaaaaaaaaaagtaaatatttatgacaaattttcattgatttacagttcaccttcaagataagcaatttctctgtccttcgtacagaagaaagactagaaagaaaaaaaaaaagtaggttcctcgtatttcctaaatcaatcttgtagtggcagatgatgtggaacacaactacaaatttacaaaattggaaacaaaaaccaaaaataaggtaaaaaaaacaaaaaagaaacatgagaaagagagggtataaaggtaatttcgtagacgcgtagcagtagactagtagtactatatagtatactattttcatttctcatctgaggtgactcgtgtcttcgctagacaattttgttctttttctctctcattttctattttcaggtttggttggctttggtctttagaccccaattttgttctttttctctctcattttctattttcatttttattttttccatctaaatttatttgtgtttctataatgcacactctaaaataaattataattatttaacatatcgtataaaattttaaatatttgtaataatttataatatacaagtagtgttcaaagtgttaattttatatgtttataaaatagaagagtcattcgtataacaaattaaatttgtctgaaatcttaaaatttattaaatatttcaattttttttttttttttgaaatgctgaaataaataagaatgggcattttaggcattttaggggtttattatagaatttttcgatattatatattattaattattaattaatatttaataactgctctgctttgttccgactcccatttctttcatatttgattctttattgtataatattgttttctagaagaaaaaaaagtaggagtgaaaatctgagatttggcttcgttcgtgaatttgggtattagatttggattattcattggagggttgaagagattcgatagagtaattgtgaaaatgaacatgatggatcccgagttcattagactcgctcaggagcagatgagtcgcatgtcacctgccgagttagccaagatccaacaacaggtttaatctaacccttttaatttccatttttttaatccttttattttattaaggtttaaatgtttgacagtgatataattagttatgtctttctccaattttgcttgtttttttttgttattcttggtttttccgaatttcaatttttaattgctttggacaaattcactgtttttttaaacaaaaaaatattgttagttaaagtaagaaaatttatgaaattctgagaagtgggtatgtttgtagtagaatagaattttggtttgttcatggtgtttttccaaatgaggtcatgaaaaaattctatttgttacttagatattatgctcattgtactgcgtgaggttaaaacattcttataagttcagttttggtgataattggggttttggttttattagaattcagtgatgatttcctaactgggcatggttgttatggtaattatgcctaaatggcgctgcagatgatgtctaatccggagttactgaagatggcctctgaaggaatgaagaacttgaggcctgaagacctgaagaatgcagcagaacagttgaagcatacccgtccagaggaaatggctgagattggagagaagatggctaactcaacgcctgaagagatagcagctatgcgtacgcgtcttgatgcccaggtcgcttatgaattgaatggagctcagatgctgaagaaacaggtttatttccctcatattttacttttgattgttgagcaatttttaatgttaactctgacattcttaattttttatggttcagtattaagttggtcacctataagatgaaagatagtatgcctaagcttacattctattctccatacatttgtgatattgacttagcatgaatttgacgttgtaatgctgccaaaattaaatgaactattttatttgtttggtataccaactttactaattactattagcaccatagaattttggcaatcttagctttagttttggaaacagagagcagaaagtacttaaaagttaaaagggaaaaatatgccattatctcagttttagaatttatgcctaagacttttaggtcagaaacatattgagggaaatctaatgggctagttgctgcttcaactgaaacaactacctcccatgagcttcaatcgtcttaccgataggaaaactgtgacccaaatctgataaagtagtatagtttcttacttaaaaagatatattatgagtgtgactcagaggacaagcagtactacagtttttgtttcttatagtgatactcttatactgtttctaattttctgaacatgaaatgagtagtggattcgagagttagaatgaaatgaggaaaggtaaactgacaatttgattatcaatttttgtttctgacctgcgtacttattgaagggtcagatgtttcattaaagtacatttaactatttatgtttatacctttttggagccatatcacttgatctgcaatgttcctgctagtgttcaataaatgcgtttaatcttacaaaatcttaactttatcatttgatctgcagttcctgcctctagtgaaaaaaataatagaaccaattactgttagaaatctcttacctgtgattcgacttatttttatcattctttggttgaaaaggagtgatcagaacattggtgatcagtccttcaaaaatatagtggaacatatatttcataaagtgttcatagtttcttcaagtatttcttcattgctataattcacacttgtttgcataaaatttggcagggaaatgagcttcatagccagggaaagtacaacgatgccttgcagaagtactgtcttgtgagtatatttactgtcactttgacctacttgaagagaactttctctactttcattgtgaacatttggtttttgagtatgatttgtattttttcatttttgaaatcttaggctaaaaataatttaaaaggtgttccatcatcaaaaggccgaacattacagttggcatgctcactaaacatgatgtcatgttacttgaaaacaaagcagtttgatgaatgcataaaagaaggctctgaggtattgagttgtttccatttgctgtatattatactatatataagtcaactttgataaataataaagaggtagaggactgtttgttctcgcatattgctgttgtattttctcattttaatctgccagttatgtttcttataacaaagaaaaatgtttcagaaaataatgttttttatattcagatggtatttgcaaatattaacaattcattcatgctgattaggtttttttcttttcaacttactgtagaaatttttagtttccctcaacttaaaaaatattttacattgttataggtgttgggatatgatgtgaaaaatgtgaaagcactttaccggagaggtcaagcatataaagaactaggtcaactacaggtgagtctcttttaaatgtcttcttagggatgtttatgaaatttccatgctcacttttggtgatactgatggacaattcttgttcttaggatgctgtctctgatcttatcaaggcgcatgaagtttctcctgatgatgaaacaatcgcagaggtcttgaggtgtaattcttgtgaatggttttcttagactttgcaatagcagatcaacatctattgtatagataaatatatttttatataacttgtgttattattttcacagggatgcggaggaaagattagtaaaggagggtggtgcacgtgcaccaagaggcttagtaattgaagagataaatgaagatgagactgcagcttcttatgacattaaacgatcaacacagtgctcagtcacacaatcacgagaaatcagcgactcagataaaacagagagagtgtcttctagtggtggcatgtcaaccaattctgagcatttgcagggtttaaaaaacaatcctgaagctattaggttggtatcttcatataggatgttagatgtagtttgtatagttaaaatttgagccttagactttgtagagtttttagttttggagcattaatatacagaaatataaccttctatttaaaacaacagatagatcaacatgcatgttaaatatgaactaagaacacagtttgcttgtggctt

SEQ ID NO: 14082 - DNA, 7062 bp, Cannabis sativa
ccaacgggcggaccggttagcctttaactgtatggcatggtcggagcgccacattcagcagggggtagtactgcatttacacctctacttcagagacatcgcagcatacttcgaaatgtgcccaacacaaatcacttttgtgtagaagaactaaaaaaaatatagctaaatggataagatattagccaatcgcctatatgaagattaaaaattgatattgagacaaattaaagtgaaaaaataaaagttttacttatatactacattaagtacctataaatattttttcatcaatgtggaacttttgtataatgaagaaattaaaagtgatatatattatgtttttcgacaaaagatgaaccactcttaaatttaactttgcatagatactagtgaacttttacaggcttatgaattatatgtatattataaatttactcttaaatatattaataattttaaaagaagatctttcaaaaaaacataaaatctagataagttaatacttttcttttatttttaaaatataatacttatttatattttatgggcaataaacataattctcgtttaaatttaatttattacttagtcaatttttaccatgcataaattaaaaatctatattattcttaaaaaaaattatattattatatcatgttgatttttggcataatatctcatatggctccacttatattaattagtatataattttttggtaataaaatttgatatgtaagattattatttaatataatatgtataatattagtaaatttataatgttgtatatttttggctactatgtattgttataataatattttttaaatattaaaattataaattcattcgaatttacttggttttggaaaaaattattgaaatataagctagcatctatataacctcaatatagtatatgaataattcatggaaagagaaaaaaaaaataacacattttgtaatttttttgtattactatattatatttgagaagggtatatatgtaatttaacaagaaaaagcctaaaatattgtggcttttataatattgagattgagatataagctagcatctatataacttcaatctagtatatgaataattcattgaaagagaaaaaaattcaacatattttgtaatttgtttgtattatcatatttatatgtatcttcgagaaggatatatatgtaatttaacaagaaaaagcccatattgtggcttttatataggttatagattatagatatagattttgttccctaatcgataaaaataagagcaatttggtaaatgaaaatttaaaattgggtgaggcatacaagaactgaatagttcaaaaagaaaaggttctttctggaactatagagcagcattttattagagcatattggtaaaattgcttcccatgctagctctcatattcacacgtaagccaacaaataagcaaaacttactgttaactagaaaatttctagctaacctctggatattcatacttgttatgaactgcatttcatatcagttcttcatggttcatttgctctcgagactagaactcagatacatttggatctttatactaaataatataatttcaaaagagaagaaatggagcccagatgatgaatatgcaggttactaacatgagaactgtccaaacttagtttttagttgttttggatggcaccaaaaggaaagatgactctgctatgctgctggtgcttgactgaggcacatgaattattaccaatatccctcaaaggagatctctctaaaccaaaagatccattattgttccatgtctgtgatttccttcttcgcccatcacttaaagttggagcctccttttgttgatgatggctgttgttctccttcaacctacaaatcaacaccctcttctccatttcatgttgtccatccaccggaatcgctggtgatgaccctttgtctctcctttcatggactttttcgagctccttctttgacctatctagttcctttcggagataatacatttgtgcttccaactgatttgccttgttttcggatgagatagccttctgtctccaatcttgaacctttgtttttatatattatatatatataaatatataaataaaagaatgatgtcaaagaaactaaccataacacgtaatgataacattaacatctgatgatttgagaacttacagatgaatttagtgaatgcatttgctgatcataatccagagctcgatcttcccaaaagtctcgagaagcctgcaactcttccatttcttcccttacttgtcctaacatctcttgcatttgagaccattgctctgtttcggctcgaacctgctccataattcttcttactatggccttacaacgtccagaacatacattattctcttcatagctcactgtctcctgtgaaaaaataattccaccacttattttaaaaaaaaatccatgttcaaatcaaaaccaatgtttaaataggctttcttgaggcgaggctttcaaaagcaaacacttacaccttaggggtgcctcaacatcatcaagaagctaacgcctcacttagcattcttattttgaacatgtttgaagtgttgtattcaacaaaactaacccaataacaattacactatgtagtaattagatacaataaaagtgacttgtttaagtattggtcaaacaatagtgcttaaaacagcaaactactctaaaaaccttgcatttgatagagtcttgccttaatcagaaaaaaaaaaaaaacatatgcatgaagtttgagttagtgtcttgccttgtgtgattgttgtactaacaacaaagaagatgaatctgtaaactcaattctctgagaagtggatgctgaacttgccactgagctattagctgtggatagcatagaaccacactcttccttcattctctctaataaagtcccatttgataatccctccattctttttctcagaatctccacctacaattatataatttgcccatttaagagattagataatatatgggatttacaagctaaaatacagaaagtggtgttagtagtacttacattggagttgtcacatgaaattgaaactaagctatcattgactgtagaatttgatgattttagtgacatgcttacttctgccatctcttggatcttttttacacaaatctcatctgatgttcccctaaacatcttcaactgtctttgtagaggagccgattgtttatcgatattgttgtgttttcgagttttaaaactctttacttctaagtttcttcttagcttctccagtttgtcagcgaaattttgaatctcttcttccaagttggtggcttcacttatctttgttttctcctgaaaacaataaacataatcgatcatcacaagaaaatccaagtacattaaatgagacaaaataaccgaataacattaactgataattttcaaatttacaacgggactattctatcgaataaaatattcatattaagtttgaaaaatgtaaaaacgtttctttcactaatagctacaaagttccttcgttttccaggcaagcaaacagaacagagtacagtgttagacagttacaaacttgtactactagttaaggtcagtgttggaatttcccagatgagaaaaaaaaaaaaagaaaactcaaaattttcccaagaaacaaacgaggtagaggtcataagagagagaaaatgataattgagagaaaataaccaagtaaaagtaactgttgtagaagtacaaaatttaaaatattcaacgggattattctatccaataaaatatacatataaatttcgaaaatttgaaaaacatatgttttactagtagctacaaagttccttcattttctaggcaaaaccaaacagaacagagcacattgttcgatagttacgaacctgtagtactgcaagttaagtacagtgttgaattttcccagatgaaaaaaaaaaaaaaaactttccgatgaaccaaacgaaaaaatagagagaaagataagaaactaacagaaacaagagcttgaatagctgatcttagagccctttcaaccttaacacgagtcctctccaatttcttaaccgctatttctttctccattctcaacaaattacactctgccctcaacatctccgcctgaaaccgccatttctcctcctccaaacccaacccaacactatcaccattaatctctctctcctcaaccctctctctcctcctctcactaccttctactactaattcttcccttcctccatgacccaacaacacaatcggaataccattttttgtaaaggctcgttcttgatcgaacagagtctccagcttgccttttcggtccttcttggcttccgacgaactgggtttcccggcaaccgtcttgggagttttccggcgaggcctgcgtggcaagtggaggattctcggagtcggcggcggcggtgggtattgccactttggcctcctggaagctgctatggctcctagtgtgatcgacattaaatgaaaaagcaacgattttgaattgtttttgggttttgaaaaattatgaaaaggagaggtttctgtccattgaaggagtggaaaaaagagaagtctgttttgggtatttgttaacaaactgataaagaagtgactgagtgaaagaaaagaaaaataaaggacagagcgagacagagtcagagacaagagaggctggagaaagagagagcgtgcaacctcgtttagtgtaagaacagggatttcaaatgaaagtgtttttcgtttatttattaagtattaatttttattttattttttaaaacatacctattttattattattattattattattaaatatttaaggaattttggaaagaggattttgtattaattaatgttcgttattatgacatctttatccctgtgactatttattgagctgggcattaccgtatcccagttgagaattgagaggaccaaaaggacaataatgcaataaatataatttattatttattaccatattatggttgtgctcctttcaaaaataatcataataataataatgttattattgtaatgctacattgtcatccatctattattttgatacaaatgcaaatgatcatgatttgtccatggaaattgggtcaactttgatttaaatatatatttttcttttggctttatcatgaacattttttagcttacatatttgttttaaaattttactctctatttttttccatatttggcatgatctagttttttcaaaacagtgaattatagtttaaatatgtttggctttagaaagaaagaaaaattgtgaataaaatttagcgtccatttgttacgcctaattcgattagaaatcttaatttgtctagtctaatatatagacatgcaggaagtttggataaatttcaactctctggaattatttatcccatctaacagggtgcgataaataatccatacaaaattttttttatcgtttttttttaaatttttattttattaatatattttaaatttaataatatttttaaaggaagaattattacaaatttatttataaatcttttttttatcaaaaactaaattagtaaaaatatataattttgaattatcatacaagttattaaaatttaaaataatattaattaaacaataattacttaaatgaaatctaagacaaataatatgataataaaattatatatttttttaaaatactaaaatatatatatcataaattaatgttggtattaaatttgaggttaaattgttattttgtataaataattttatattattaaaatatttttatttcactattgtaattatttattaaatataaatataataaattattttattatatatttatgatatacacttaattatgtatcatatattattgaatttataatttaattatttttattattcctttttttttttggaattacacatttttatttatttattattatatatttttattttaatttatttttttttaaaggaaataaataaaacagtccagtttattcttaaaccaaagtcataattactttcagcatgatccaatcttgtccagtccaatctaattgttatacccgaaaattagctggtacttcagaagatgacacgtgtcagtctcagggaatattaaccaacaaatataatgataattatatttataaatattaaatggaataactccttaaatgcagaagtcaatagggtatatttataactcgcagactgcacagtccttagcgagacaagaatgtatgaaatgttgacccacgtattgacaagaaactatttcgggtcagaagacataattgcaaggacgatatcgacaatacacagcgaggcattaatctcgcagtatgtagagaagtggtgacgaagcgaactggctgctagaacacttagtgtataatatacattatactaactaagtgaaacaacttgaaggacatgaataacgaatagctagacacctatctcgccataggaaggcatactcctggtaacctctagctcgatgccatggttattgttgctattgagaaccccaaggacatgattgtccagtctacaagaccctatggtcaaagagaatttcttaactttactcaatacactggtgctcatgccattgctggaagacttgtgaataaatcaaattgttcatgtaccaggcgagacatctcaatgagacatgttttacaacgtgttgtgatccatgtcagcattgacccgttaaaaacggttttaattacagctatgtcatttgaagataataaccatatttatttatgtggagcatgattacagcccacaattttgggaaaataatattgtgggatacgaatttgaatgtaattaactgccaccctatgtcattataaataggggtcgtatgtacagaaaaagggacggaaaatccttcagtgaaaagaaccctagtttgtatcagaaaaactgaataagattgactcgtagactatgcagagtttgttgggctttgtgccct

SEQ ID NO: 14083 - DNA, 11119 bp, Cannabis sativa
taacttcaattttatttataaatgcatttttcaaacaaaaaaaaaaaaaacgttcaaaaatctttaaattaagggactttgattatagtaaaaatgttcattttttctttaactttaataaccaacggccacctacacaattttgtgacttgtattcaaactattagcaactccaaaactggaatatagaaaagggcaaaaaaaaaaaaaaaaaaaaaccccaacttcaaaatttgtgatttttagtaatgaagtaaatattgaatgttttttaataaataaataaatattcgatcttaatcaaaatttatctttgaagaaaataaaactcaaactcaaacccaagatttattattttttttttttagtacaaagatcttaataaataaatatgaccctttatttttaagaaaatattttaatgattcaaagtcaaattataaacttaaatgttaataaaataccaatttaaaagttttaaatgcatacacatgatttattggttttattcgtttgcttttaatatttaaaatttatagactaattaacaaaacgatgctcataaatactaaattttgaggtgaaaaaaaatacacttgtgacatttctataaaaaattaattttttagaacaacatattgttaaattgatgtcatgtcaatgttttactacaagaaaagagacttaatgtgacaacaaagatgtcgtctctatagatacgtaatgcaacgatatgttgcaatatacttaccctacccataaaattttctaaaaaattttattttcactttcatttattatttacgaaggccctataatttggtgtggatagggttgcaccaaaaatatctaggtggaacaagtaaattattttttaaaatttgagttacctcttgcgatgacattttgtcgccatctatattataactcaaaattatttcaaaactttaatcacctacatcgatgaaaaatcatgacaataggtaataacattcaaatttattcaaaatttgaaccatctatcgtgacttgtaatagggcttcaataatcaaatttaagtgacaactttggattattcaaaggcaataagttgttgcagtattggaaccctacggcgatgattcgctctatcatcacaataacgacttacaatgtgcatacaaaactacatcgatgcctctattacaaatgtgtcgtcattaaagtcctactatgatatatcaggataaaaaaaaaacattggatactcaatgcattttagaggttaaaaatgatggataatgcattttgatggttttatctatcaaaagttgatttgaaaatcaatgtagaaaaaaatttgatactaaactgttgcgcgttattgaatttagctaccacaacgaggttctatagagaaaatcgctacggcaaatgacctacaactaactggattgcatagaactcaaaacaaaaataactaaaaataaaaataaaaatataaactcacctcaaacagtaaaaagtagttactcttcaaaatatttatcaaatttcatgaaaatgttaactacgtgccttttttttttcagaccaacacaggaaaatcaaaacaacattatttctagtatctagtaagtttttatgggaatatcgcatatcattgttattatttttcactcaaaattaagttttcatgagactatcgtaacatcatcacaaactatcgatatagcatcaaaaactatgattttgttgatccatgtatacatcaatttaatcttgtttggggcgtcaaaaatcaagttttcatggagcatcgcaattcgcagccgtgtcgttctttaattacttcaaaaatgtttttgaagcagagaaccattacttgttcacacgaaaggtgagcaaaatgaataaattatttacagatatggtcaaaatctttaaatgccaagttttagaatgaattttgaatcattaaaaaatgtaatagatccgtgtgttaatggctggcgagtggtgactggttagaggctggtatggcttgcttttatttttggttacgggtaaagaggagagataaggggctgtttggatgacccaaacagtttggtcaaattttgaaaaagggcatatctttttttctgaatagggcatactaaatgtaaatgcaaggtcaaattttccattgaaaccgagaatcaaattcacatttaattataattattttttcaaagtttccatgataatactgagtctgaaactatccatatatataaagggcatcattcattgcctaataaaaacttaataggaaaacaatccatggcatcattgactgcaagaaatccataggattcagcacatatattgaaaatgaagttccaatagtgtaaaatttattctaccaaacaatacaaatggaatgttgcaaacgggcatacttaagcaaataaattaatatttaatctagagaaaaaaaaaacagatacaagaaaagaaaatatatagaattttgtttttcccatttacttgaatgcaatgccaagcattttatacactaaaagcaaactgcacttgcttattctttttcttcttttttttttttgggtaataatcttcacaatcttaatgacatggttgtgtaggtataatgagacatcacattgaaaattaaaactaacccctataattcttcacctgctctgcgcctcaatagcataattacatgccctatgaacgccttacggctccacaggagtttgcagttgattgatccgtcgtaccaatcgttatgtttttcctttctttctggtgtcttcttctgttcaaaattttggatttcccacctttctttggcggagctttatgatgattaaataacatcagtaaatgaatatgaatactgtgaactaaaaaacttctcaggctatctttggaaacccaataatactagattgcttgtctcttgaagaaaggcttctggcagataaggagcctctcatcactgttactctccatctctataactcttgcatcccactttagccctgttgtcagcgctctcgctgcttcaataagaggagctctgtcacggaatatcacccaaccctgcaacatcccgtttggttagccaatacatataaaaaggcatccaacaaaagtaggtcaagattagaaaagaaaatctttagatataaacatataaccattttgtttaacaaaggtgaaatagtatgcttgcacatggtagctacatgtgtttggtaatcaccagtcgccatggtgtgaggcagtttgccgtactctttgagacaatgaaagaccgacgacgatcaatcaagtcattgtcatcgtcattgaaagttttatttcctagctagttttactattagtgtacaccgcactcatttcaagcattagggtcaaactaaagactggactataagtaaacacaccaaaggacaaaaggaatggatacatttacgcctaaaacagtgccttaatataattacagcaatttgttgataaattttgatttttctacatcatcacaagcacttcaaactaaatttcaacatgaaagagtaatggaaaaactgaattgatggaatgaaaagataatcaataggttttaatacctctggacgaagtaagcgatcaatttcagcaaatagatcaagcgtggtacacctgtgctgctgtttagtttcaagagatagaagaccttctgcatgcaccatatcataagttcttgggtacgttggaaaagcttcacacctgaaaaagagaaaatgatcatgattcatgatgttaaggattattgaggagcttagaaatgtcatttacactagtcaggcaaggtaaatactgaaaccagttaatgacattgcatagtagaactattaagtatcctctagtacatgccactttattcctgcaagggtttagccaaacatttttccgataacttcaaggttacaagctattttggttccaaattttaaatgccataagctctttacttggttgcaccttaaagtacctaggaccaaatcaaccaagtattgtatatgaagataatgagagaagagggatgggagcaagtagcataccaatcatgtaaaacaccaacataaccacggtcaagtatcaaagggagatagttaggcccgctcgttggaataacattcatgacccatacagactttccagcttccagtagtgcagaattaaaaccaccatattgagcattcatgtcaagcacattcctaaccatgttataaggtggtgacggatcttcatcacctggcctctttggatgatccgagaatattaaaggtgacagcagtgaccaataattacgaactgacattttccaattttcagcatcttcagccaattcttctgggtgtaaacctgaaatacaatataaactattaatatatacagcttgaacaactttttgttctgttgttttttttaaaaattttgattgcaataaatcagtacatacagttatataaaatcctgcatcaacaatttaaagcaactgtcattttttttctttttttgcagaagcgctccacagagtgcaggaacatagtatttaccatatattgcaagttcattcttgtcaagattagctctagaaggccagatcctcctctcttgaataggaatccacctgcggctttgtgtgcctccgatgcaagcttgaaggggtcggtaatatggagtttcaacatcatgacctctactgcataaagcagggccagaaccaggtttcctacaaaaacaagaaagttgattgctcagaaccagctcctgttctaactctaacagaccaagaaagcaccaacttatattaccaaataaactattcttgaatagtaaaagaattttgagcaaaatgtcttaccgtgcactataacacttctttttacttgtcttcttccacacaacagtttcatcttgttgaggcaacatctcccaacagagactttctgcaaaatcatgaacaaagttccaccttttttgattctctttgttatgaaggtatgtttgaacattggttagtggtgatgtccaaacaaagtatccaccgggctttagaactctatcaacttcaatcaggagcataccatctgcgtcaacataatacaaacttattcttccttcatttcttatgaacaaaaacagaccaaactcttatcaactcattatatgttttatcgaatgtccccaaagggactatcaacttattatatgtgctgatatacattccgatggaaattatatattttgtgtgcgcgtgtgtttattgggtatttggcaagaaacatcactttgttgtgctcggtttttataaaagtaccttttttatcccaatcaataccacatcgtgcacaatgcagcatatcaaacgagagagatggatatggcagctgctttgaggtgagagatccaaccattgcaggaagacctctttcaagagttagctgaacttgactgcctgaagcctcatagtttgcaatgcatatagttaagagctgtttagaaaagagatgtgctccaaagctaccatagccacaccctatatcaagaacagttcttacctgcaagaattagatcaacatataaaagtgattaagcatttgatgtatactgcaaacatgtctcaatcgaaaagtacaattcccttaccccagcttcaatgaagttagattcatttctcagaccaatcatttctgcaatttgatgcgagtaatcttcaacgccatcaaacatgggtgaggctgaacggaaagaaatctgctctttatccaacaacatcattctaaaagcaaaagaagtgaggcgttagagaatgatcaggtcagcacagactaaaaaaagctgttgataagagaatgtctgctacctcttggtcaagcttccagaggaaagtacttcctcagcggtaattttcacatttgccaaccaaatgatatctcttccagtaggccacctaagagggatcttataatttacaggtggaagaaccaaacaattttgcttcatcccacgcatgcaattccgtgggtactcctggccatcagataaaggtaacgcgccgctctctgagacattattgttgtagcatggaacatgattttcaaactcctgaggacaaaattccatgtctttcaccctagcagaaccaagagagagctccccgatatcccacaggtctgaaacgagttgttcttggagtctcctataaccaacaaatatttgtcctcttgaagacgttgaaatggataatgtccaccaaaatgatccggaaagtgcaacaagtataatgaatgctaaactgagcttcagaagtagcattgctaatttgtgtcggtttcttggagagagaggatcagaagcaaagccattttcattactcccatatttggaaggagaattctctgggaaaagtacccggatgggcagcttcatcccaaaagcactctgatcagatgaacctcttctatccaaatcatccttttccgatttatctttcatttgagaatcactgaaatcattgctccctccagagcctcgtaccccagaagatatgccacgatgcagaggcaaaggcctggacattctttaaccacggactcgctagtcgctacacagaagagactacaggaaacaagaaaagaatatatgggattaaaatagaaacaactcaatctgaacaaaagcaagatagagattaagagaaacagactcaaatcctacccttcaagctctacaaaaatttaaaaaagcttattctcaaatggaatttgtttgactgacagtaatagagactccaccaaaaacgaataaatccttatataagatacgtgcccaccaatgtttctaacccaaacaagtagaagcgtaaaaggaatattaaaaaaaaacccagatatattcttcaattaatttccaagaaatatgcaaacttagattggttcttcactcaagagagtttaaaacacaggctaatgaaaaaccctgaacattttctaacccagaaaaactaaagagttgtatccctggtggaaatggtcattttccaaatatcaatgctagatccataaacccagtaagaattaaacgtattaaggaaacagtttcagtcaataaagatgaaaaataatagaactttgagtcttctttagaaagtgaaaagaataagcttataaagggcaattggtatttcgaggacagaaaagggaaagtaaagtagatacgttccgagataaccaaagaaaacagttgtatcactttcactcgtttcggaaacccttatcagcaaaaaagggcaagctcatttttcagtccaactttcagctccattcaattttatcatactaaaatccaaaaatagacccaaaattcattcagatcaatatcataagaataaccccaaaaaaaaatattaacaaaccatcttgaaatcaatcaaatcaaacaagttcaagtaatcacataaaaacaagaagaagaacaagaacaagcaaacactacctagagatgaagactgcagaaacagagataaaaagaacgaaagcaaaacgaacagagccaaagacacccttttgaatcagcgcgaattcatgattgggtttggctttggcttaaaccataaacacttctatggttttcttcttctctttgttccttgaatgttttaagctactgaagcaagcgagaagagagagagagagagagagagaggaagagagtgagagattttgtaccgatccaatcacgacagttctcgtgaaatctaaatactatattttatataaattttctcagagcaaaatacaaatttttaaaaataaaataaataaaagagtctagtaaatgatggtgtatgattaaaaactattgtaagcattaactaagcaattactacctgtctaattcaattttaaagcccaactatagttaatgaattatttcttataaaacccaaatagttaaattatcctcattcaaaaaaaaaaaaaataattagttaaattatttctgaagattttttatatatataaaattgcactaaatatagtattttttaaatacagtatttatcaaattaacaaaatcttatttaagattttttttaaaaatataatatatgtttagatttgggaaaacattactggaaatagtcaaatcccgtgaacatgaaggagagacgctaatcaacagttaaaactatctttctctctcctcaatggccttttttgggatcaaccccacttcaatctttcttatatatttaataattaattaacctttttttttccttggcttatttttcaattctcaccttagaaaagcaaatgggaaaagggttcaggacatgttaaacggcagtagatctgaaccaatggaaccccaaaatttatatgtttcctctttgctattaaatttatatatttatatatatttgttttccgagataaatatacatatgtaatttgaatttagttgatgtttgagacaatttttaagaatcaatttaatcactgattagatggttgtgtatatattaagattattatttgaagaatactcatagtgatttgttgcaaattttgtcacaaaaccgagtcaccactttttgggtgacgaaaataattaatttagcaaagaagaaattaatacagcgcaatgaaaataaataaataggcataataatatatataagatgaaacatgaattattatcgactctttctcatctcatttaatatagtttacataatcaattcaaatacaaccttggtaaagaagttaagaaaactatctttattgtgacgtgaattattgacataaaaaaaaagttattatagatcaaaagagagaatttatggagttcatagttcttggcaagctgtacggagtatatatatatatatatatttatatattcaattctcattaagtggagtcatccccacataataattattattaacttaaataataatccaaaaattgaaccacaaaaaaggtttatttgtttaatatatatattttaataagccagggaaatgggaggtaattacggaatgacccagtgaactgctttttaaaaaaataaagttgaaaattaattatcataattaatggaatacagattttcaactcttaattactacgaagctaatcatatatattacatatgccatgtcatgctatatgcattgtctcagctgtacaactctccaaaagttgctagcttttgattttttgaagattctgtttgcctaacatttttattacttatgaattcactacaaaaatatatatatatatacattattttttaataaaattgaacgaataaaacttgaatggtgaaaaaaaaaaagaagatatgtattatatgtagaagagaagacgtccttttcaaaatccaaatgaataaaatagtgtgatggattggagtgagcccatgtctttgatagagagttcacgtatagaagggaggcctaatttgtggtgagagtgaaaatcagaaaatgagaatttgttgagtaaatccactcaagggcaatacagtaataacccattgggaatgggtagtactgtatattcattcaagaccagctttgtagttgtactcttatctgcatcgacgtcggattgatgtatgttcaaaaatattacgccatacacagtgaataaaacctaattaaatcaatattactatgtatatatatatgtaattaataaaatttatatagaacatctatttgaatgtaatttatataatatacacttacagtttataaatttatttatgtctaaattataatatatataaatattatatttacttaaaaataatttttattataatatcatattaaaaatcatttattgtttattatttttacattaatatttgttatgttttaatttcttctaatataaatttgtttaatttttttacattcttaaataaaaattctattgtctatatatatttaagcttatagtatgaccaatactttaatgcatgatataggtgccacgtaatcctcacatgcaacgatgagagattcaatttaggggttttggcaagtttaatttttccctttggagaagaaaggcccaaataaaccacctaagcaaagagcttaaaggaagggccacactaattaattgatcaaacgtgctcacctaaaatgagctaaaataattcactaaatattgctaataatttctaataagccatatttagttaagatatagatcacaatattatctaatctagaacaataagaaaaattagcagtttgaaattaaatttaaaaaatttgtgtaaaatcaagtacaatcaaactcaaagacgatatcaaagagtcttggttattaaattttgagtaattttctgtataaattttttattgtaaataaataattaagtttaatttttagcgataataatacttaaagttatatttctagaactctgtagttatctaaccgttaaatgttaattagtcattatacatgtgtcattttcttattggtatgttttaaactaattatttttgaaaaaataaaataatgacttagactaatcagaaattaatacgtgttaatttacttaatacataatagtcagatacctatagaaattttaaaattataacttaaatattattaccgctaaaaattaaatttaaatatttatttacaagtggaagttaaacttaaatatttataccgcaaattactcttaacttttagtgcccacccttatacaatgagattgaaaagaaacattttcaaactccaacaaacttttttggctaagttgaattaatattaagagacgcattatttagaattgtataaatatttattaaaagttaagtctttaattctaacaaaattttgacagaactttaagtattgtttttagacaatattgatattatatatatatatacataaaaagattacaaaaagattaattactaatgtttaattcaggggttgtgataaaaatttataaagtaaggtgccgtttggtaacacttttattttttaatttttcaatcacaaaatgaaagtaaaattttcgttt

SEQ ID NO: 14084 - DNA, 10584 bp, Cannabis sativa
  modified_base (7735)..(7745): a, c, t, g, unknown or other
cataaaagttaacaccacatatagttttacataaaaatattacataaaatacaatttaatataatacaatacaatacaatataacctaatacggcgttccaaacgagcccttaatgccataaatacaaatgacaatgatgcagttctgatggttgtagcaaaagcagctctggtggctgttgcataggtgtagtactaatgtggagacattcgtgagtttgagaaagaaggagaagagagatgtgttgcaagggtagtttgggaaagttcattgaaaaacaagataactaaaaaactattaaagataattttggttaaagaacccaaaaaaaaaacgggtaatcatcaacttaacccacttaattatgggttaaaatccaccaatatcaataactatgttctgtacactgacaaaactcattctccaccatggatggcgggtggtgacaaacaaactaggagagcctttagacttttttttttacatgtacatgtaatctatatttccacgtggtgtctgtcgcctcttaagggaatccctttaaaaaacctcaagcatacctaaatgagagacccaaagaagaaaaggtcgccaccccaccccagtatgctacacaaaacatgtttcatttttctttaaggtaacctcatttctgtacaataatttcgtcaaagccatcacaatatggatgccagtccaatactgtccccttcatctgctctggtttctgccgcatttgtcgttcctcggggcctcactgggagagaaaagcaaaatcttattagtgcaataataaatttaaatggttatatcatggcattaagcatagtcaccatcaagtacatggaaaaagaaatagaatgtcagataacgatggagtgaaagtgcttacttgttacattggtgataacatttacacttttctgagcagcaagagctcttaactggtttcctgtagctgataagagaaagcttttcatatgcaacttttgttctttgatactagacgtctttgttaaagcctcctcaaaagcaagcaaatcattatgggtgacggatggaagtgagagcaaaacctgatacatccaaagaagcatattactttgattaacgattgtttacatattctttcaaagtagctaaatccacaaatacaatcatgaaatatgagaaggatgaagtgacacaatatacctgtctcggggcaggatccctttcacaaagatagagaaaaatttcacgactgagaccaacaagttcagcactaacatatgcatttgattcaagtgctagaccttggatgatagctgaaaacaggtccttcgcaacaaattctcggagttccacattatttgttaatatagctagaagaactaaagcagcacaaaatgaagaaactttggtcactgcttcaccatctgtccacctaagagattctagacagatctgcaatgctggaagggcctgacttttgtgcttcaaaagaaaactgcaatcaagcaatattataagagaacaaaattgaagtagtgaatgtgttgttagagcagtctgtatatcaacggctataattaataagcattgcacaccacacatacccaaccatggagtttgatgtaaatgcatccaagtctttaagtgaagacaagtctatacgactgacatgtccagagtgctccaatgaaggcaaccctgtatttaactgaggtgaagccatgacagagaggagcgaacaaacttcccgagttagatctctgagtagtttttcctccatcacttctgctttcaagtcagacccagctaatatgccatgcgcatccggaacctttgctctaccttcatttagaagaccagaccaggagcagctaagagtctgctgagaatgtagaaacaaaggttgcaaaagcttttccagccatatatcccacatatcagaaggacaattcttgaccaaaggtataaaaactgaatggataagctgtcttgcatgcctgaattccatcgagtttatgttctccaccagagctaaagcaacagaatgcacatccaaacacttaaaaaaggaatccccaatggtagtggacaagcccaatacattgtacctagaattaaaatttgaacattaaaaaacttcaagctagaactttaatattgagtaagctttccaaaattttagaagaaaagggaacatggtttctgttaaaacaatatatgtactcagatttctaattgctcaaagcttgtatcttttaagtttgtaatttttccctttgtttacattatcatttactagttatgttctaactattatgaataagcaaagaaacaaaaaaacctgaagcaatacatacccactatctctgatacctttcaaccaatttcgtatgtctgtttcatttatctctgttaatccttctttacccatgctgatatgagatccatcagcataagttaacccagtagtttttgataatttagggtttccttccccaagaagactgaatcgctcaacatcactcattgccatggcagctttcaattcaacaggtaggttttgaaatactgatggggaccaaagggagtgtatagcacggagcagctgcagattaaaattatccataaatccatgacactaaaagtatcatgactaaaatattctataaagcagaacactaaaacaaagttaataggaagaaaaaaaatgctacttactttcaaaagaggaggcagcatccatgataaatgagaagccattggatgcaacatagaagttgtttcgttgttctgcgagtttaaatgggattttcttgttccactcctcttgagtgccttctcaaagaaggtcacagtatgaaaaagagaccacatggttgatgtctcaaagcacaaccgaactaaacctgaaggatctgacaaatagttgttttgccactctagctgcatccattgttggctcaaaggttccaataaccagactaaaacttcttgctgttgttgaacccttcatcataaatagaaacttacaaataattagtaccaggaaacaaaataaaacagaatgaacccaaataagaacaagattaccctgcagcagaagccatgacaagaaatgcttcccctagaagattgtgttccccacgaagcaaccgaccttctctttgtaagtatcccatggtatcagctatgccctatataagaaatcacatgagaaattgtatcagaaaaaaaaatagctctgataaaggaatgaaatattgacattttcagtcgatatttccattatatttccaaatttttagggtaccaattattttaagtaatacatctttttcctgctaaaaattgaagatatatttccgaaatatccatggatatcgatattcatggaaatatccacagatattccatatttttttatgaaaaaaaaaaagaagaaaaaggaagcaacatgtggattgaagtgaggagaaatcatcaaaaaatattcatggcatgtgttagaattacatgaaaacatactcaaaccctatatcttggtatcaatattgtctagatcaagatcatttaacaaaagttttgaagaagttacttttggtattgatgctttcttattgagtgtgagtgtcaaatactatcatatttatatgatgcgtcaagacgatgttataatatcgaaataagatttctatttattattaaattattcaaatttattggtattctataagttttatcattacttcttatattttaagacaaatatgtgatatccgtaaattttcttaaatttttgttgatatttccatgaatttatagtactgtcaacatcaatattttcttccttgctgataataaatctgggactcttctactttcataaaattaggggaaaatgatcaccttcatgtgaggcagaacgcttttgtcagcagctttggcaatacgaataaatgatgtacaaatttgcaaccttgcatgacgagcactatttgtagaaggatcctgacaagcaataacaaaatatgtttaggcatgtctacttaggttatgttaagttatgatgtaaaaatcagattgagatgcaccttaacaatgaaaggaagtgaatttaggagctcaaataatttattgataacactaccaactgcatctgggaaatacttcaaaaacggccccatggcatcaaaataatgtccaagtacttcaacaaaggcaggctcagtccacttcagagaaagaaggtgctgaagtaatccttcaataaaaatgcaactggcatattttagaaattcactgttggaaaatataagagtaaagaaagaaagctaaaaaccttcaaatattttgcacaaagcaagttgaacttcagagctccctcccacagcctcatttgacccatcaaaaatcgcactcacaacattttctagagccaattgcatgctttccatgacagctaattccttgaaataagaaaagaagtatgaacaaaaaataaaccagcagtattgtaaaacatgaaaagacacaggaaacttctcatctgtaaatatagtaaagagaatatattagtaatcaaacctgaggctgcatagaagaaagcaagaggtttttgattattgtatcaatcctttcagaaaccttagcaccagctattaggggcttatatgaagcaataaacttggtcagttccaactgcatttagattattgaaattagtggggagaaaaatcttaaaaccaggtctaagggaggctggttaaattctttttatttattgaaggaaaattcatagtcatctcaaataaatcaccatgtgattggaatttatagagcttagtacagaatgaaaaagcagataagcaaaacaaacaaagatgttgacatattttataaactggcatgcatagtggaacaccagacaaatgcattaactaagacatgcctactggattttagtatacatgcataaaccaaacaaaaatccaagaaatttaagtgttggcgcctagcctgttattgtatgtatgcataaacttgaacaacaaacatatacacataccagactaaaataagctagacccaatttaacaaaacaaaccaatgcaacaaaagttaaggcgaaacagtcaagaaaagctaatgtatattttttaaatatttaataataaattatttggcaatagtgtcaactgctcacaccgaaccgcaccgcatttttgtggttttgaggttttgcagtgcggttgcagtttggaaaataataaaaactaaatatgcggtttggtttgaaaaaataggcaaaaatcacaccgtccgcaccgcaaacaccttttatagaacattaagcttagcaacaaaaaaaaaagcctttttatagaaagtcatataactaatctcatttcataaggaaatttgggataaagtgagtttcataccagtttcgatcgatactggccaaaatctccctttccctcaatatcatcactccacaactctaatgaccccaaagaatgtgccattgcaggaagaaccttttctctcttaagcatgtgctggaaagatgtatcaaggatagcactacatgtatcatcattcacaaaacttaagatctttttcttttcaacatcaacctgggtagggccagatcctgcagcctttggcttcgacattaagtctctcataagagcctatacaagcatgcaaaccttaaatagtaagagcatagaagatcgtgcgacattgcttttttcaaacatttaagcaacaaaaaaaaccataccagccagaagagcagagattgaaaatgaactgccagcttaaaatgctgaaagaaacccagcatctgcacaggataaataagagaaattatttatttctctcctcagtctcttggattgtattttatttcatattaataataataatatttgtgaagatattagaaacattttccctgatagtattagttggtactacctgttgcaagaaaaaaggtagcacgctgctatcaccagcaacacattgcaaatttgaagagcccaaagacaccatactctcacatatgcattcagcaaagttaatctcactttcatcaacaacgccagaaccagaggcagatttgtgtaagaattctttggatacattcatcagtatgttaaggatactagccattgcagcatcaaattcagaagttgattcatcagttggtcttcttctgcaaaatacaataatgaaaatgcaattggcacgtgcacattactaagtaaatcaatagtgcatatttagtgaaagcatcatggaaccaaatatgaaaagtataatgcttacctaggggagacaagtttaaaaaattcacaagcatgaaggcgaaagtcaggagatgaaagtaagaaaccacacctgttgagaagcattaaaaaagggagagaggataagaaacatataattgtctatgaattatatgtttgccaacctccaaaaccttctaagaaggaaatcatacccatgaattataccatatttagcaagatcaggtaatggagcccattcagcatatgcattgacagcatttaaagtggctgtcaccgtagctgcatgttgttttgcagcatccatttgctgttttccagcttcgcttattgcagctccaaagtgcctttcaagcaacttgaggcacaagcaacttaaacattaaattgatggtcaaattttaacagcttctgaaagttaaagagggagaaagatgcatacagtatacagtagaggcaaaatttcagacaaagaatgagtaagaccacgtagtaatagtcgtcgccgatcacctattattagcattaatcaggattaaatccatgttcacatatatccataggacgatagtacataaaagagaatataataaatcaactctaattaaagggaaaacaaaaacatgagtttcacgttaaaccttctaaatcttcattgtgaacagtaatatcttcagggagccacctcagcatcattgagaccaactcagcctgatttgaaaaagaaaaaaaaatataaccatctcattctcatacatgcttaaagttaaaaaaggttgtaagtaagaaaaagtaattacctcaataggtcccttgttggatatagaaaccaaagaaggaaacaattctggccataggtctacttcccttctaactatctgtaacacagaaaacatgaatgagctacaagggaagtattattgtaattaaattaacaaaagttaagagcatgacataacctcagcaacaagggctgctgtttgactttttagagcccattcctcacaggggtttgccatatcagacatcaactcaacagcaacattagcaaagtttctatgctctgttgagcttaattctgcccaccttagcctgactaaatgctgcaatatgaaaaatctcacattcatgcaattagataaaatactttggcggctttaccagcaaattggcatataaataattctacattatttaattagttttttctttattccttcaaaaattctttctttcccttttggtacatttatcctggtaactgaagactttccttttctttccatctgaacacatacctgcaacattttaaatgcatgcaaccgaatttctgaagaaaagtccttttttactaaacgaagtgatgtgttggccaaaactcgtacatctcctactttaatctgcaagaaaaaaaataaataaatannnnnnnnnnnataataataataataaataacaaggtaagaaggccaatacaaactagacacagccaagtcgaactgcctattaaaaccagtttgtaagccgtgataccataatcttacagttcaacaagaccactgagaatacattcacagcactaaaagcagcatcagagacaccacaagcctagccactaattatatctcaagcaacatgagggtaaaaactcaataaaacgttgaaatttgatctaagctcaacggtacacaatgtcttcaactacactaaaagttcattagtgagtatttttataagtacatattatagtcacaataattactctacggaattctattcattgacattcatacttatatgatctaaaccataagccaaaagaaaatgagaattcaaattttgctacttataataactttttgtgcgacgtaataaattagtgtacaacttttataggccaatgacaaaccaaacattcattcccatatcctactatcctagagctcgattaaacacttaacatatccaacgcgtactatttaagcagtaaccttaaaataataaataatgatgatatacaaatgtacatatcaaatcgccatagtcactgaaatttccattcaaattccatctaacaaactcaattaaccaacaaaaattacaatattaaccaaaaaaccatcaaacttcatcaatttaccacgaattgaagaatcagaaagttcataaacgtactagatagcaaaaagttagtacaccaatggagtttttacattgaagtaataaatagggttaaaggttagagagaaagtacggaatcaaggtaagagacggcggctttgcgagcgtccggagtggaactccagtcgagggctactgctatggctcgggccacattggtagtggtgctgtcgctgctgtcttccattgcctctgctctggagctatctagggtttcttcccacccaaatccttcgagcaagagagagagagagagagagagaaagagctggaaacagagaaagtaaaagagagtcgtttgttgtttttgttttgaatggtggtgttggtgcttgttcttaactttagacaagcaagtactcccttagattacacagtttttttttctttttttttatcaatcacattcattcctattttatttatttatttattttagtaatattaatttacaccataaatacttaaatttataaatgtatttaaatttaattttaatagtaataacgctaaagttatatttctcaaatttccatagatactgttacttagaatttctctcaaaatacgtagcagttcaggagtaagccaagtggcaataggattcacgctacgggatgggtcatcttaatcactcccggagcttattatttcaaaggaagaataataaattggtcatctctgggaggtttaactagacaaaggtatttcttatatttccctctccgtgagtgaattcgacctggagatagttaaaggacacggaaggacaggcggagtgtagcgcactgcttaaggttatattattgtatacgcgtttattacagtatggagaagagcacctgacaccttacgctgaacagacgtacttaagggttaaactcataatttcctgatttcacgatgtcgtatacatcgattgacgactaaataatgagttatcaaatcataagcaagagataaattagatctcaccaaacacttataatcgcctcaaatacatcacaaaaataggtaatcatgccctaagttacaatttgggatattgtgcaaaatatgattcgtacactcacgacaatggtagtcttttaccaccattatgagcctataaataccccaatgatgtaaagaaaaatgagatcggaaaaaatctttgtaataaacactctcattaatgcaatgaatcatagactaagctcattatattaatgccccgactatgtaaaaaattctctcttctaacattcattaattgcttaatagttgtcgaaaatctctctcaatattttgttgcttttattgagagctgtaggaagcttaccaaaaaagaaaatcataaatagcctcgtggtacaatggtgatcataaggaacacttcacgtccacaacaacctaatgacccaaagggttcagaagaagaagaggtagcttctagggttgatgttgaaggagaaggagacaccaatgaccctgacgataccaaccaagaggaataagaagtatacgataaagaaaactatacagaactagttgagttaaggcaaaaggttgctgaccatgaggctaagttggcagaacaaaaggaacaaaataagataatgcaagaaatattgattttcatgaaaaatgcaatggaaaatgcaggcattcatgtggatccaattgcagttctgtatgtataagaaaagactggaaaagagtcttcttagcccgaggaaaaggtccgcagggggtaaattttccaaagggaaaattggctccaagacagtaaggactaaatctcaaaaaatatcttctttttgtggggtaggtttattttttcgtttgtgctggagcagtcatctacagtgcttcttcttgggagacgtgtcagataccttagtagctcccggatgctatgattcaggaagccctcatcctcccgagaagggagtttgaattcgattctaacggtccttttagaattgttgttcactcttggacaccccgtgtctttagaacatttttaagatttgatatgctaatattgatttgtcatgtttaccatgtgggctccatggatatgtggtttattttctacttgccacgtaattt

SEQ ID NO: 14085 - DNA, 4821 bp, Cannabis sativa
aaaaagaaatgtacagttattgttataagccattctctgatctgattttgcactcaactccctcaagcatggcttgtgttgaaacagacggttccaccattattggtgaattttgtccattgttgattcctttccaatgaggcgattgtagattttcatagcaatcttttcacttcttaatgtactctcaaatggtcatttttagttttgttgatatgtcaaaagtataaataattgataatcacaaaaaaagtttggaaatggaacgtgttagtatagagaccagagagtgaacttattccataagttgataagcttgtcgatgaccttttagaaatggtttctgttgggataacatattccaaaatcaaccatatcatcaaaccgaaccaaagtgaaaagttacaatccatcaaatgtcttgtcccaattaaaaattatgcagctctttgctctccattttttgttcataccaaaaccaggttcagcagaaatcaatacacaattttgtaatctactttcctcagaaagctcaaaaacaaatcaccaaacagttctgaaaagaaaaagaaaccaacatatgcaccttactcaaaaggtaaggcttattttatgttgtgcaattacacctaatatcccagtgaatgaaaaaaagaaaggtataaaataaaaaactgggtatttctgactaaccaaatggaagtatggaacagctcacacattacaaaaacatagctaaaaaataaatgaaactaagactcgcctccgctctcagagataagactaccatcatttggtgagttttgggcttctaatagctgcatttggcgttctgcgtgctctctttcgcaagcagttattcccataatgatatcgagcattgtaccagttgtaccaaagaacacaagaggagctaaagatttcctttttattcccacaggaatagctaacaatgctcctgctacagagaatacccaagtccccagtgcactgcatatgatccatattaattcagtgaagttagggaataatgaaaaggactaaaggaaaggggaagatgacgcattagcttgaaatgcaagtccttttcagaaagtaaataatttttaaaactatatcatggttgttaaattacacttaagcatactaacaaactctacaagccgtaaacattctgtcaatattgatactctaattctttgtagatgaagtttaaatcagatatggtgatgaaaacgagacatggcaaactcaatcaacattgtcatttaaagcaaaatataaataaataaataaaaaatatctgacaaatgatataataatccccagataacattagataatccgctactttttagtggaacgactaatgattgtgacaagagctttaaatcttcactagcatcttacaatctgaagtactatgatgagttcaattgtgactctgtatctgtaagcgtgtttattttgaaaagagtgctctcaaactcaatataaccagcatcattatcattaaattgttacatgaataatgctaaatataagtagagagcataaaagcagtggagacgaaaaacagtagtatctaatccaaacattgagaccatgaatggaggataaacaaaattgataaaaataaatgagtagtatgcacaaagcagtgtagacaactttgaatagtgttaaaatcagttaaaatgttcatttgaaaaatgatgagaactttacactttgaccttaagaaaaactgttatttgcacctaaaagaaaaaagaatgcaaaatggcattcattagctgatcaggtttactgagttgtcatatagaataataatacttcaaaactggtgatatcccaaaatgggcaagactcctgctcatgaaaaaactaaagagatccaaaaacgcattgaaagagaatccgcatttttgatattctaacatcaatatgtgaatgaataaaaacgacaaagaattactaaaaaaaataatacgaagaagaagaagaagaagaagaaataactaacttggagacagagcagtcctcaagatgcttaacattgtcttggccttccatccttgtcaactatttaaacatatgaaggaatcatacttcaacattccataagcagagaaaacattgacaaaagaagctaaatcaaactcaatattgactgttttaatccaagttatgtagaacacagcacaagtgaaaccatcagggagcgcattgggggcctagggcaaaatttcaaaatgggaccttttttctaagaaaaattcaataaatatttaaactttaaacataattaaaaatatttaaatatatatgtatatattttcgtattttaatcctttgactctccaaaccaaacaaagctcagatattttcttagccatggcagaggtagagcgagaaaagattgagcttgaattaggattatcaattggaggaagaggaagtttcggtaaatacaaaacgacaaagaaacccaatattggctttaatttagaaacgagagaaattagtacctcgccggcgccggcaccggagagggaagttcttgatgcgaagacgaaacgtgagattcacgcgatgaggagacaagaggcgaagaagaaacgacaagagaaaaggaatcgagggttaagaaactcgaacaatatctctcctgtaacagagaatcaaaatcaagatcgcgatgatgaacaaagagccagtaaaagagagaagagtaatataaatgagtcgcaaatgagtaatattagcgaagcactgccaaatcagtacccttacacgtcgtttcagttcgttccgtacacgaatgggtatccgtacccatacatgatgccgtggtggacgccaaacgcagattctaatctaacaaatgtggttcaacccatgccttgtcgggtcggattcggacccgattacacgggttcggataagagcggtgaaaaaacagggggtgaagataggaaaacgacgtcgtatggtggttctactagttcttctactgtaatttcagatagtaatagttctgaaactactaatgtttctgaatcagtggttgaaactagggtcgatgatcggaaaccgccgaaggctccggttcgaaatcggaacgaaggagcttctcagttgcaacaaatgccttacgtttcgactaaaggagagggtccaaatgggaaaacagtgactggttttttgtatagatatacaaaatctgaagtgaatatagtctgtgtttgccatggaactgcattctcaccggcggaattcgttgaacatgccggcggtactgacgtatctaaccctttgaaacacatcactgttatcccttttgagtaatagtttatttatttttttcaaaagaattaggaaattttcattttctttttaaaaaagggaaaagaaatagtacatacagtgaatttaatagttgacattaatcaaagatgtgttgattatttatttatttatttttcttgatttaattttactggaaagggaattgttaaggtttatgattaagggtaaatactattttacacttttacaaaagttatcaattggacctgtattttgttaaatgataaaatggacctgtattttttaatatagtataaataggaccctgaattaatttttttgttaaaataaagtttaattataatccgatctaaaagtgctattaaaaaaaaactgttaaaaattaaattcaggttctatttttattattttaaaaaatacaagatttattttatcatttaacaaaacggtttaatttataatttttgtaaaatatagagtctaaaattatatttactctatgattaattattaatgtagtgagaatgcatgagtcatgacaacgcacccattttcctaaattggcaaaacagtggatttagttaacaatgatcctaagtaaaataatttttttctttcagtttatttgtaaatgtattgtccttgaaattatgatggtcggtagcaaaggaaaaataatgaagttttgccaagcctgctatttttagcctttacttcacaatctttagcaggtgaagaatggaaggtccttaatatgaatcttaccaagagtaatttgaaaaaaagaaaattaaaatgtttacaaaatttaatttttatggctaattataacttttttttttcttttttgacatgtactaaattataccatttgatttgttaagattgttaaaaatgcctcttaaactaagattgttaaatttaagaatttttgttcaattttagtataaaaaatttaacatggataaaaatttaaggacataatttagtacataaataattactaaaataaaatcgaataaaattaaataaaagtttttaaatcttacagtttcaatagtttaggaagaatatttaactcctaaaaatgtttatgggcataatttagtatattttaaagtttaatggataaaaattctaataagttatttattgtatattcatataagttttttaattgaattttaaatttattgtcgtgtctacaatttcagctttaataacacataaacgaattaaagtgagttaccatgaatattacataattttttttatggattaagattgaaaaaaatgagacattgagaattaggagtgtttattttaattgattgatatgatacaatttaattcgcatatatttataaaaaaaaaaataaaaaattaaatatataattaaaattttaatacaaaaaaatagtaatttaaaaatttaatacatataatacacatatttcaaaacttaataaatcaaatgtatatttcatt

SEQ ID NO: 14086 - DNA, 15117 bp, Cannabis sativa
  modified_base (62)..(62): a, c, t, g, unknown or other
tcctgcaagtgtggttctacatattcctgccatacataagattaaatatatatatatatatnatatatatatatataatataacatttacggattctacaattggtgttgataggcattattttcaaccatgcaagtttaattagtgagatactcacagtgcaaggatcaagctcaatgaactcagcagtgtaaacttttctatggctctcccattcttcttttctttggctaattccagacgaggaaatatctattcacctcaacaaacaaagaaaaagaaagaagcacatctttatatcattaccttattccaataacccactagaaaaaaagaaaaacaataacaaaaattgataccaaacataattacgatagaaatgaagaaaattgtataagtaccaattccaatgtagtgaccaatttgagcttcgtcccacttctcagtgtctactccttctccacaatacaaatcacaaaccttggcgtagggatgaacaaaaatctttatcagagcagacttggcgaaatcgtacagacgatggtgagtcgactcgtttcggagactcaccggttgattcatctgagttgcttaagtcagtctgaaaagaaagaaattccaaaagaaacaacaatggcttcgttaaagagtgacaaaaactgttgggccctatggtaaacccggcccggcccaaattaacctgacgagcccgttgtaatttcaagttatgactggtaatagctatggttgacgacgtgagaagccgaagaaggaagaagagaaatgagtgcgaaggaggaggaggagacgttggtggaagctgcgctccaagttctcaacacggctgacccatttgaaaaggctcggcttggcgattcggttgcctctcgatggcttcaaggagagattactcgtccctaccatccaactctagaccccatcgtaccggatcgacccgccaggctctccgacgtaggcttttcttaatttactctaattctctctttcttttttatttattttacgcgtagttaatgggaatttgttctgtgggtataggttaagttggtgtctccaagccttatgccgaagcttgggaaagctgggagcttaccgagtagacaggccattgttcatagtcttacccatactgaaagctgggctattgacttgtcttgggtactctttctttctttcttttgtttttagtttcttgagcttcttttacactgtaaaaatggaaaacttgattgcagagttttattttttattttttgttgggttctctgaaactgaaagttaataagagcacacatgtaagacacttttgcatatgtttatgtcctgttacttgatttaaatagtatgaatttttaatgttagtgtttgtttggtaggatattattgcccgttttggtaagcaagaggcaatgccaagagagttcttcacggattttgttaaggtggctcaggatgaaggtcgccactttactcttcttgcagcaagactcaaggagctggggtcttattatggagctttaccagctcatgatggcctttgggactctgccacttccacttccaaggacctgctggctcgtctagcagttgagcattgcgtccatgaggtctgcttcactggaaacattcattctttttgtattttataaaaatatatcaatattcccctgaactcgcttacttagcttgagttcaaaattggagaccagttaatcctagaatctctagagaacatgaaacttgtagtttgtcatgaagagttcaacaccccttatcattgagaacaaatcacaaaataatgtcttaaggtcgtagtatcctttttttagtgtctcatgttatagtgtggagttacattgatttggatctaaaaagggttaataatgaaagctaaaattgtgacatatttgtagtacatgtcctatcctcgaggttagctttattgaaataccaagaaaagctagaatgaatagtttctttaagtagaaaatgtggataataacccactatggtcgaggagtaggcatatgtttcttaataatttgttcagctagcgtatagttgattcaacgcaagatttttcaagcaatgatatctgtgagaagtaacttgcaatctgaatgtgggcttgaaaatgatggaaaagtacttctatttggatctctctctggaggtgattgagctagattcatttgtgcactttgtacatgccccacacacacacatatataagtttaagaatgatggactcatttcaaatcggatgtattcttacatcttttactgacaatgattttctcatgctataagccttttcgaacattgttttcaacgatgaattattttgctttttgatgctttaatttatgagggctgtttttaactagtacatgaaaatgctacagaacctttatgcgtgaagattcgttaacagatgtacttttgaatattacttactgggatttgaacacaggcaagaggactcgatgttttaccaacaactatcagccgatttcgcaatggaggtgacaatgaaacagctgatctacttgagagcgtagtttatcctgaagaggttacccactgtgcagctggagtcaaatggttcaagtatctctgcctgaggtctccaactctttcacttccagatagtttggcatctcgagaaggcgaagttggaagtgaagcaatagaggagaatgaagaaataataaaaaagttccattctatagtcagatcatacttcaggggaccattgaagcctcctttcaatgaagaagccagaaaagctgctggctttggcccccaatggtatgaaccactggctttcaaagagagtcccctccaatgacccttttgtccgaatggtgatctttttgtagtttaataggggagttaaaatatttagttcttttgcttcaggtttcaaattcataaggaaattttgtgagcatttatatctagaatgaaattgtaattataagatgacaatggcaagttccaccattttttgccttgtgaactttcatagattgcttggaacaaaatattagggactcaaattatataatatgttagagtggaggctgctaataaaaacctcctaacaatgaatctatttttattccttcacaataattccagtaaaaaattagtgagaaactcattccaatcttctttttaatgacaaaactataatgaaactcattatgataacagtgactcatatttatggaaactcatattataataacacggcaaaaattattgataatgggaaataaacttatttattgatcagttttcctgtgcattttgggtacatcctctcttcttttgtttaaaaggaaaccgtgaaaaaagaattatacaaaaccttgcatcaatcaatcaatcagctttgttattcacagtttgaatttgatgcaccaagtgagttttaggaaaactgtttggcacaacaaatgcaaacgttgaagcccaggaaatttcaggaaaaaaaaaatgtgactctgcaactgttgagttggtttttgaagtaaactccgctaccgttattgctctcttgcaaattcaaactaaattgatgtgcttctctatgttcttacaaaagaagccgtctaatgtcgctgaagtttgaacttaaggctgagaggaatgcacctgaaaaatagataggagattcgtagttagaaagtaggcaaagactactaacaaagattgaaccgaaattatatgatgagctgatctagtcttagcttatctcctttttaacatctagtatgttcccaaatccactaaggtagctcaattttaaaactagattctgccagcttgagcatcagctttcctagccctacaatctttaagggtgttgaactccccgcgctatactctaactatgtgaaaaacagaagcccgaaatggcaaaccacaagccgcttaaccaatccccaaggggttaagacttatttcactgtatagtctaatattttgactgccaagtgcaatctgaacaagggaacatagattcactgtcaacaaacctagggttaggggctatgttgaaaatatgtttcgggtcacacactaaagggacttgaactacccatgaagggtagctcaaaatagtcattcacgaggcttgctccaacaaaatatgaggttcaatttcttcctgagcacataaatagcaattactataattttctggttctcaactaggctatggggaaaataatcccttcacactgcacttttcaagactacaactgcaaggtcatggtccataacgcagcttagtttacgaccaaaattgaaggttataagtgaatctaataatgctaacaacaaattggaactaatgaatctagcattatgtacctccaactttgccatcaaaaacacgatgatcagctgacaatgtcatattcattttggttacagctgctgctttctcaattcctaggtgaaagagagaaaagttacattagcgaaatcctttatgcctcaaatatttgaatgaaaataatgttaagcaaccatcttaccgtcactgtcaatgactggttctacaactttgttgcctctgcctacagcaaggataccagactgcacaagaagatggaagtgtacaccaacagcaatatctcataagttgacttaaatgaagaaataacaagggccggaagcatattatatactacaaaataaatttgtggagcgaacctgtggagggttaataatagcacaaaattggtccactggaaacattcccaagtttgaaatgctgcagaaacaagattcagagatttgtaattgttgcccttgccatgaacaaaagagttacaatgatatagccaacacaaattcacctgaaagtccccccttggaattcgtgtggcttaagctttcccattcgagccttttcagctagttccttgacctgagtccaaatgatgtaagctatcttgaatactgagcatagaatagaagccagaaaaacttatggtttgctaaaccctataattgctctactatctttgaattcctaaagctttcatacgacacatgcaagatcatttaggtcaatatcaaaaactcattgttttataatcttagttcatgttagctgtcttcagctcacaccgcagaaaaagaaagacagcaaaaggaacatgaaaattaatctgtggcaataaattattaatattactgaagacatacctctcgggagatggccgatattgttttttggtcagcattcctcactattggagtcatcaaaccctgtagcaatgtactgattatagtgtgattgatgctggagaagctctcaagtattaactaataatgctgacaaattaccttctcagtggccactgcaattgatatatcaacagaatcgcatagaatgacttcttctttctcagcattccagtaagctgccatgtataacaaaaatatattagacttggagaaatagtaataataatttacatacagtgctgataagtaattaccatttgcttctggtacatttcttaatgcaacagctacagctttaatcacaatatcattcactgatactttgacatcatgtttctctgaagttaagaaaaccaagaaaataaatgatccctgagctcaaagcatatgtcaataaaactaagaaacaatgagagttatggcgcatacctttaagatcctttctaagtgaaagaagaggatccagaataacatctgataaacaagttttaaacaagaatgttataggtggaataaccaacatcaacaaaagtacaagaccaaagtgtatacgaacctgatgataaatacaagtgtggtgtattttgttttgattccaacaatcttctagcaatcacctgcaaaaaataaaaatatatcgatcttacagtagcataatagtgaactgctactagtacagcataatatgataaagctattttgaagtaccatcaaacataaggttgtatattccaacatatgtcaatacacaaaacactactaaattctaatctggaatcataataactcaaagcaagaagacattaatctgtgtatggttaatttctgtaattactgtgtaagctgtatttagatatttattaacatattgagatgtgtgttgcaatgacaaaagcttgtagaaaagatactagctccatcctgaacttgatctaaaatcttattaatcattattatactagttatcttgcttttcttttcccggaactttgcctgcataatctgagatcctattctggtgtcattatggtaaattatcattgttattttttaatttgggatagatggatggaacctccaatttgaaaagtaaaaaaattcttattagcatttaaataactctagtataaattttaactcatcccacgattaatccatcctgttgttttccatctccggtattttctttttataaagtagctgacaatagacccatactaatttgtaattaggttgaaatgtttacgctttccattgtctactttagaatgttgccaaaataataatggcagcaataacaaataaatacgagtatcataagagcctgcccaatgacatgaagcctaccttgcgaacttgactgttagggaaatcttcaaatgaatctggcttctcagaggaagatcttgactttggtggtggtgcctgagtagttcgatctttatgaatttgaggggacaatggtgtcttttcttttgacgaagaagctttataagatcctactcctgatttgattgccgccatcacatcgcctttcaataacgtaccatgagaacccgatgcctccaatactgaaatgtccaacccatgttccgtgattaacaactttgcagacggactaactcttttaacagaggtttttggtgcactagtttctttcctaacatcacgatgaattggcttatcctcttttacagatgaaccactgcttacagaattttttacagtttccaaatcggccagttcctcaacctgaccaaagaaccaatagtttagttttcatgtggcttgcattagacagttctaataaatgtctctgacaatgagtaaagttcaacagttccgccattttacaatttagtatgatatttagctgtaagttggcctaaacagacgattgatgtatcaacttaatgtgatttatgatattttctttttaacaatactctttctaaaaagtaaccagatcaaacatttatacaattgttatcaagtattaacttactgttactgcaattggttgccccacaagcacatcttttgaaccttcgggcgctagtattttagccaagtacctaaacgcacatttcatccaaagttttagatgatattcctctcaaaagtagacaattaaaaaaaaaattggctcacaaaacacacctaagaaattatattaatgcaattagactcttaagggtgaaaaaagaaggttgcattgcaatgccaggcaaccaacagggtgaaaaaaaaatatatgaaaaaagatttgcatgttttaaaaagctcactgggggaataaaatattactagtaataagggaagcttgaaacaacagttttaccatcaaagcaaatgattatttgttaattagaaactcccttcatagatatttttcacaatgaatgaaaaatcataatctagactatataaaagctgtggtgaatatactaacataattaatagaaacttaaatttatgtgctgctcaacaaagaaaactagcagaaggaaagaacattacccttcttcaagactttcaaattcaacggttgctttatcagtttctatctcacatagcacatcacccacttcaatctgtttgattatgtaatcaagaataagaaaattacataaatgtttaccggttgctttgtccagatgtaaaaattatttcaagagtaggctaacagaacacatcacattatgaccaactaaccttgtctccttctttctttctccatgtagtaatattcccttggttctgtaggaatagataattgcctttagtgccagaagaacaacaatttaaaatgaaacaaaacacaaactttaattaattgtcaccattgttggggatagagctggcatttcaagaagaatatgtggaggaagatcagaagtatttatcttcacagaacttgtttcttgcgccttgttctcattcttgacatcctgattagatgatatctcccttttaatctcaggtcctcctgctacagatgcagggatgttttgtatatcatcttggtcttcaaccttggaaatgcacataaacgtttaccaaaatcaaattactgtagtaacagtaacgtttttgaccatacagaaagaattgattataaactaatcaaataagaagtgagtaaaaaataagagaatagaagagacaggagttgaccaaaaatacatagaaataaaagtgaagtataacaaaaatatgtaggaaagagaactactcacagttagcaagatatataaatataaattcagggtatgtttggtacaccataaagtgtgttgatatggtagatgttgtaaaacttatattccaaaaaaagagtgtatggcggagtaatagattccaaactaaactttttctctgttcaaatttttgattctccttatgaatttgacttggaactctcctaacaggaaacaatacccctctaataaattctctctattacaaactcaaagttaactcattcaaggatgcctgtcaagccataaccaaaaccagctaggttataaaatacaaacagttgattaacccaattcccaatgtcccttctcacaaacttggcacacattcttggccttttccattttccactctgcataagtaaggtatggtggaggcatatcaatcttattatcaccctctcctcattctttcactctttaatttctctcattcttgctctcttcaatttcatcttctttattctcttttgaattttcctctctttattttctactgaattttctcccgcatctataaatctccactttctctctcatcatttacttttcaaattgtctttctttcacttattccttattgttattctctattaaaacatgaggcagttagggtttgtaaatgattgttggcaaaactttacaataaataagaagctataccacttctaacattatttatccatgtcttgcaacacatttataaccaaacacagtaaaatacggtgaacaaaatacggccttggtgaaaaatcagaaaaaaggtctatcataatataaatacaaacatcaatgaggattatacactaccgttattgcaataggttgtcccacaggtacatcttttgaaccttctggtaccagtatcttagcaagaaacctgttgaatcatccagatacaaaagcaaaaatgattaaaggatcatacatttgtatcgccccatagttaaagtatcatgactgttattaattacattacccttcttcttgactttcaaactcaagagtagctttgtcagtttcgatttcacatagtacatcacccacttcaatctgttatatcaagaacaataataagggagacagataatactgataagataagcgtaacagagttgcatagatatttggcattggcattgcattttgtaactcaattttgtacctttctgttacacaaattcaccttctcttctctgaatatagagtcgggcagttttctgttgcttttcaggaaaatgcttgtttctccatactaataatactcgtagggttcttttgtttcaaaaaagataggtataaaatagttgttttattctagtcgcagaagctaatgtgttcttatatttatgtaaagttttgctaaaacgaaaaacaaaggcacatagctctactagtgtatagacttaaagggaataagtaactaaccttatctccttctttcttcctccactttgctatgttaccttgatcctacaaaatagcaacaagtaggcatctatgttcattggagacaaagaaggaaattgaaaagatgtcctatgaaatttctccaaccacatgcttaccattgtaggagacaaagcaggcatcccaagcacttgatgtgaaggatctgcatcagcaattaactttctaataaaaattggagcagaaaattatgtacaacaagcatgacctattacaatgatgatattcaataagtagttacattaaaaatcaagggtggcaatgatagataaagatgtaactttaagacacaaagccacgaatcacaaagataaagcttaactaaatatatacataatacacaaataaaatcatacctgtagttgagaagtgcttgacaccaatccattgctgaaatttaaaataggattagaggagaaactagtattccagtatgcttaaccaatataatgtgatgtactaaccttgtgaacaaaagatacaccctgaactctgccaagtgtgaacaatgatgtgggcctgatcaaatcttatatgagtaagcttgtggaaaaggtaagaaaaaaagagagaaagatacaaaaagaaatctatactagtctaaactaattcattaaaaaaactcaagcaaggcctaaaatggttagtatagagaagtttgtattgtaaacatgcacttacatgttaattaaaaagtagaggaaactaaaaaattgagatgaacaaataattgcttttgcttgtagttatagtgaaagatcaaccacaagcttaaaccaaacatgaataagagctgctatatctgtttgaaaaagttaagttggttataagaatgatttccccaagatgtagtttactagttcagttcaactttcaaaaaactttcaacaccattaatcatatcaaaataattatgtagggataaaacaatgcagaaaatatatatttttaaaaaaatagattacaaaacttattattagaaaaactaatttgtaaaaagtaaattgctagcaaaataatttttcaagaattccaaggacggtgaatgcacaggttatggaagcagccaaaaaagcataatctgattttttaacaatggacaaatagaatgatgataatgagaaaaataaataaataaataaaaacctctgtaaagtgttctgatcacccacaatagaatttagctcactgcaacttctgcaacagaaaacatgaaaagtgaaaagttaataatgtgtattcaacaatcattggtcaaacaaagtcaagtccagttatccagaaaaatattgtcagcctgagtaaataaattgaaatttgaaacaactatatatttattaaaatgttgaattttcaagttaaatctcagtgagatcaagatgacacatgtattccatgttaaaaacatggattgcggcagaaagatcattacgcattagggatacaataacaataaaacacaactgaagtttactataacagcataattacatgaactgtacttcaaggacacatattagtacttatgttttctcctgaaagctaatgtaccctaaattttattccaacattacaaaactgtgaaatttctagattttgtgaattggagaagtaggatatcaagaaaatataatatacagttaaatggttgaattgaataagtctccaaaaaagttgaaaacaatacgattaccagcatcttgaatttaggccatttatcactagaaatgtacgtacaaggaaatttgtaagagactgcattctggaatttaatcaataaattcttgcccaaagggttctacattctcagtatctaaaggaaactactccactgaaacatttacaagggatcatatcattggaacaactaaattctctattttatgaaccgaaacacacatttcaatactaatgaatacacaatggccgcataagagaattacaattgcaatcataacaaaaactcctctagccacagctataaagctgataaaaattagccatttttgggactccccaaaaagacaaatctgaaaacactaaaccttccattaccaactcgatcaaatccaacaattgccttaaacaactataacaacaatcaacactgccagccaggactgatcatagattctaaaaaccaaatcaatttcttttcgagtcatttgttccaattaaaccaaatgatctgttcgaattcgcatttagcagcgtaaaaaagtatttatagagagaaagagaaagtaccgagcgaaggatctggaggatgaagatgagaggagacgagctcgtaacagagcaggagtccgcgagattacgggctgtcgaagccgcgaaagcaccattattatttgttgggggttcagatgaagaaaagagaagaaatgaaggtttattagtcagctatggttttttgtttattattaattattattttattttttattttttttttcttaaaataaaatcaaaaatcacagttcaaaattttcaatttttcactttcctttttttttaatttgtggaagatgattatgggttgccagctttgactttatgaagaatgtcttcgctttgccctaaaacggcaccgtattgaaccattggaagagtcacaagtcacaacaacaagtcacaccaaaacactcacttgacctgacctcatgggccagtggcccttccccacctacctactttcctttcgtcgccaaacctcgcatatgtgcacttttggtactttcataagccaaattccctcgagagacagattggagaaaagggcattctgtggcgttgcagaattctctggaatcatccattttccttctagaaatattttctatatataaattagagaaaaagaataaataaagcgcaggtattacgatggatcatcgaaccgaagccgaactgactcatatggagatggagacggagacggcggttcagccagatgaggtggtagccaacgcgaccaccagtagcagcaaccatggtaaccccgtttgggatttgcttacattagctcgacatcttatcaaccaggggaagccttctcaagctctccaagcagtggtaatggcaatgagatctgaaggtggggatgaggctgtatttcggtcgttgcatcgtgcgcgtgagttataccaaagtagattgagagataacgcggctgctgatcagctagcttcgttgttcgctgaatgtgcaatagccgaagcccagccattaaaggccgagctagttagacctaattattacgagggggaatcgttggttgtgggcgccgatgatggtggtggtggaacctctatactggccgaatcgggaaggatgcagattgtgttggatgcattctcggatgggagtagctttatctgtttacaatgcggaggccttgttagcaacaaccgcagagatgagcactatgcatattggtgctgccaaatttgaatcctttcttcttttatatctgactaaatcaagaaaatcctttcttgattttcagttcatttgatgttaaaattcatgggctattttaaccctcatatttagtcattactgaagggattaattatgattgaaagaggagccattggtggactggttgagttgagacagagagggaccgaggttggggttgggtttctagtattaatggtattggatgataatgtttgataactatttttgttttgaagataagaatatcttataaatttcagtctgagaattttccaatttcaacaatatatagtatctatcttatacgggtaggaggtaatatagtgttatgattgctaggcaatgtaattatatggctcataacattgtcaaatgggcaagagtgctgggcaaccaaggctctattcctttgctaaatgattatctggagtgacaataatcttgatgttggttaattcagactgacttcctttctatttctttgttctgtttttaatttagagtgtgttgtactctgtttctgtttgttttgtttgttagttgattcctttgtttttgttgaactttgtttcttgccagttttgctctctttgtaatcgtttgatacaaattaaatagcatgattcaggagtgtcaaattttattgaaatttttatataaaattacctaaaattacttttttatatatatttgatttagtactataaaaccaatacaatcatcaaaggtgatgcttgacggttatctttttctcgaacatcaagagaacatgtatgtaaattttgaaatgtagtcacctcaaacatgttagaaagtacattcttcttcgctcgctcttaatctccactcactcacaatatggatccttacatgtaatataccaacaacagtagtacctaacttcctaataaataatcgaatcatttcttcattgcatacaagccaacaactatcttcaaatgctctttgtctctgaaaaactttcctagatgtaactcatcatctagtgtgtcactcataaatgtataatgacgattatccttgatgtcttctcttataaaaaaatttctccttgaatttatcataacttgtcgaagaagaaaatggatcactaaattcagtaccagttgtccctcttgcatcactagaacctctaccatcagtggtccctctagcatcactagggcctctagcatcagtggctcctctagtattactggttccatctggacgactactagtagtaccaggtgattggtgatcattccacggggtcctcttttatgtgttggttgcatgggtatttggtacgatattagagtcaggttcaaagttataacagcagagacatttgtatcctggtcgtctcttatgtcatcattgctttcaaaattccatttagagtttatatcatcactaaaatcatcatgaaaaggtatttgtgctacaatgtcagctgtcggcatcatagtatttaattcaagtaacacatcagtcgccaataccttcggattgtttctataacgaaagtctcaacctcactatgagtatcctgaaaagtacttggtgtgggactaggatcgatgcaagcatttttcttcaccaaagtcataaataagggagtaaattcatc

SEQ ID NO: 14087 - DNA, 8280 bp, Cannabis sativa
  modified_base (7353)..(7362): a, c, t, g, unknown or other
  modified_base (8156)..(8162): a, c, t, g, unknown or other
tcttcttctgagttagggtttttttttttatttatttttttttttttggtatttaatttggtaccttgttatattgctgagtgattgattgtacgcaggaaatttctttgtgccatttcttttcaattcaacttcataagctttggaaagtgtacgttgagttgatcagatgggttatatcaacaatgtattctcctagacacccttcaaagcattgagttattaaaaattagttcggccggagttaatattgtttcttattatcgtccttgttttgtattgcagggttttgaagataataatcagcaaactgatattggtatgagctcattaatcgtttattgtttaaattcaatattttgcaaaagataccaaaaaaagacaatcgtttatcttcatttgattgattcttttggaagtttagtacacacaaacaagataaggagacaaaagctcgaaagtataatttgggttgaataccaacaatgtagattgaataaggggcttgaaataaaggggcaaggaccttaaatggagtaatgtttgaatttttctagatggtagccaagttaaagaagtctcggttttaaaggatgatgtagggtattattataatacttttacatgagtaatgtttttgggttccttgtatgcaggtgccttggttcgcagtggaagagaggtactttttcaggtaattttgactatctcaatctatgttaattgcttcacagagcatgtaaatattgccaagttatgtgtagggctgatgttaataagtgatgaataatctaaattataattggagtgtagtgcagtgtatagaatggatttagtaatatgttcatctccactctttattagttatttttgatacactagcaagctttgaaattatgaagcttatgatttgagtcatttgaccattgatgacccatacaggcattcaattgggagtctcataagcatgattggtggaaaaatttagaaagaaaagttcctgatattgcaaaatctggatttacgtcagcatggttaccaccagcaactcattcgttctcccctgaaggtatatagcaaccaacacatgtgacctttatactgtgctctcagcagatatttgacttggctttaatgtatgtttaaaataggctatcttccacagaacatttactctgtcaattcatcatatggttctgagcatctactaaaagctctgcttcaaaaaatgaaacagcataaagttagggctatggctgacatagttatcaatcatcgtgttggtactacccagggacatggtggaatgtataaccgttatgatggaattccagtgtcatgggatgagcgtgcagttacatcttgtactggtggattggtaatactaataaggtttcatgcagtaaaattacttcactgtgcatgatttacataattgatttttcttaaaactttcatattttttcacattaaagggtaatcggagtactggggacaacttccatggtgttccaaacattgatcacagccaggattttgttcgaaaggatgttacagcatggcttcggtggctgcggcataatgttggctttcaggattttcgttttgactttgcaagagggtaagattatgtaaggatacgaggtattatattggtttaatcatgcttgtctgcttctgaaattttcttatttgtaacaattagttattctgcaaagtatgtcaaagagtacatagagggagcaaagccactattttctgttggggaatattgggattcttgcaactacaatggtcattccttggactacaaccaaggtaaaatacatattttcaaaattgatggcattaagcatgtagtcatagtttaatatcttttgcgttaatataatgttttggcttccatcacctgtagatagccatcggcagcgtattgtgaattggattgatggaacaggacagctttcaactgcatttgacttcacaactaagggaattcttcaggtaaattccaaatgaacatgatctgagaatttttactgttatatcaattaccgataaagaaaatctttcaatttcatacaaaatgttaagagaaactctggtggtacatctatagaaaagatcaacatggcttggtgtttatagatatgttttaaatggctatatgagagatgtatcttcatttctctgttatgatgcctcctctcaacatgttactatcagactttttgaagacaatgatctccttgtcttgctcgaggagcataccaatgatataagttcatttatgaaaagaatgacagctttgatcaatcacttctttgagtttgttttttcattttttaaggatgtatattttcatgttctattcaggaagctgtgaaaggacaattctggcgtctacgtgatcggcagggaaagccaccaggtctgatgggatggtggccatcaagggctgttacatttttagataaccatgatacaggctcaacgcaggtattaaacctcaactgagattaatttttaaacaataaaaatataacgcttttggatcagtcccttccacatgattgggtagtttctttttcccaactgagtatgaaaaacttgcaaaggcacaaaaattgtgtgttgggctcataactgagtgtattaaacaagtcaagggttcgtgtttaaggggagcacttttattggctccactaaattcagctatggcatatataactctattacagaaataatcattgcaggcttatttgcctgatattaatcgcggtggtcatgttcatttcttttatgtttagtttgatggatcattattactgaaattagaattagaaatagaaggaagtgctcactttttgtcacttcttatcttgcaggctcattggcccttccctagtaatcatataatggaggtatgtatacataatacatgttgcttgtaacttgttatgcacatgatttgcgattcctagaattcatattatttaatcctttttgtcaacatattaatgtgaacttcatagtttcttaacataattgtaatttatctaaaatgacgacgctcttcctctctatatgatggtgttggtttactgtattttcttgctctatatgagttaggaatacaacttaaaccagaacaataatttatggtgtttgtttcgtttactgtattttcttgctctatatgagttaggaatccagactgagtaaatagtaaaataacagcaaaaatcagttgaactcaatgattgagtctttgtatcgcactgaacttaagttttctatgctatactgctcaacttgttacacaatatgtgagctttaataaagacatgaacaatatctttcttaagtctatatttataatgctttccacagggttacgcatacatactcacgcacccaggaataccaaccgttttctatgaccatttttacgattggggaagctctattcatgatcaaattgtgaagctggtaggacactagtttttgttttgatagtgtaccaagtaaattattcatgctttggtgaaactttatgttttatttctactccacagattgaaattcgaaagcgtcaggacattcacagccgatcatccattagaatcctggaagctcagcctaacctctattctgcagtaattggtgagaatgtttgtatgaagattggggagggctcttggtgccctgctggaagggagtggacactagcaacttctggcaataaatatgcagtgtggcaaaagtgaacttagctatagcataattaaaatggagctttaggattatccaataagcatagctatactatattagagaagagttgatcgagggttgtataacctaagctggagctttctgttttgctgttgtattattatgtgggattattggtttattcaaattaaggtgaaacctagctgatcgtagaatatgacagaaacatcaaatatatatatatatattatataacacaagaagacaaagtaattgctgtaaatcatgaaacacaaagaaatcatcatagaattctacatattataaagatggtaaagttaggtcgtatggaaactatgatttccggacatattcactcaagttcccaagataagatcgctatcgtgggaaagacacgacaataagacatggcatgagatccactttattatacacagatgtatttatataatttatatatatatgtggtgaattttaaggaaaaattgaatagtttataatgttaaaaactcagtttaaacacaaataattattttaattaaattttcagtactggttcatatcgtctaggattgtatattttgcaaaatttacatatcgaactcttctctttattttgttaaatgataaattaaattttttatattttaaatttaatttttattatttttttaatataactaaaattgaagttagttttaagtgtactgttaaatgatctgaattgtccattaatacaacaaggtttaaagtattagcgggatatatatatgtataaatgaattatacatgtatgctatggacttaattttgaattatatgtgaatttcttgaatatatagatatgtataattgttgttggtgacaacaaataatggatctcacttgtgacatgcataaacgtacattatatatatttacttgtctaaaaagaaaataagggagatttgtcactactcatcaaccaaaaatgagatatgagagagagagaatcagatgacagtgtgggaggtgaaaagagacctaccccacatcaacatcaatagacatcgtcatcgacctcatcattcttgttttgaaactcaaaacacattcgtagtcctccccaccacattaattttaactttcctaatattaacctttccttccttccttccaccaaacaacaatatacaataacccttttctctctctctctctctctctcaaagatgacacacacattatcacgtggcatacacaaggtgtcagcattattatcatttttcgatatgaaaataataaacacagcctttcatattccatatattttcaaatcattaattatcatcatatatcccttatttttccatatatatcagtagagagatcacgtgttacctagctgtagagaatcaaagaaatacatatatttatatatacaaaatacatgtatattttacatggataatgattagtaacaattatatacaaatatatattacgtacttgcttaacatcccaaatatatatatattaattatgtataaactagttaatactatcctttatataacatacatacataataaaacaaagtattgtttacctaatttaatttcttaaaacactatgataatgcaaatcaaacccaaataataagtaaaccctactgtcatattatataatattagggagtgactagttaatgggaagggttgtttgttgtatagtctttagctgcaccaactagcatgattggtgctcctttatccaaaaaaaaaagttaaaaacgcaataatattaagtgaagtttgaagccttattacgtgagggtagagcagacccacttgaaccccaataccaatagctcacaatcatgaaaaagagtggattccatgcatcgagctttgcaatttctaggtcatgcctcttctaggctttgccctctgtttaatgctattttaccttttcaaaatcacacccacacctctactggtcaacctaaaccctatttatatatttatctttcctcttaacctgtattgacctaattattattactattataataatgatttgtacattatatatcaacatatattgataaattcgtaccctatacaattgacctttatttcaaaatgcaagcactgtaattttcaaacatacattaaaaataataaaataattaatatttttttcctaaactttttataaattaactcttctaaataacttttatattaatttaatccttaattctattatattttttttttgggtaaaatgagcgatataatggattaaaactgataaatacatttaaattatggattttttatttttatacattaaaataatattttttgcatttttataaaatttcacataaaaaatttcacagcaactaacggaacaacctaaatcgcaacaaaaattcacatagtaacccacataaaaattaccggagtaacccaaaccgtaaattaaaaatatatatatatagagtaattttcttttaaattatagtatatcttagagagcaataatacaaaaacaatttaaaaacaaaaatactaattattcaaaataattaaaaaaaaaaattgtccccaccatagcaccatccttgtatatatctatatattctgaaaagcttttacaaaaagaaaataaatgaagagaagaaaggatataaaaaaagttgatacagagttgcatagagagagggaacaatcaaacaaagggcatagacttttttcaaagccttagatttattagacatttaaacaaaaagaataatgaaaaagcttctcatgtcaaacgtaactttattaattttgcatgttagactttattatatatgtttgaattagattatagttttttcacctttgtgcagacctttttttatgttatcagaagcattagaatggcatgaggtcaaatatatatatatatatacgagcttatagtatatataaatatgtaattatgtgttgtttaaaaaagtcatattaattcacgtatgttaaaacggtgtttgatatgattgctctcagtactgtaattatttgtagcactagctataactcatattaggagcacgcttttaccatattaatcaaatcttttattttactattaattttcactcaaaaaccttaaaaaggaaaaggaagaataaaataactagtttatacatgtagttacattacatataataataggatcctttaaaaataatcattcaataaaagtccaaattttaaaataaaaaaaaaaataccctatatactattttttattttttattttttttaaatttacggtttagattgttccgataatttctatgtgggttgttatataaattttgattgtgatttaagttgttttgttagttgctataaaatttttaagtgaatttttgtaaaaatacaatttttttattattatttttatatttcaaaacagttttttttgtacttttataaaattctgcataaaaactcctattacatctaacggaacaatttaaatcgcaaccgaaaatcgtataacaacccacatagaaactaacagaaaaacactttagaaactcaaaccgtnnnnnnnnnnaaaaaaaattaaaaaaatataaagtaattttctaaaaaaatattattttaaaatgtaaaaataaaaaaattaataaaatttgagtgatcccttcacgatgagggaggaaagcaacactttaacaaataactatcaagaataatatgaggggacaaataacaacgcttgaaaaaagatccagatgattataactttttatttatatatattgagaagttttaatagttaagcaaatatgtaatgatagttatatttattttagccgttagatatataattattagacagttgtaataaatttaaaaatttattaaaagtaattaataaattacttataacttgatattaacttgattttatttattttcttaaaataaaaaaatatatattataaatattaatttctaaaagaattttattaaatattttaattaaaaaaattgatttattttagaagttattacataaaaaatataaattgacactttatttataaaaatacctccataaggtaaagacaacatttatactttttatatgattttaattactaaaataccacttacactatcaattacacaatcagacgatggttgcagggtagttgctgcgtggttgcgcagtggttgcatcagacgaaggtttcaatcagacgatagttccagggtagttgctaggtagttggccgaaggtttcaatcagactaaagtttctgagtggttgctgggtggttggtcgaaggttgcatcaaacgaaagtttcaatcagctacgaaataactgttagcaaaatgnnnnnnnaactgtaatgcaactattgtgaaacattaaaaatcagaatagtgtttctacgtatgtataactctatctacaatgtctctttatgatttaatatgaacaaattcaccattagaaattt

SEQ ID NO: 14088 - DNA, 7691 bp, Cannabis sativa
attaatttagttaaattgtttattaaacacatgaatatgataattttttgtaaaaagttatgtaaaaatattaatatatttaatctaaaaattctacagtgtaccttattaaaagggatatacgaatgcactcctctctttttttgtattcaaaatgatctttagtcaattttttttcatggtcatgtatattataattttttaagacatcttacaaagttttaagaaatttagaattatttaacacaccgaaaatagggttcaaacagtgtgttgcacacgtgactattttattttatacgcgcgtgaaataaattgcttgaacactgctttatattgtaaattattctgaatttgtcaaaattttgtaggatattttaaataactatagcatacacgaaaatataaaaaaaataaaaaaaaattggagattaaattttttttctagataccgaaacatgtgaatggttaaagagatgcattgtaaaaacaccctatttaatccatgatattaagattgaaggtaatgtttagaacccagcttttcgaaagtatttaaaattatcccataaaaagttaatcttattttcatagtaataatattcctattcataaaataaaaaaaaaaatccaataccaaacatggaaatgtaaaatattactattcctactaaaacataaccttaaacaccccatattgttttcaattttaagtcaataggtttaatccttaccaaggattagggatttgtagaatcacgctaccaaacaagtcccaaaaccagatacgtcgacgttttatcacatttccttacttgctactctatccctttcggagttgggtcttccagtttggccggaaaacgttttcccaatcaaatcaccaatttccttgttctcttcttctcttactctctctctactttcaattatacatggaaatggattccctacccaatggtaacagcgccgtttcaaatccaaattcagcacctgatcccaccgcctcagctcctccgtcctcgaagctcaatcattttgccgattccgtgaagttggagcaccagtttctcagagttccattcgagcactacaagaaaacgattcgaaccaaccaccgcgtcttcgagaaagaggtatccgccgtcatctccggcgtcgctgaagccgctgaccgaaacgacatgtcgcgtgacgaggctgtcagtcatctgagctcgcttgtgtcaagactgcaagggcttaaacggaaggtaatggaagctagaagtcttaggtttgaatttgattgtagtctgatcatcttcatcatcttgtttggatttagatttagttaatggccaagaaaatgagaattttcagttaggtaaaataaattagtttaaaggtaagagttttctgtctgtttataaaaaagatgatggattgggtgagttcgagaatgatcaaattattatactttgtcgatctgatctaattggagaactaatgaagagtagttgtgtttagcttcaagaaatttgaagctggaaattgttgtaggtgtttatttgcaattgaattttgcttctttatggaaagaaaaataatattggatttacgttttcacctctagttggaagaggggagtcgagtggaacatttacaggcacagaggtgccgagctcgactcaatcatttagagttggcggatgctgagaatatgtttgaatggaacaacatgaaggtgaagcgcattcttgtggactacatgttgcgtatgtcatactatgacactgcattgaagttggcagaaagcagcaatatgcaggtactacttgtttaccacagatgtattcaatgatctctatttatggtttgtttggagttctttgaaaagtttgttgtcagttcttcatccaaattctaaagacacattccatgtttcactcaaactcctatgctattaaatcaaaacaaagttgaaagtgctcagcattttggtttggctgtcacctttttctttgcatgacgaattaactttgaatgcagtgggatagtcatggaactctcatatatgtgaagttttttatgaatagaaaaatactgtttttgttaacttttcatcattttgagtactttgatatcaattcatgtgttaggatctggttgatattgaagtattccaagaagcaaagaaggttattgatgctcttcaaaataaagaggtaactcctgcactagtgtggtgtgcggaaaacaagtcaaggttgaagaaatttaaggtatatacactttcccatggcttttctgcaagtgtgacggagctaatatacagacatcctgcattacatcaaattaaccacatgctccagtgaggacaatttaatttcttctaaactacttaatatagctgatgtagcaactagtcagatcagatgaaaaggatcgggtaatgggaaaggggtatggtttgctggaaatatcctgagttgtttttgtgtgcttccccacggagagactttctaactcattaagctaaatatggcttattctttatttctttcatctgattattaaaaaataaaaacctagatgatcactattattcgcatagtttgtgttacatttaagaaagctatatatgtgttttgtgtgagtatacttcaaaattgtgagatattatggtgcaaataattttaaacaacatgtatataggcagaggttatgcatatacgaaaatattacattacatcagattaaatacttgtttgagcttgaaaattttatttctgccaagtactccaaatatagctggtgtagcaagatgaaaaggattgagtaacattatataattatctgctttaggcattgtcaatctttactcgctatgctctatgttaagcattattttttagagttagatatttatatgttctagtattttgtgttgttgtatgagtgttttatcatagcagaaacaacagacatagtaactctttaagctaatgtttcattctttctataatatgatattccagaactccacaatgattagtagttatatgcttatattccatttttaccttttcaacaagctatatgtgctgttgcatccctaatgttcataacttttggagtagaagtgaaattttaaggtgcaaataattcaaaactgaagtatttgaatacgtaacaatgtgaatcattctgaataatatgttctgttgctgtaccagataaaatgaaactcttggaatttactgctggtaaaggtttcttaataaacatttaactatgaaactataaactggttccttaactaaaattaaaccaaaatagaattcctagcttaacctaataagatttgggctagtgtcacgagtaaattgtactgcttttctaatgccaagtacttgtattgacttctttaatagcagagcaaattcgaatttcagttgagacttcaagagtttatagagttggtacgagctgaaaataaccttcgagctattacatatgctcggaagtaccttgcaccatggggatcttcccatatgaaagaattgcagcgggtatttgtcacactagcatataagagtactactgaatgttctacatacaaggtgacctttttgcttggtctaaaatatgttttttactctttagttcaaatagttggctgctttttttgtttgtttgtttgttggttatttagcagcattagttttctttccaagtgaacttctctacttgattttggtggacagatggaagaacatagaaacatttgttttttgttcctttcaaaaaattatttccttcccttcccttgcccctctaaaaggcccttaaaattaaatgggcaaccttgtttgcaccactggtgttaaatgatagtcaagttcaattccaaattacaatatagatgtgtaagaggttttttttttaatcttaggaggatttgtcttgattcatgttgttgcttgttatagtagtttgtttggtattagttagactcttgtaaattgattgtgtattatcttacaggctatttagcattttaaaaaatcttgttacagaagctcaacttaatttatataactagtaatgtacaatgacttgggtgcatagatgaatctttgatctgtaagttacttttttactgtatttttgttccattctgcaagctgattttcatgtcctccaggttttatttgaaccaaagcaatgggattaccttgtggaccaattcaaacaggagttctgtaaattatatggcatgactcttgagcctttgctaaatatatatttacaagcaggcttgtctgctctgaaaaccccgtatccacttacatgtaatggtttatcaattgatcttaggatattttctttgccaattgatctttatgccagcatactagaaatgcagaaaaaaatccgaaagctatggtcctgtgttttttcttttgtgtgtacactgtccaggtgttatgggttaccgcttgctgaatccaatcgtgctattttaccttgacctgacgtagatactgttacgaagatgattgtaccaaggaagaccccttgtcgcaggagaattttcgaaaactagctctttcattaccatactcaaaacaacatcactcaaagcttgtatgctacataactaaagaactaatggacacagagaacccaccacaagtcttgcctaatggctacgtctacagtactaaggttcagaataaacaaatgttagatgtattttatatcctaatttactttttaggtctttaacattatttttgcttggcaggcccttgaagacatggctaagaagaataatggaaaaattacttgtcccaggactggttacatctgcaacttcaaagatctggtaaaggcgtacatatcatgatccaatatctgatctgcccttttgcacttgacattaattaatagcaattggagtactatgtgctttgtggataaattcttttgttgttggaaattatagaaacccgcagtctaaggagtttcctggggacaactagtcttgccatgcctttgattatattgtctcgaagacttattgtatatattctgatgattattgctcaagtattacccgtttgtctatgtattgtcaattgtacttttgtgcatattttgcaactttcagaaataaactgatgtcattttatattttcactaaattaacttatgtcgaatgggcatccattggttattaaataatagcttactgagcaactacaacagtacactattctaccaaattggggtacgaaattttcataccatttcacttttaaaataaagtaggagactaaatttaacaccattaataatattgaattttgaattttgaatttatatttaattagtgcataatttatttttttatcattctaactcttcaattaatttatttataagtaattataaactaattgttgacaatttttttttgtcaaaaaaattgttattatatcataaattaatattgactattaatgtaaataataataattttttgaatagagcgttgtttgcctttcatatttgttctgtggtagagtcggtttttttttttcattttaaatgttttgttgtctttctttttctctccattcttttctgtaactgttcacgatctattctcttcaccttcatctttcctttcttctactggaatatttgtgttatgttatctctggtttgctcttagtttaattatggattccttattgattgatgtgtcgttcgctcttattgaacgagaaagggaagtgactaatctttctaatatggttcttcctcgctcgcgtccttctcactgattgctttgtagagtcttctcaaagcatggttatattccaatacaattgaagaattttattactagagattgggaaggaagatttgcaattgatatctcaaattatgaaactgatactctcttggttaccttcggttgtgaagttgacttaaagagagtattgtctaaagaaccttagcatttccataaccagcacctaattatatgtctttcaagtgttctgcaaaatgttattactcttttttgggttcaaatctattgcatgccttttcttagtaaatatgaggcccttgcttaggcgattggcgatctgcttggaaattttattgaagtacatgaagactctttgaatgaaggttgggggtccttttctaagggtgcgtgtggggaatgatgtttctcaaccacttctctagggtcaaatgatccaacttccttggcttggtgatgaactttggattgattatggttatgagtggttaccaaatttttgttatgaatatggtgtgattggtcatgtttttgacaagtgcattctctttttagagagacttgatgaaggtattgagccatccctcccttacggtccttggatggagggtgctacattgcgaaaatctaattatgattgttataggcaagacttctcaaaggcagggccttagccatccattaccaggtttgtttgaaattctatctctccatttctttcacacctgagacagttacatgttcttcctccttcagttactccacattgaaagggtaaagccatatcagtctcttctcaaacagttaatattttatcttcatcaattgtttctccacgaattgcctccagttctcataatttattgccttctgatggttctatcaaggacaaatgggttacttcttttgatggtgaatctctcactatggttgctactgatacttcaaatttaatgagcactaaacatatcaacttgactacttctcctactattataaacactcatgctttggtttcaactaccaattctggtgttgcatcttcaggatcattacatcctcctagtttttgtcatgttcaatcattagtattgtcggtccctacgcctcctgcatatctgcatgtgacacaaccaagtgccatctattcctctacagtttcgttatctactacatctccaatcacaacaacatctacagctatcaccacaacatcaactaatagtaatgctaattccaatttcaattttcatcttagaatggatgatccacaagaaaatagaatgtcctctttgttcactaaaagatagttagtttcttcaggtggtaatgttcggcatgtgttaaagcggtgtcgtactagagacattcctttgactgattcgaccaacactactacacaccaacacgttgaaaccatctctgaattgtctaaactttcactggtggaggaacgttgtggtgtttctttggcgcaggctgatgagcagtcttgccattctccatgattatcgtaagtttgaatgcttggggcttgggaagccccagagtatttcgttaactttgtttgctcatttcacaatatgatcctgatgttctttttattatggaaactaaacttagtatatgctctatttctaaatgtcactttgtttttaattttcctaatggacttgaagtcccacatgttggtttaggaggtggcttaatgttgatgtggaagcctactgtcaatgtaactattttacattatggaataaaatttgttgatggttacatctcgtatttagatggtctaaattggcatttttctgctttttatggtgcttaagctgtgtcacaaaggattctgatttgagaactc

SEQ ID NO: 14089 - DNA, 4191 bp, Cannabis sativa
ggagatactctgtaatgagtgaaaaatgaatgatcaaaaggcaataagcagtaataattaaactcatgaattgggattgttttcttaaaaaaaataaaaatagataaatcatgacaggacagttacataactggggtaatcatgaatggattaatattctttcttaccttgccataaacagtgaatcatggtatgctcggctaatcatgaacttgtgtgaaagatttaactcttttgatgcttcttccattgccttaattatcgatttctcagaaagtgctggtggatcttgattaatgattttgaattcagttagcttaacttgacgctttttggcaattgcactcgcagattgatgaattttctcaatgatgatgttccttcgttcttcattaatgtctcttgtatcttcacaagaagttatttaattatcattagtttataatcccttggtaggggaccaagtacattttagatgactacacaactttgaataataccaatgatccaaataagataatacatacctatttcaagatgtgatctactcgggatactgttaattgctccaggatgaagctccaatatacctttaagtaaaggatcatcagtttatactttatacaatgcatcactggaggttctttcatgttgaaggaaaataataaattaacttaccaacagtaccaacactatcgatggatccagattccaagacatgtctttcaacagctagtgctaattctgcacccgccagtccagcatcatttctgctccaaattacacatgcagaaataagttatattgttgaagtaacaagaataagatttggtaggtaaaatgacaatgatgagcaagggcatccataaaagatgtctaattgaaacattgaaatagatattggtaaccagaaaggtgcctcagttgagaggttaaaatagcacttgcagtgataatatagaaacattcacctatttggcattaagacagcacctgcatggccgccgttgccttcaaattcaactttaatactcgcaggtgctgcaatggctgttactattccaattgatatacctgaataagaaaagggcatgaactgatccaattaaaatattgagcccattgttagcaacaagaatgtcaaaatcaaaaccctaccttcatcctccaaaatggggccttgttcaatgtgcaactctacgaatgcagagtaggttcctttctttagaaacacactagataagtcgtcttgatctttggcatagccggcagatcttgcagcatcaaagaaggatatgttttgaccatcaaatgtcgtcttcagagcttttgcaagtgcctcgctccctgccaataagcggctgaaaatatacaagatcacataagaagatctgtagggcatagacctaatgaatcaatgattgatgtaattcattgtaatcttatagttaaacatgttggatctagtaatgaaaattttcagaagagtaacggcaaaaacaatgggactgacatctatttagtacaagaaaagaaagaagtgatgtttaatactaaccttcccaagcagctgattccaaagcgtgtaggttcttctgaagtgaataagataacttcaagagaccttttaggtttgaacccggacctacaatactcccagtcccatagcataaacaaaaagagctacgactacatatatgtagtaaattgtgaagaacataatatccacacaaggattaaaagataaagagtggtgatactcgaatgaacaataatttcatacagtgtcaaaccttttcagtacatttatggcttctattgcacctaagacaccaaccactccatcatactttccagagtatggaatagcatcagtgtgagaaccagtagcaactgcagcaagctctggctcatcgccttccctgtgtaagaaaaactcacttgataagtaagacataagattaatggactttaatatgaaattcaataaacaagaagacagttgtaagaaagtagagtatctagaatgaaagctcaaccatcgtgtgataatattcttccaagctaagagggctactacaaaaatcaacaaaaacacactattttctctagcaaatcaattgttttgctagatattatcaatattctctagcaaaaacacaatattttctcgagcaaatagggtactagaatgaatgctcaagcatcctgcgataatattcttccaagctaagaggactactacataaatcaacaaaaacacaatattttctctagcaaatcaattgatttcagaatttaatatatttaagcaaaacagtgttaaatcagtaagaaggatcatgattcaaggatcctaagatactacactgaccatcgaccaaagatgttaccgacagcatcttctctaacagatagaccagagagtcccatcaagtttttaatatatctgcatttacacaaacacaaaaagaatcagtatgtgcagtcaaggaatagtcttgtgcagtcatcaatataggaagttgtataaacatttcaagctagtatctcaatggattgtttaagcttgtactttcaacaagttgccagctaagacttacagttcaagatacaactttcattagacattccaaatcatcctatcacttcctaaattataaagcttaaagatcctccatcgatagtgacaggcaacagatgaaataggcctttcatgtgttccaagttagtctatcttctttttattgactaatttacagtccctttagccacttcccaaaagaaaaaaagtttctatattaaattttaaataagggccagagcacatgaggtacccctttgggtcacttaaagccacatactaaaataacaatcaacaaaaatgaattcccatttttatatcaatccaaacacatcttataagggtttaagcaataagcatagtgaagtcttaaccacttaccttcgggccaatacatccttctcagtgtacaaaaccctggttactgatggggcaggtgtatccgaaagccttgaaagttcatcaatctaatgaccaaaaaggaatttacaaaattccatcagctttcaattaaaaggatatgcctttatacaaaaaataaataacccagtagccatcattgagaaaagttggtcttgtgtacctgattctgcaaattttgagcatccgcatatagtggagaagaaagagtgttcgagatgaaagagtgagattcatgaattgggtacccagaaaaatcctccattgttctaatagtggggtcttcattgttaaaggctgctgttaaggttgaaaatggacataggaataagatttggaggagcgcggacagagacatgtttttctgcatttggttgagcaagagtagctcagttcatcggacaaaatatatatgtagatacagatactagatagacagaaacaaagaaagaaagaaagaagaaggtggcattgattgaactgattaaaatatagaaaaatgtgtgtgccaaaaagagtaaccaaaccaattatgttagccttacaaataaaataaaataaaccaattatgttaggggcactaacaagtgagtgcaaatgtgacgttagttttggtttaggtagttgatatattttagggaaatttgaagggttgcactactacgtattattttatatatattttttattaaaaaatatcaacttcgttaattaacattctgaatacaaaatagtttggagttcagggagaataaaagtctcgagaatgctacaactagataaggatcaagtgtgcctactgcctagcaacaaagtgggcaacttaatttgttgattgtctaacaaatcgtaaatgaacattagagagaaaggataataaatttttacaatcattaacaactaagccaaacacagaagtcattgactgagtagaatgaatggcttgaacggcaagcatactgttactctcgatcataacatctttctaactcttctttttgatccaactgagtgcttctttactgcccattgcctcaatggtatcaattggaaagtggtctccgtggtacacggcttgaatatggattggagaagcatgctgatcacgggccaccataccgaacatgtaggaattttcctgttcaaatgaggcggcatcaacatttatcttgatggtttccaaatcc

SEQ ID NO: 14090 - DNA, 11155 bp, Cannabis sativa
  modified_base (10894)..(10910): a, c, t, g, unknown or other
acacacctttgaaaataatggttttataatttatagcctatgttgtaagaaaagacaatagaaataagacaatgtcaccctgacaatgacacatgtggacatgaacatattgtgagactttatgtacgattatatatttaaattatacactacatacaatctgcaaatctatttcaaccatgctgaaaataattctagcaagttatccataaacatgacaccaatttacacactaagggacaccaaaaataataaatttccccttcattattttcagatacaatggggatttagtccccccctcccacacacatatacccaatcacttgagggcatgcagtgccccgtcaatgataattgttcagaagactaatggaataataactgccattcttacccacatctgtataggttgattaaaatgaatttcggcaaggtactccatttctggatctgctcgcatccataacaagggcgagtccatactgtgaaaagaaaagtttgacacacgcatgcaaagacacaagaaaataataattagatcctcctatccaaataaactttaacagagcttaaagaaatgaacctacctggagcgcatatctagaggaagagtaccatctccattgtcatcagatccatcaagttttgtaccctttttaggtttctgaaagcgtctagtggcaagctttgaatggcactgtatttccactaactgccatgtttctccagccattggcagaactgggtggtcaaatgtcccatcaagttcgtgagccctaatactcatcatcccaggccatccaacctcactatctcggttttcagattcaggcctaccattaacaacagatgcacttgaatctggaacagcagtacatccacgtaatacggctaattcaatcatgttctttcgcttgttataggagaaccccatccttaacaaagaaaaacggaataacaattgacataagtaaacatggttgaaaagaaagctacatgaagctctaatattttataccttagcagtggtgagccacatgattccacccaacgaggaaaaaattccttaagaaatggacgttcaagatttccaaccttgttagcgaaatgccgaaactgcatacaacagcttatagtatgagtacttccaagttcaaaaataaaagtagacataacaacatattatccgtcacctacagcaaaagaagagaaaaaacttgcccaaataaataaaagagctgaaaaagaaacttaaaagaaaatgaaaagaaagagttaaacaccgcaagtgccatcaatatagtgagccttttgttaggccttaccagtatggtattgtgaactttaataaataaagagggtaaatgagtaattgtaatgagtggtggggctgtgtaggtagtgtataggagatgggattgaatgggagggatcatggaaattgtatgggattgagctttggcccttgggagggcggaggtctctcgaataactcaggttctattgttctctttaacattttcttcacctattatccaataacagatttgcctattattttctagctactttctcttctccgtttactctattttctagtatctttcagttctagctagttgtgcagcaaattcctatcatctttctctaagtaaagacgaaaagcaatatccagagtgacaagagtatttcaaaatgatcccaccagaaaatatccttacctcctttgtactaagagacctcattgaacgagtcttatcctgcgcccgagaaactatagtctgcagaatctgtaacaaaaataataattgaaatggaagaagataaggcaatcttcttatcaacaaaattaattcatagcatgcgttcaaaacgtccttgcacacttaaataagcaaattataatttaataatccaatgagctggctgtctgattatgggctgggctattgcttttttttttctactaaaaatataataatgatcaaagaaaagaattgataagatcttagctaaatacatcataaataaaacctgcaattaaaattttacaatagtattagactttaaaaatataaaacaaaaaccgttgcaacaaagtattctccttgtctaaaacaatttctcaatccaaaaatgtagtttaattataacataatcccacatgaaatcacacaaaagcttcgcggaatgaaggatatatttacatgtataattcttgtaataaaagtttgtagcataatcaataaaataatagacacacacacaaggaaaaaaaacttgagataaaaaaatctgcaagaatctgtacttttcggaaggactcaggtcccatttgcttttccaacatttgaaggattgccaccttcaaatacaaaattgcaaagaagaggacaattagcaaataagaaataataacaaataaatgaaacaaaaatgatgttattccaaacaaaagaaacaaaatttcaactaactcacagatttccatgatcttatttttttgtatagaccaatggattgagtaccatacaaatccttagaagaagcagaggagctcaaagatgtagcaccgttatcatctgctttgcatacggcacaatttgcctgcacaaatacttttcttctgaatttgacaatataagagatgacatgatgcatttttctttctttcttgaattctaacatcaaacacaaactaagagactatgaagagaggttttaagtgtggaaagattactggaacacttaaaatggcagggcactaagctgttacaaagacactgcaaagaaatttgttctttttttcctttgttttgcctataaaaccattcagactgaaatatcttctaggcaacaaaaaggcaaacatatcctcaatggtagaaaagaaaactaccagcataattagccccacatcacaaatatatatcttttattctaaggtttatcaaatttagaaatccaaatgtggaagcaaaccttgtatctcctgtagcgtgcctcattatttcctaaacaccttttgataaaaaaatccgccataaaaccagcaagaccgtcgagaagccattctgaatataatcatactctaatcataagtacaaattatcaaaccatataaaaatcagtacatcttgagcacccataagtagtaacaaccatgttcaaaccagcataccatcatttggtgtctcgggagtgatataaacaccaaaccactgttgagcaagggcacaggcaagtttaatcctagtgtctattgtctgtcacagaacaattcatatgtcaaaataactaaaggcagcaagagcacgcacagtaataacaatatcgcataaggaacagaaaatttaacttgttaattataccaaaattgtcattatttgaaactataaaaggattcgtgaaatcagaaaatcatgggaattcatgtaaggattggtgcaaaagataccaacaaactgtgttggtcataggaagtagcttttcggctgtcataagcccataaatatacagttcatgctgaacgcccagtcactttcaaagagacctaggtagtgtttggttggtggaaagtaacaggatggaataaaagggcccagtctttgtctggtgaagatttgcatgtaagaagttcatgcatgccaggatgaattcccataccattcaatagttaattacttaattttctcatatctgcccttctcaaattttatttaccaattttagattaaccctttctccagtttcgatctttcaatctgtcacttatcagagtttcagagtggaaagctcgggaaaatgttgaaacaaaagtcactggctactctctgtctgtcgtgccaagttattacactagaggaaaaagccccgtagagatgactaataaattaatcccatcacatcaccaatccacatctctttgccgctcaataaatgaagatccaaataatcaattaatactctttttttttcaaaataaaaataaaaatagactgttgtcggcttttaaaataaatgaataattacccccttttagatttaagagcagtgcaatgtggaacaagataaagctaatcctaaaacctagctgctattgtagtatttgtcaccttccaacttcaaaccaacgaagggaacagtttccttttccgttccattacactgctccaacacttcacacttcaaccacacattatcttaagagttggaccacacacagtcctatggatcaaagttaaaaaaaatggtcaaaaggaagccagactgcaaatttcataaataccctactctcttttgctttgttgggatattgttaaagtgcctcgtaatgtgattttcacgactcataatgtagctaagcatactcaaaacctcaggcttagaagtgaagtgagctggagggagttcgatttgcagctgttcaacaactacatgaaaacttaccctccttggctagtcgaattgttttagcttttctctttgtgatgttctgtagtgtaagctaatcagttttgctctttattagtttatgtttgctgggtaccatctatctttcgctagagtgttatcttgcaagtctgtttatgtccaccgagagcagtatacatgattaaagaggccatcaacaaaacaagagtgtaatcttaacacaagacattgataatgaaaaacaggcaaaataagtataaagccaagcatatccataagaataccacccacaatcttttaatcttcaattcaagtgaaaaaaaataaaaaattgcactcatatttctatacttcactacagtgtatgcacaaccccaaaggtgcagtaaaaccacttaagaagaattgaaaccaatcatgccataccatgcaatcaggtatatcattagctagaaatcttttttttttttttctttgtgctagaaatcttaattttgaggttttgatttcccagcaaagccagacatattccattgataattcaaccacaaccaaattccatgttgtatgtgcatcattcatgtttgagtagtttcaacatataaaaataattatgcagatgaagcaattttgtatggtattgatttagatactcaagatcacagatgaatgcagaacttcaaagccactgagaacacaaaagaggagtctgaaaaagtaatcaaacctgatcaatgatcttctcatcgaataatatttgagagctaaaaatgctcatggaggctcccaagcctagtgagcacactgccatctctggttctataaaaacttgtttgtatgacccaaatgggaagtttactgataaatagtccttataacaactgttgaagggaaaataagattaaaaagtcaatagcagttactgaatgttgaaccaatcatgcaagcaacgaggacaaacctgaacgcactatgaaaaaattccacagtacttcgaagctttgataaatgaacaggtaagcacatatgtgatattacacaagattggtgatcaggaaaaacttcaaaaggtccaactactagagatatccactgagcactaactgcaacatctagtttatagacatatgttttgcgaggaggatcatccttgctcaaaacctgcagcgagcagtaacaaggacacatataaaacatatatataaagtgccacaacaagttacaccattcatgagctctttaatcctacagtgtaacctgaaatagaattcttcaattgaatatagatataactgcctcatgttgaaagaataggacagattactaaccaagaacaaacatgatagagatttagcaccctcaaatatcacaattcacaagctttataatgaaatggaacaaagtagagatttacaaatggtgccaaaaaaatggaggaacaaccttaataaatggtgccaaatggtaaatgaaatgccacatcacaaggacaatcatactggagatgaatcaatacccattgtgagtccttaataactattacattggaaaaaataaagaaaaattacccaaagtaccatttttggcaaattttaacatttatatggtcaaataatttcttttactaacagaatctttgttttcaattatacggttttttctttttttaattacaattttacggtgtcttgtaaaaagagcaacaacacaacataaaatcaaaatacaaataactagaaaacaacatgaaaacacagtccatatttaatatatatatatgtatctaaaattccgtacaaccatatctttgtaatatttttgacttttttttggttagcggcttcaattttgaggagggggaggaatatatcgcccctaattacatgcataataaagaaatataccacaatcattctatcaataacattcatgacaagtcttaactgccaagagtcatccagatggggacacttaggggtgttcagctaattcaatccaatctacacttagtgcatccaatttaaactaagtacggatttcatattttgaatctaatctaatccgcttaataactcaaattcaatcacaaaagtgcgaattagattggtcattttggatttgttactttttaatattttgacttatttaatatttatcaaaaatatttttatttcacataataaacaacaaaataaaacaaagtattattgttttatgtctacaacaacaaattaaaataaataaaataaaaaagtaacaatttaaaagaagaaaaaattgtatacataaagaaatatttaattttgttttagactctattttctttataaaaaagaatggaatatatgtttgatctattaaggtttgaaatatatttgtttcatgatttgtattgcattttaaattagtattttttacattcaaatattaattatatctataattttttttaaatatataaatatgtgtagattggcttggatcagattagttacttttacatgtcaatcaacatctaatcagcacaagtacagattttagattttccactcctattaaattggattgagtattttatgaacaccagtagggacaatgttattatttactaagcaggttgcataaacaatacctatgcatgcaaaggcatcaagcaacactataagaaaggaacaatcggtagaaaaagagacacttaaactatgagggggaagtggttcacaaattatcccttttaaattcaattggttgtttctactttgccaaaggtaaatgcaattgttgttttttgttgagaaattaacactaaaaaagttaataaccatcaaactcaatactctcactgaaatggatcaaaaggatgcgtgcagtgagcgtgaatcgaacacgcgcctttcagatcaactctgacgctctcccaactgagctatccccgcaaattatgcacaaccagcaatcataccctggtatgtgtcataaagggaaaaacaaaacttcaaacttatagtggaattgccttaaaaataaggctttactaggtcacaatgtaagtaaattagttgaggccaaagatatgatatctcaagggaaatatgccacatcaaataaaataacaatgtccagataagactaggtacttgcttttccattgaattcttatggttgatgcttgactaagccacgagcaactacagtaatgcagaaccaaaaaacttataaaaggcacaaaataaagcaaaattggtgataaaacattaaaactaaaaacagcatcctcattggactacatgcaatgaagtattaaataagattccttaaaccaatatcttacaatatgtttggtggagaagatttatatatagaggtgtggagggagagtagtggattagaggatgtggaggagtaaatccatccaaattcaaaacaaatactaatccttccaaggatggagggattggaggaagagaaataagttttcttatcaaatttacatatatacacttaatcaaagattaagaaatattttttggatggataaacaacttgttttttgcttgtaggataaacttgtctagttaggatattctatacctagttttgtataaattgttcaaaattatactactaattttggaatttgatttattccttctttaactaaaaaaagagaatgacatttttaaaaaaaatatatattactaacacaattatcacctcataataaaataactgaaataagaatatgttagtatgtactagtgtaataactaaaaatttaaaaataaaaatataaacatttacataataggtaatatagtaaattcataattattaattacaatcttcctactccaatattcctttaaatacctaacaaaatgatagaaaatcatcttctttccttcctaacttttcaaacaacataaagaagtaccactctcttgttaggatcccacattgataagtatgggattgcttagtagtatatagctacttggtcttgcaaaaaaaaatacaactacttgggcaccctcctctttaaggctagcttttggagtaaattctacccaagtagttgtatcaaatgatatcataaccatgaaccctcgagtgggaactaggattgacgtcgcgaaagggacgacctgtgaattagacccaaagtaggccaccagagtgtgttgctgtggacgtcgactccaaaggagagtatattgttgggatcctacattaaccaagtacggaattggttcataggatataactacttgggcaccctcctctcttaggctagcttttgggagtaaattatacccaagtggtatatcatctcatttccattcctactctctctatccttcctaacctatccatcctacctcttgtccttacatcttaccaaacatgcccttagaatatatgagtttataaagcttgagatatccacaattagttccttgtatagtaatatgttatggcaatcgcatttttttagaacaaattctacgcaacaacaaaaaaacgtcaaatgttctatagcttgctaatatctctaacaatagttttgcattttccattctcaacattcattactttcatttcatctattttttatgtcagcatttcaatattataaggctgcttcttccatctcaaacttaccattaaatataaatataaaacatttttttatttcttaatgtgtactgtcttcgtacctcttttcctacaatcataatataatgctacatttatcatacatcctttccgttagtaccaagtaacaactaacagttgactctcttcttattcacaaagaactaagttttccttcccctttgatatttcttctaatagaaaagaataaccccaaaagaattacacaaacatttgttgatgatgaaaagtcataagagattccattaaccagccaatcaagacctacacaaatctaaccaggtggaaacattcaaatttagtgccagctagactccaacaaagaattaaactgatcaaattgaatggtcatattgttgaaaaaatatgacaatgagttgcagaccaataatctttttatcatgtacaataatgcatttttgaaaaagataacgtatgtatattttaaatgactataataatctttttgtcacatatctcacctggtatagcaaatttcccgaactaacagccacaagattttgtgcaacagtaaactctagatcatagctgttccaataacgtgataaccacaataaatacttcaaaagttgcatatactcaaagcaagaaccggatactaagaaatagataactttaccagcagcgctgcaatgtgtcgtctatacaagggaaccagcagcgagcacgtcttatctggttatctgtatgaaacacgttgccatcaaagtgaatccctgtctctgctttctctacccaataattaacgcggaccaatctcacattctgcatccaatatcaatatccatgagaaaccacgtagaaagaagacatattatgaagtaacatgttactgttatttatatcaattgatacaaactatcagccgggaaaccaccatataagaaattgcaaacacataaaagagtgcaagcacatgacattggtagctgaaatctaaatgatcaaagtcatataaagggcattatcctgccaccatatcatcaaccataaaacgaaaacaatacaaatgtcttacacactgggtcaactttataaaaatgcatatatagcagcctaacctgcttaatttctccagaggcttgttgcaccccgttctccaaaactggctgctcttgctgttcacctcccgtcttgaatgacttgtagcaattaatcaacaaattcggtaccaattctctttccaaagcagatatgtaagccgagccagcagcatccgcagcagtgatcggagatgtaacgtagcaccacctgctctcattctccgtaaattgataattatgggggtaatattcgaattccgcaggctcaccatccacataaacattatcaatccctaaattctctgcgtgtaatcctacaatcccaatctccggaaccacaatttccagttcagtgtacctaagcccgagaaaagaattaacaagtaagcatagtcaaactcaattaccaccattttgaaaaccaagaagttcaagaaacccttattttcgcaatctggcatgtttcgaagaaaaccaatagaaatgcacgaagaataaaggtcaaaggaagacatggaaagaagacgaaaaagatatgagacgaacccatagacgtgacgcttgtcgaggtcaatggaaaggcaaagcttctggtgacgaacaacaggcccagagttttcaggcttgttgctagcgtcttcattcttcggtttgcgaggcttcgccattacggaatacagcaaaagtagagaatacacataaatatatatatatannnnnnnnnnnnnnnnnagagagagagagagagaatcgagttcgtgaagcttttttcaccagtagaaagtgagggtttatttaaagacgcgcgcagacgagatctctctccgtgccctttgtgcccgtgtaactcaatcttagctgacgattgtgccctaggatttgtcattctcaactatcgtaacaccgtgtcattaacactttgtttggtaagaagtattagagaagggatagattaaaatctggattgagttacttaa

SEQ ID NO: 14091 - DNA, 11998 bp, Cannabis sativa
tcacgtgctcgccgtcaatagtactgttccttctctgtaaaccgttaataagattttctaaaagttttttttcggatttttatttttcatatttttccccttctttttagggttttcagaatcaccaccgatctcggttgatcgaatctcgtctttctagggtttgatttggtaactttcttcaattttctcgagtaattttggttttcccggaattttgttgggcaatttttttttggttgggaagaagtaaaggaaaacgaaaatctgatggttcagttaatgaaatctggagatctccggtccgatcaagaaccggtagcttgtacggacaaacatccggtgaaattggagatcgaggattcattggaagaggagcatggtccgctcgccaagcgatccaagccttccccggctttcaatgaggtttttttttttccaacttctttgtttggctgccgagaaaataagctaggaaaataaaaataagattttttttaaatacagattaagttgtaagatattttgctagctctctttgatgaatgacgagactgattggatttggttcatctactagctagcgtgcatgtttaggttaatatgttctttatattttcaaagacaaataattcaagtagtttatttagtttgttcatcgaaattatgacctcttttattttttgatgaagcgcgtgatatcaagattcatttgacattgatattttctcgttggattttcaagttttatgtgactttgttatctaacgttactttcttgaatggggtttctttagtttcatttttaatgaggtcattcataggccggtttatgaaattgtaaacctaatctaagttttttaaacacttgctcagctactctctccaatttctcgcattatgttaaatctggtatgttttgataaatatctgggaaagtacgtagtgcttgtttcacaagctcttaggcgtagttttaatcttgtatttactatttagtggttgctttgagttttgtcttagttttaagccgttttgaaatgctagtcttttatttattgggagttattttgactaaaggtaggttttttttttcttttttgatattattcagtgggatgccggaaacaaatctttgccgattcctccgtcacaatacaacccgcttgatgagcccagcccattggggttgaagctgaaaaagagcccttcactgttggatttgatccaaatgaagctatctcagggtaatccttctcaacttggaggtatgcagagcggaactgttacctctgtagtcaaaaaggaaaacaaaggaaatgctcaaatgacctctaatgacaagcttaaggcttcaaactttcctgcctcacttctgaagataggcgcttgggaggtacctttaaatattgcttatgtattaacatgctgatattggcaacttatgccacttgagtcttactaaagtggttgggtgtgtgtgatttgtatgaggtctgggtttcaaaccccaggctgggtaattcaacaaaaattggtaactgctagctgttttttatctaaaacataatattggaaccttacaatatccttgcaaaaacggtgctgatgatatttaaattactgcagtataagtcaagatatgaaggagacttagtggcaaaatgctactttgctaagcataagcttgtctgggaagttcttgaaggtggtcttaagagtaaaattgaaattcaatggtcagatattatggctttgaaggcgaattgtcctgatgagggacctagtaccttgaatgttgtggtaatgtgttctttttgtgatcgatatttttgtgtgtacttcttggctcattggggttcaagatggttttggtagacctgcatgttaacttctgatcttacatgctgcagctggctagacaacctctttttttcagggaaaccaaccctcagcctagaaaacacactttatggcaagcgacatcagattttactgatggacaagctagcataaacaggtaaaatcgtattcctgctttattttctttcttttttgttcccttctctctgttatctctacagagaatagaatatttgtcttgatccacatgtggaaaggctgaaaatatgtcaactcaggctgtctcttacagtgtggagtcccgtctctgcccctttgcttgagtttatatagtcacaacccttttttgatttaaagtttagttatatattataagttgctgtgttgatggatatttttttgggctttaggaagcactttcttcaatgccctcaaggactgctgaccaaacattttgaaaagcttattcagtgcgacatgcgtctaaactttttaagtagacagccagaggtacctctggattcaccatattttgaaccacgaacttctattttcgaggacccagaagaatccaaaggccgagttattgatctaatggacaatggtataggatcttccatctctggttttcaagatgttgcatcgccatcaactcagtcatcttcatttaagcttgatcagcaagattctggtggcaatgtggtggagactaggtctagagaagctccttcccccagctcaggtaacaaactaatttgcatctgctttcttttccttgattatcaatgtttatttcttttaattggattcaagacttttttcgaaaaagaattaagtatataaagtatatggcacttaatgactgtaattttacaacaattcatagacaatgcatatagctcttgccatatttggtgtccatatcccactgatgaaagaaaagaaaattaactctaattctttagacacaattcagttatgaaattattttcttcaagattattctagaatatgcttgcggtttagcagttgtacttactgttttttcttcttctttccatttcagttatggacagccatgcaattgaagggaatggaagctctgaaactgttaattcccggggacccatgaattgggaccagattaaagtccctggtcttcacccttcaatgtcaatgagcgatctcatgaaccacattgaaaattgtatttcagaacagataacttctggaaaccaatctggtgctgatcaacaaacaaattaccaagacatgttggaggaggttgcacagtacctgctgaatgataatcaattagcaaccgattccgatgagaagtctctcatgacaagggtcaattctctctgctgtcttcttcaaaaggatcctgccaaccttcaccactctcatgttgatggcggcgagagctctgttgaaggacctgctggtgatggaagtgatattcaacttaaccttgctctcgacggtaaaacatctgaagagcatttgaatttgaaagaaaatcctgttggaaagcaaccaggaatgtcgaggaaagattcttttggagacttgctgcttcaacttccacgaattgcctctcttccgaagttcttgtttaatatttccgaagaagatgttgacagccaatcttcttaataaatttctactggttagttctgaaagactggccggccagcttgggaacgagctgagctgaacagggaattcattctcccctatgtggctgaggattgaatttagagcaaaaaggtttgacatatcataaaaaagcttgcttgtcttgccgggaggtattgggattcagaaattaatattgatgaagaatcctggtaaagctccctttgtaaaaaaaagaaaaaaaaagttcaaagttttaggtattgctcttcattgctgttattttctttcatgtcttatgaacaagaccaggtatatgtatgtgcatgtatatatatacctattattattgttattattattactactataagtaaattgttgaatcattgcaaggggttaatgtatttggaatctggttcttgacttgtgttttttttttctctcttttttcatcatgattgattgtatctattcattgtgggtctttgaaaattttagatatcaagaacaccagccatacactcaatgttatataggttgaatataagtagaaattgaaagagattcttttttttttttttttcaatatatattgttagaatgcggaagtgtatggttaaggtagtagaataggtgagtttatggtaaggtgtatgaggttctatctcaaaatcaattggcaatgagaggagtagctcatgcatcctatagtatttagtttcaacacattattaatgtggaattctctaacatttcttctaagatggtagttattttttttgttcaccaatcttgcacgattcgatcacaagtgactcttttggctcacagcggctctttttggctcactattttcgaatcacaagcggctcttttggctcgtctttttggaccggtttttagatttggattggttactcgttagagtttagtttgactttgataccatgttagaatgcagaagtgtatggttaaggtagtagaataggtgagtgtatggtaaggtgtacgaggttccatctccaaaccaattagcaatgagaggagtagctcatgcatcttatatatgatatttaatttcaacacattatcaatgtgagactctctaacatatatacttatatatgtccacattaataatttgattgtagaatgattcttttatgaagtctttcttgccagaaaaataagaaccaactaagtgtatatttccttgacataatgtatctagcaattgtcgcattagtaatttgtctaaaataattattgttaatgaagcatttctttttatgaaaataagaacttagtgtacactcctaatgtatctagctattatccaaataaaagtttgtctatagaatgtttcaactgctaattaagtttttctcattaggaaacgacaatattagttaggaccttgcttatttcttgcatatctcattggatatggtctgcaaaatgcaatctaatttttgttggtgaggtagatattttcgtgagtctcattcaactcaatatgtatattgagtaaatagaaacatacttttcatgcttcttttgtttctttttgtcattggatgagtctctcgactcatccttccttttcgtattcgagtcaatatgatttggattttctaccttaatggccacgttactcactgttgtgctacttttgttgagtttatctcccgagttggattttaacagcttaatttcattttgcgcctcttctttcctcttaaaaatttgtgctctttcattgaactcgttgatgttcctaacagggcgaccttgcaaatcatcccataattctccccctacagttgacaagtcagttgtgattcccgcttgaagggctgttaattgaatgttgtcattcaaattctcgactttggctacagctgtactgaaacgacttaagtacatcttaagagattctcctagttgttgcttggcattggttaagaaagatgcttctagtcgtcgatctcttgcagcttggaattgctttttgaaatcttttgacaattgttcccacgaagttatggaataattggtgaatttgtcaaaccaactacttgcagctcctgttaatgaagttggaaataatatgcatcgcatgttgtttgaaacattacttgctcgcattatggtattgaagttatttaggtgggcaacaggattagttgcactatcatgttgtgagacatgagggtttttaaatccttgaggaaatttcaaattcaaaatatcaggatggaatggttctgtctctttgtctgagtcatatcccggtagtttctcatattctccatcttaggtacttcctgaacttatcttctaattgtattacccgcaattgtattggatccaacgacttttggttagcattttgatttagttgattacgtaaatctggtgcattacaatttaaatgctcacgtaggtcaggctgcctttggtttaatcgcccgcgaagattaggatcgcgatgtctttatatcactaaataagcaacagaaagtttttaacgtaggtttgaagttaattcttcatagtccacgagtccatcttattaagaaaagcatttggaatacagaatataatagtattagggataattatatcttacttttttctctctagatttttttgtccccttttaccctgggatttgtctctatatatagttgtgtagggtgacagttatttccttggggatctattcattcataatcgttcatgaaacgtggacattctccacgtttcattattgtgcatatgggataatcgtgaataaccgttcaactgcccttttgtctttatctatagatggttatgctgactatattgggtgactctcgctaagtacacatcatatttttttatcgtttttgtaggaaaaatgctaagtataaaggtacaacgcttctcacaattctcttttgccattttggaaggtattagcgaggtggttatttcaatgtataaagatcgagatggacgaatgttgttgttattctttaaacatactcacgagtatgtgggtcaattagctgcaagctctttactcatgagtatgtgggtcactgagttgcaagctcttattcacgagtatgtgagtcaatgagttgcaagctctttgtttactcgtcttgaacaacttttattatatattctgttcatctcgagatggacttgttgtctcgccaatcttactcgttaatagttattattcttgtctcgcttctgcctatgtgatagcgagtttgtatatttctatcaaccgtaattcttgaggcgagttatttaatgtatatttaataatgcatttcttaagctgattcatattccctctctggtacatgtgtcagcttctgattattagctgaaattagggtatgacagagcatatttggagtattcaattgagtgaggtggtcatggataatttcttttattggaataaggaggcttcatgttttatacagttaagagtgcttatcaattgtaaaaatattttaaggggcattgggataatgctctgacgagttctgacaaaacttgtgacaatttaaaattcctccaaaggtattctttggcgcgcatgtacttggtatttccctacaatgtatcaacttagccaaaaacatgtaccagctcaaagacattatcgtctttttttgcactcaaatgagataattttccatatcctagtgctttccccgtttgcagctcaatacttggtcagtgttactattagggttggttcgccaactgctgcggttgataaattttctagctggttcgctcaagtagggaaggagaatcaaagtgaggtcacggaggtttgttgtgctatttggagagctcagaatgagtttgtttagaattagaaaattcctagcatgaataatgtggttacttcagtaaattcgtatcttgaacaatggacaaatgctcaaagtacggataattatacaccactggcaagtggtgaggcataagatggtgctagagtttggatgaagccagaagagaatcaaatcaatgtcaatgttgatgttgcattgtttgttaagactactcatttcgatggtggtatggtagctcgtgatcacctgggccgcttaattgaagctcgtaccgtgtgttggtatggtactgcagtgcctgagttggttgagattatgggaattcaggagactcttagctggatcaagaataaaggttgggcgatggtagttcttgagacggattgcctagtagcggttgagaccattcgtagtcaattaatgatgacctctccttttggtttagttgttaatgactgtagacatttattcagttgtatcaacggatctctttagtgtttgtgtatcgttttgctaatatagtagcttatagttttagtagagcttccttttttttccaaaataaattttcagtaggagtgatgttcttgagtttatatctatattgttaaagtaatttttcttaataaaattctatttccatttttttttttaaaaaaaaaagagttattttatttaatatactaataattaccttgtcatataaccaattaatattataattataaaaaaatctttgtaaaactagtgaaataaatacttgtacaaaataataataataataattgtaactatccaattgatacaaatacgcacgagtaaaaattccctaaaattatcaaattagatagtgatttttcttttccatggagtttgacagcaagtatagagaatttgagtaacaattggaaacatagccaaaaagtcaaatggacaagtatctattaatcatcacaagtcatgatataatcattgttatgtgacaaaaacaattcaaaggtcaaacatgggacccccatgattattacaacaaatattttaactgaatttcttacataaccacataatagaataaacaaagacttgaacaaactaaactaagtttaccactcttttggaagatataaatgaccaataaaaaaagatcataaagctaaataataatattcacagtttttatacatatttttttttcccaaagaaaagactaagcagtatttacaaaaattaggagaaatttaaaaacaactattgaatcatcagctgtacagaagaggaaaataaaaaaagtttcaatgcccaccacaaggattttaagctttttgaatgttatatttataatatgtacacttgggattcttccatcacgcctatatgtctgaattaagatcaggaagaagttgacgagggtggcgaatgaatggcggtatcaggtaacatggctattgttactacaaagtattcgcagccgatagggagaccatatggatttgaagttgagcctgaattcaaggtcaaccgatcagtccccgcctcagttgccaagttatgctcgggaccagacagagttgtagccaactgcttcaccgtctggctttcgatatgtacaatctgtccaacaatgtagttaggtcgaccggggagatggtctgtaaacaaggctactgattcagaagaaaggtaatagtttgagcagtttctgtttattgcctcataatgcccatttgcattaagaacaaatgcagcgatttcgtgcacttgcgttcttccaaaagatatcttttctttgttggcctgttacaagaaaagatcatttgaattatttaagatgactaagagaatttttttccataaaaaccaccatagcatgatatgaagatattgattaaagtacctgtttctcaagttgatgtttggcatacaaggtattaacaagctctttcttttcttccagctcttttctaagttgttcgcttgcagtttctacctttgggtacttgtcgagtagctcatcacgatgcctggacaagaaaccaactctatctgcaaggactcgaatacattttcgaaagtcggcagtaccatcatcttcattttcatttattgaactggaacaatttaaagcagatgaaactgtcatcaatgttgtcattaattgaaacaaagacagtgaagctcgtctaatattggcgaattagaccagcatatgaagaactaaaagctataacattagaaagggtcgaaaatggtaaggttaaagagaaagaagcagagtatcaaattgttcaaggcataacaaatacttcagaaacttacttggccaaagattgtgctaaaatacgcagagcgtcagcaaaagcaggaaccccaccgggtgcatatacacatgttttgagcctttcaaagagactgcgcatcttcagagtggatgcacgcagtgcactatactcggaagcccttcgctcagctgcgcacagatgagtgtgagcttcctctcgtgcttcatgcaaacagttctccaagtgagcacagttcatctgttatgcagaaaccaatattaagttaaaataataaccaatttatgacacgattcgcaagtaaatcatatcggaatataaataaactaaataatcacaaaaatatgcctctaagcataacttgagataccaaaccagacactttgtacatataataaaactaatgacactaagcgtaaaaaaaaataaacaacacaatccaaagttaatcctgttcgccattcccaccattttccattctatctttgatttgcaaatagatgcattttcaatataccatttttcacttaaaaaagtcccaagacaaagcaagaatagacagtgtttgtcatgccctgatacctgagattcatcaagaagcttccggctagtttccagctccgtcttaagcatcacaacctcctccatagcagcttcgagctttgcttcagtttcactcaactggtttgacttttctgcaagtgcactttgcaattccaacaattgattaccactaacttttgagtccaagcctcgttcagcagctgcctcacaaggtaagacacttgaaggctcgggcatgctttctgcggtggagctacaagtcaatgacatgcccaactgccctgccatcttatctttcccatctttgtctccatcacgatgtggctcgatcattgaggaatccaactgaggattgtgtactccagaagaatccatcatgttttcatccaccccatctctccctttgcaagcctgattagagaaaagccccaactttgattccaaagaattagagatacaagaaacctcgtccataggctcagacgtagataggcaacggatgtgggtttctccaccacccaaagtctgtgacttataaacatcattctttccatccataataccaaagtcattcacatccctattattcgacagctcgttttccagttctttaatgcgtttctcatatgactcgcattgcaactgtttcatcttaagcatagagtggagatgtctttcgtactcatctttctgatgcaaggcttcagcagtcttatcagcagcattttttaacaaactatccattttactatcatccaatgattcgaattcgatttcagggcagaaagcacagatcaatgcaattttagaagcaagttcagctttcaactttgcattctcaacttccaatttactagttccagcgatatcaaacagctcagagccttcatatagctcctcagattcacatcccacaagcaactctgtagcactactgtcttcagcctcgacagagtggctactgtcattggacatagaagaagaagctttgaaggttccatgcttttcccccttagacgaaaatcctcccaagtattcaggagcatagcgatccagatcaccaatgtcaatatcaagtaaatgagtatcaaaaggagctatattaacatcacattgattaggggtatcaaataatcccatagaagctaagacatccttaggcacatatgatccacatttcttcagaaactcttctcgagtcctcacctcaacttctctctttgttgcaagcctttcagccaactgcccagccatacccatataaagtttcatgttagcctttcttctcactacttctgcaaggcaggctctatatgcaggggcgattccacgaacaaacttcagctccgcaaagatatcatcctggcgtgccattgcctctctaaaaacagggaactggaactttgcatctttaatgttgtaagaaacatatgttactttttgcatgtagttatgcacaaacatgttcatctcattcttcttatcgacgcaatagtccaaaagtttcgaaattgtacgttcacaagcctccattttaggcaaatgactcttgtcatgaacatcatacataggacccaaggctgaaactgcatcatgaggacgaagtgacgaggacaattgacaagataaacaatcatccactagtttcttcactgtgccaacatctttgctgcatgaatacataatataatttatggttaacgttatcaacaagtaccaacaagcaagaaagctttcaatgtcacaaggaacaag

SEQ ID NO: 14092 - DNA, 9918 bp, Cannabis sativa
aaatttagtatacgtgactcgcacctagtttttgctagtatatatatatatatatatattttaagatcataaaatgttcataaaatgtggtgtaatattatcacagcattttaattgttggctttcacttcgctagtaggattgtcaagttcactttctcatttggtaacttgttatgttttttttttcctcaaatccaacaaataatgttatgatcttcagtttctaagcggcaatggagtatttcccaattctgtaagtatttcgtcaaatttcattaaacaaaagctgcaatggtgaggacttacgtgagagagaacgtaccgctctcgcggttcggcgtcttggtggcgcagttggagtccattggcgcttccgcggttcagcaggcgccggagccactcctctgtttcgatctcttatcggatctcatttccgccattgatgaagaacccaaggtctccctaagtttctaagtctagctctacttttttttctccaattacgaaaccaatgcttgaatttgattccttcgattgtggtggagcgaacttgtggagttcgagaccttttggttgttcttcgtctcaatttccgtaggaacattaaatacctatctggatccttaggatgtaaatgaggcaatgtcacttcaatttaactcatgcgtcctcaccgttttgctgattggtgtgtagtttagtatgattgctttagatagttgtagtcggaagtatttttggatcaaactgcggcttaacgatgcagtgatttatcttgagttttttgatttacctaagttgaaatataacacactcaagcattcaagctttgtgtcagaagttatggtggtcatgcttgatatattcatgttttctgggaatcggtagtttttctggggatcgttagttagtcttttgaaatagctcgagtatttatgtttgagtcaattgaatttttaattaaatgcactgtaactcctgattattcacactatgcctgtggacaaataaatttcaggaatctatcttgttgtggcaaaggaaatgtgaggatgcactgcaatccttgcttacactcggtgctcggaggcctgttcgccatttggcgtcagtggcaatggctaggattatatccaagggagatggaatttcaatatactcaagagtgagcagccttcaaggatttctctctgatgggaagaggaatgaacctcaaaaagttgctggttggttgcatacattttcacaagcttttttaattgctattgaccatgaaatccagaagcaagaaggttattgctgtgtaatgcagtttgtccccatcattaatttattgttttctgaatcaattgtataggtgttgcacagtgcttaggggaactgtatcgacattttgggagaaaaattacttcaggattacttgaaacaactataattgcgacaaaacttatcaaatttcatgaggtagtcccacatgttttgcaaatttacaaatttataatacaggattcaaaagtgtgagaggaaccatttgttaagaaatgaatttggtataattgttattcgtaatcttccactgtggattttttttttctttcttcagagtggttttgtttgtatttatctcccccatcttgttaaggacttgtcccttccaccttttcacttttaagttggtaggattatacgccttttttaggtttcattttgtcattttctttgcagcataaaaggcaactagagctaacattttccttacaattatggacaatttgtttgaatagtcacatttcctacttctttactttatgctggatgagttttaatctggcatcttagtctaattaagtgtaaatatcttttacgacttgttatttgtaatgcacatgctctaatttaattatcctatttatttaatatagtatagcggcaacgatgtaacattacttttcctttccttttctttgatatcttctattgttatgattctagctatattcatcatattcaggaatttgtcagacaagaggctctacacatgcttcagagtgcacttgaaggctctggtggcagtgctgcatcttcagcatatactgaatcatttcgtcttatcatgcgatttgctgttggggataaatcatttatagttagaatagctgctgcaagatgtttgaaggcatttgcttctattggaggaccaggtttaggagtgggagaacttgagaattcagcctcttattgtgttaaggtaagtttcttctttgtctggttctttctaaatgtatgttggtatttcaatgctactagtaagcttttttgcgtttttccttattactattgtttatgcaataggcccttgaagattctgttccatctgttcgggatgcttttgctgaagcattggggtctttgcttgctctcggaatgaatcttgatgcacaggtttctttgtcctttattgccccacttcttctttcagttagctgtttggctgaatttggttgaagtaaacactttcatattgttcagattcaattattattcttaattttaatgcaaatggtttgtactaatgaacataaaataaagagaataattgtaaataggtcctaaattggacgttcactttgctaaaagttcagaagaaggctaatctatccatctgtttatttttacatttacgatttttgaagacttgaggtttaattttctttaatcaaatgcagtttttcaagtttgaaatctaattgaaaaattatcttactactatgtaagatgtatgagtgattaatcttaaaaaacacaatgaacaattgaatttaattaattaagatatttcattttgttaacagatgacataatttgcgttatgtttatatgttagttttatttgaatgaattctgattcacgtataattgcattatcagatttcagtatgccctttctgcattctatttggttttcttcgctgtattccgttgtaatcgcaagtttgtttgttttactaggttcaaccaaggggaaaaggtcctaatcttccagcaaaaaagctagaaggtggtttgcagaggtacttaactttgcctttcagaaaaggtaatttcttgtgtgtactcgtttattgtctataccttaaatgggttaaaaaaaaagcaatgttacttttacagtttattagaatttaacttgtcgcggctaaattttgtaaaagttggggactttattgtttgatgattggcgttgcatgcataatctggacataaatgcataaaatacaccagaaaaagagaagtagagtaaattggtatacatggcattcatgcttcacagtgttaaagtactctaacaaactatttgtattccagcaagtggatctcggtcaatggacatgcgagttggaattactttgtcgtgggtgttctttttacaggtaatgcttctttgggagtccttagtgctattgtggttgactatgctttggatttagagtacctttctactcattaagaaacaacaaatagtgggttttatttgtaagagtaatgctagagacacaaaaattgtacaccttttacacacaatgatatttatttaatttctaccatagataattatatatcgataccacatcacttttaattgtggggttaagattaattacatatcattgtttgtaaatagtgtgtcacaatcattattgtatttttaattgatctagaactaaaattttctatgcgctaaatgcaagacagggatcttcttatgatgtgtgtgaatgtgtgtatatgtacatcacaatggatttgatttaagttagtttgttttcactggataatttaaatggaagtatatattaagcagttatatattgctgcttgagtaacattcctctctttgtaagtttatgaatttgctatgacaattgttggatgtgctaaatttgaagtgtgaagtcacatatggttatcttatctttttttaagatgctattgtttacttcttttgcgtttatatccgttctttacaagtttcttttgtattgtatctttcagaccattcgtctaaaatatctgcatccggatagtgagctccagaactttgttttgcaagtcatggacatgctttgcccggatgcttcagttgattcccatgctctggtatggattatttctcacatgtttctgttcagtaagtaaatagcttgttttaaaattgaaacttgattttacagctaaatcattagtcaagttcaagaaaaaaaagagcttcttttttaaatagttttttagccctacccctctaggggcaaatacatagctacaattaggtaactctcgtacattttatgatgtctttgttgtcatctgttagagggtgaaacagggaatgactaaatggaggaactgataatttagaagttagtcagcctcaatttaattcggttgaagttgaatcatggtgttgatttcttgtcattcatctcaatatttgacttatgttcaatttatcactcagttaagcagcaaccaatatttattccagctatagatctgtcaaaaagagtatcatctggataagtttttgctgattcaccgaagaagcatgtctccaactaccagataacagatagtacaatcaagaccagttaattgtaacagcctgtgttagaattgaaacttgttacattagaatttagagagggattctgttttatgtacatagatgaactttcagattttattaaatgaaattaggggtagaatatattagctggattaagtcaaatatttattccttgtttagtagtttgcttgatggtgcatccttaaatattatggagcttgggaggattaggcatttagaatttttagttttatagtgaacagttgatgaatgatgattctctctctccgtctatatatacatttaaaaaaaatactgtttgcttttatttgatgatatcttctctttgtcggtttctctaatatagctatgcctattagcaattccatcctatgtgaagctactgactgataaatcattgtttgttgaaggcatgcgttctctatatacttcgtgttggtatgactgaccaaatgacagaacctactcagagggattttttagtttttcttggaaaacaggtaaccataagttgaaaggcttattatggactctatacatttagatatcaattcttctgacgaattcctaagcttctatggtgtttctaaagcaaactttacaatgaaatttgcagctccaattgccagatgccagtccttccatgaaaattgctgctctacgtaccttgtcatatacactgaaaacactaggagaggtaccacattgattttgttaattttatctatacctcgaataaaatttcttacagatacatttatatcataactatgttgactcaattaagcctttgttcgtatctttcccatttgcaggttccttttgaatttaaggagatgcttgacgatacagttgttgcagcagtatctcattcttcacaccttgtaagctcttgatttgtcacctgcatttgaagatttagcccctagttttagataatattattgtctccatgaatttccattttcttgcaaaaagctaatgtagcattatgagagccaacactcactataaagaaaatattactgtcaaatttacatgtctttgctacaaatcctccaatatctgattctctggtctaatagtaacaagtttgagaaaatcattgtatcttggtgaattgaactccatgagcttcctggtttgctaatgcagcttaataattattgcattcagggtcgatttataattaggtattcaggtgtagatttagttaaccaactcaggagattgaaatccatttttgtttaaggggattagtgcctaaacctctctagttgttttaattgttttatgcttctattactgtttccttggtttataattgcagtaagagatggtcaattggttcttgctgtgcttttatgtaacctggcattcctttgcttttagttttttttcaaggtcatgattacagtgtttcaattttaccatttctacaataggtcctgtagctgaatgtgaatgtacaattatggccaggtacgaattgaagctgcttcaacattgcgtgcattagctgaggttgatcccacctgtgttggcggtttggtttcttatgtagtgaccatgctaaatgctttaagagaaaatctttccttcgagaaggtgaagttgtagtttttttttgaaacagaacattaatcccgtgctatattctgatggctattttaatgaccagccttgattatgtttcatgtttagattactgcaaagttaaaggatgtattcttgctagtgtttgccttttggtttctattttgtcttaccattaattacttaagttttgcatattatggaacttatataatcaaggctgctataaattattttactaaatagtaaaagggcaaattcatatacttgacctctgtaatttctcttattatttgccttggtcttgaatcacttctttcatgaataatatgtattataagtggctcccatatttctctttgcaggggaataatctgcaattaaatctgaattccttgcatgggcaagctactgtattagcagcatttgtatccatctcccccaaattacctcttgggtatccagctaggtaattactaattacttgttttatttctgatggtaaattgctatttgcccatcaattgagaggtactttttaacaaataacttcatttgctggattgacactaagacttattatatttttttgctttccaaaggaggatttcttgccatcctcatgaattctctacattattatatgcaagtggtttcatgactaattactcatttattgctcatagattacccataactgtgcttgaagtttcaaagaaaatgctgacagaatctagtcgaaaccctgtggcttccatagttgaaaaagaggccgggtggtatcttttgtcatctcttctagcttccatgccaagagaggtatccggtgatctctgtattcttatcaaaactgttggaatactgctttaaggcttatcattatatggtacgcctgaaccttgcaggagattgaagaccaggtgtttgatattctttccttgtggactgacctttttaggggaaatccagagcatgaaacaaaacaaagtgaagatttgatatctaggattcggtaatactgtaaagtgtatttctattctattctatggcactggtttttgacttgtgatgagctaacctaatacttcctatcatttttcttcttgtcaatacttcttctcattttagttttgttagaactctctcaggacctagtacattgttctattatctttcaagcttttatgtcttgcaatgtactctacacgtataacaagagtggtagctttaatttttattcttttatttcttcctgtagcatgtggtctgctgcagttgatgcacttacatcatttttgaaatgcttcgtttctcccaattctgtcgatagtgggattttacttcacccaattctcctatatctgagtaggtatgtttattgtcacaaatcttgctatcttttacatttttgtactttgtccattttttgtttgttttacatttcctttctacatagttaatttaaaaatttcttacttgacataaaacagggccttatcatatatatcagcagtatcaaccaaagagctgcgtaacttgaagcctgaaatgggcatatttattattagaacgttaatagcatatcagtctcttcctgatccaatggcatataagaatgaccatccacagcttattgaattgtgcacaacaccatttaggtgaagttatttgcatctttccctcttatcattccagttctgttttagtaaaatgtatctagttccttccaaatcattttttttagaagtgaagttgatctaaccattctctgttcttcctaatttaacttagcagggacgctgtggggattgaggaaagttcttgcctgaggtcgctgttagacaaaagagatgcatggttgggtccttgggttcctggaaggtgtccactcttttcttttctgacatcactacatcattaagtcatttttatagccaaatttggagtcctccacgcagtttctgcagtgagatatatttttttaattgtgtttccttagggattggtttgaagatgaacttcgcgcttttcaaggggggaaggatggccttatgccttgtgtgtgggaaaatgagctttctagctttccactggtaattgttgtttttatatagtttatttctttactatctgttcttgaaattataatttttgtgaatagtaataaaccagggatgatttttctgtttaaacgttttgtgggttttcaatctttcagtgacatgattagtgctttttgcagagtgaaatctgttttgtttttataaatagtgatgtctgattcctaattcttttttgctttcctatgttttgagggatatataagaaacaataaatatcgttaataatgttaaaaaagcttattatgcaaacagaatgaagagccaaaaatgacatcatttagtaacaacttaaaactactatatttagaacaactcccaaatccttagtaacttggagaaagcaaaattcttaaactccttaaccttccatctttataactgtcttagtttttgttgatttttcatgtagcctgaaccaatcaataagaccttggtgaaccaaatgctgctctgcttcggactcatgttcgcttctcaggtaggaaagtgtgataaatagttggccttttctatgaatatttcattgctaacaaaatttttgtttattttttagaagatcatttctaacaaactttatattcccaggatagtggtggaatgttgtcacttcttggaattattgagcaatgtctgaaatctggaaaaaagcaaccgtggcatgctgccagtgtcaccaatatatgtgtggggttactagcaggattcaaggtgcttattgttctaaaatgtgcacgttttagaatctttgatctacatgtaattgttctaacattaattcttaacgtcactctcttctcaggctttgatttttctacggccccagcctctaggacaggatatactaaactctgcacattctatttttcaggtgccaaaatttaagatgcttgcactatatgtatcattgattgagaaatttatctatattcatgtactgtaactttttttatttggtagagtattctggtagagggagacatatgtgcttcacaacgcagagcttcctctgaaggttttggtttcttagctcgccttggaaatgatgtctttacagcaagaatggtcagttttgcttctgtattctctctctctctctctctccaccaaatatttgcttcttgtttcattatttatttaatgtgaaagaaatagaggtgctcttactttctcatattcctcacttacacatatatgaactcactgttgctatttttggtggtatatagactagattgttgcttggtgacttaactggagtaactgattcaaactatgctggatcaataagcctcgctcttggctgtattcatcgaaggtgaaatatttatttcttttaattttttccttttctatacccaagactacatgtatattatcatgttaaccattgcctggtggtattgtcctgtttgatctagaatcattacctccattgctgaattcaacccacaatacacaaagaagttaaatgaattctttctcacttacacaggactgtgcgggcatgtgtgtgtgcatatgtctgatagacttcctatcagattcctatata

SEQ ID NO: 14093 - DNA, 5634 bp, Cannabis sativa
  modified_base (92)..(104): a, c, t, g, unknown or other
tttgtataaataggggttcaccccattagaataaacaactcagaaattctcattcactttctctctctctcttcttcttctttcttctcatnnnnnnnnnnnnnttttatattattttataacaggtactacttgcttaatatttttgagctatgcggtaactcaatctctaaattacaacttgaggatggctcttgggtgcattgggatttagggttagcagaggtagtagctaattatttttcgtgacttatttggtgcttcaagtgtgaattgggatgagatggttgactgtgtacaaccatgtgtttatattgatcaaaataatgagcttttacatccagtcacaacagttgaggttcagaaggcttttttttcaaatgcaccccgacaagtcttcaaatcctgacgagatgacttgtggattctaccagaagtgttgggatgttgttggggaggatgtcgttggtcaggagcaaagattttttgagcaagtagtctttcctatggggctaaatgatacaaatgttgtgctaatactgaaaaaaaaagcatccagtaaatataggggattcgaggcctatctcgttatgtaatgttctttataagatagtctcgaagattttggctgataggctgaaagtagttcttccttggattattttgaatactcaaagtgttttttttcttgggtcgtctgatatcagataatatcatgatttttttttgaagttgtgcactacttaaaatgaaaaggagagggaggaatggtcacataactttaaaacttgacattagtaaaacgtatgactgaatagaatggggttatctttgagcaatcttggatagaatgggtttcgatggacattggattaattgatcatgcaatgtgtgccttcaatggcacacactttttgtttatggttgtagagagataagacatgttataccatcacgagggatacgacaaggtgatactattttaccatatttgtttatcatttgtgtcgaggggttttcagctcttttgaataagtatgaatcacaagggggtctgcatgggtgtagggtggcttgagtagccccaatcatctcacatatgatattcgcggatgatagttatgttttttgtaaggctattgagaacgaggtcaattgtgttatggcgattttgggcaaatatgaaagagcttcaagacaaagaattattttgacaaatctttggtttcttatcgtattatagatgaaacaatgagagatctcatatgtgataatatgggcatatatgaggttgttcatcctacttgggattacataatactatggggagaaagaagactgatatcttggggtatcttaaagaaagaatgaagaaacatgttcttaggtgggaaggacggtttctgtcatgagctggcaaggaagttctcttgaaaatagttgctcaagctgtccctaattatgttatgagcatgttcttgctgcccaaaaagacttgtaatgagttggaaagtctaagggcaaagttctaatggcaaacagggtgaagtcataagagaaacatcaattggttaagttggtatagaatgtaatcttcatgacaaatattgcaatgttgggtaaacaagggtggacattagcaagatttataaggtacgatactaccctactagttcaattcttactgtaactttgggtgttaattcaaatttcatttgacgttccatctttgaatctcaatagcttcttttggtaggggcaagacgtacagtgagtgatggatctactactggtataattaatgatccatggctatcttgtgttattaactcctttgtcatttcttcacatccaagactgttagataagaatgtagagagttttataagtacttaagggagattttgggatgctgataaactttatgacctttttgaggtgagagatcaagagcttattatgtctattcaacatacctctagtgtggatcaaaaatgttggtcttggaagtttaatacacatggcagatactctatcaagagtgcttataggtacttacaagttctgaagggtggttggtgtgaagataatgcaacaagtttctggcataagttttagaatttgaaaattttgccaaaagtgagtaatatggtgtggagggttgtgtttgatacgctcaccccttgttatcagctgtttaagcaccatatacctattacttatgtttgttagctatgtaacctgtaagagaaaacaatcttacattgccttgtaatacacagttagcaaagttcttgtattgtctcataatacaaagatcttgcattgctttgtaatacatagttagcaataaatcacctcatagtacatacttagcgatgcatcttctcctattacacaatagtgatgtatcacctcgtactacacaacaatgatgaatcgtaatacacatcagtgatgagtcacctcgtaaaacacaatcagatgaatcacctcgtaatacatactcagtgatgcatctcctcgtattacacaacagtgatgcatttcctcctattacacaacagtgatgaatacctcataatacacatcaatattaaatcaccttgtaaaacacagtcagtgatgaatcaccttgtaatacacatcagtgatgaatcacctcgtaatacacaatcagtgttgaatcacctcgtaagacacagtcagtaatataaacagttatttatccttatccaaatgttcagttatatgtgaaacgtgggcattaactacccatcaattgtaatttttcactaagacaaggttgagtaactaccattatattcttataaatagggattcacttaaagggaaaggggagagaattctgatttacaaaaactttgtcaaattgtaaacacaaccaaaactaaaaaataatgttgactcgtggagtatgtagatttaactacaaagccacgtaaaaatatatggtatttatttatgattctttgtctattattttcttaaatttattcttgaactaataattttcttagattaagttgacaaaaaatcgcgtcaacaaaattgtttcaaagtgcttgccaaatcggttaagtacttatttgggtttggtgacttctaatttccaaagtgctttcaccaaaggaaggttaatacatgacaatgcgattgttggctatgaaatgctctattgtatgtggaaaaattagttagaaatggggggaagatgactctaaaactggacatggataaggcctataatagggtcaaatgagttttctatgggctatgatgcttaaattagaatatcatgtggattgggttgacaaggtaatgtgttgtgtgacctctattcaatttccctttctcattaatggtgagattcaaggcaatgttttcttgaagtgggggctacaacaatgcgatctgctacccccctttttatttctcttttgtgctgaggcattttctaatcttatttaacacgaggagctggctggtaatttaaatggtctaagatttgggtgtcaaggtttattagtgtcacacctctttttgtggatgatagtttggttttccttgatgctttagataagagttgtcaatgttttaaaggggtgctgaataagtatactaaggcttcgagacaagtggtcaattttaacatatttgaagcatgctttggcagtagagtaaaggtaggacttcgtgtacaatggctaatttgttgggggtttaagtggttgaaaatcatggtaagtgcttgggcttaccctcatttgtgggacagaacaagaaatagatctttgatgttatcaaaaataaggtgtggaataaattgaggggaaggaagaattcgatgttttcaacgactggcaaagaggtacctattaaagtaattgttcaagctatttcaacgtacatgacgagtagttttaggctgctaaagagcacaatttcaagtcttcatcgcatggttgctagattttgatggagctcataaaaaaaattcaataaaactcatggtgtaaatggtctcatctttgcaaactaaaagaccaagggggttgggggttcagagacggaactgtccaaatcaagctttactagcaaaatagatttggagatgtattcggttccctacaaaactttgtagtcgggtattgaaagcttcttactttctgaataaagtagtttgggagggtaagtgtggctctcgtgtgtcttttttgtggagaagcttggtttaaggaaagtagattattttaagaggttatcgatggagggtaggcaatggtaaaaatattcgtgttttggaggaccctttgttaccgagaccaatgagtttcaagatttatgatgtgccattcttaccgaacaaattccgttgatatcaaagcagtctttaataatgaagatactgagctgattttgaaaattctttgtgcagagagaaatagaagataaaattttcagacactatgataagaatggagaatattgtataaaaaaatagatatagaatggcgtgtgattaaggcgggaagagcagcaatcagatggaagttctatagtagcatggtggaggaaattatggaagctaaaaattccattcaaaattaagcactttgtgttaattatattttcagtatctttaaattgacaaaatattttataatttaatttttaattttagctgagttgtattatttatttctatatagttgtatttaattgattaatttatttaaggtataaaaagtgtctaacttttatttatttagaaagtttgtcataaacactaaattttgtgaataaatcaattcttatctctctattaatctaatcctatatgactttcctatttggattgataagatttcttgtgaagaaactcgaagcaagactttcattttctataaaaagaaagtcgtaattactactcacgattttgtaggggacagaagcaaaaatttagggttgattgaagatctattttaggggagtgtctagtgatctgtgttcttgttcagatcgtgtatgagctgtcaataagatgtatattaattataaatatatcttataacagttaggtattgtattttttccattcactttcaattgtgttcatatctttgaaaatgagagttttgttttgtagagaagagtatgttcgtctctttctctggtttatgtattttatattgtattgagtctgtaatcaagtcttcaacagaagaagaacatgataatgttggtatttttttttgtctaacctgaggttagtagtagggacagacctacttgcattcatgtggggctatgtctcccactaacaaaaatattgctttttaaaaaattaaatgtaattttttttaatttgataattatagattaaaatagtagaaaaatccccacaaaattaaattaatctaataaaagtgattataatgcaggtataaatatttttaataataaataaggccccataaaataaaaatttttgatccgtcaaaggttactagaattgcccatgtattagcctatcaaacttggattaacaaaggtggcgtttagtaacacttttttaatcagttttctgtttttaaaattaaaaaagtaaaa

SEQ ID NO: 14094 - DNA, 7082 bp, Cannabis sativa
attataggactttggacacttaagtctcttaaccataataaagtttaatcaaattgataggtatttgctaagtgaaaccagcttacatgattagaaattagatagtagtattctaaaaataaaaaattgatattggggctaatgaaacactccaccaagctagaaagaaaaacatccaattattgcaactgagtaaacacatcactcacaatttcttctgaattatatagtatctgccctattaatatggaaataattgagataggtacatagcggagaagggttcaatttatcaaaattcttagaagttcacttgcattaaaatggttatacaaaggtatacaaagaagaaaaagagagccctcaagatgaggttggtgatcttgcaatacaacgcagaaagaatttgactcacccaaatgtgtaaagtcattgatctctctaatgtgggggactcagatagcatgactttctttcatgctcagtgctgcaaatcaatgaaaagagctattaaaaaacattttttaatttctttcgagaaatgatggaaggaaataagatagtacaaacctccaggatttcaaatgcaacgaggcaggcgctgcaactccatgccaacatccgaagctgcagtaattaaagcaggaattcctgaactcttgagctcagaaagaagagcttctatctttgaaatctctggtatggatatagacagtatcattgcttgtgagatatattgcttacaagcataaccaagagagtgtagcattctctgcaccagtaattgagaagtgcccctactactactccatgactcaaggatcacaaggaccttttgtagattagttaataaaccagcagtggcttctcttggagctgacttgagcagcaagatcaaacattcagaagctatatctgccaaatttgatccatgatgtccacacaactccagcaagaccgaaacattgcttccaaaatctgcaatatctctaataccatactgatcatcaactgcactgattgcctgagcagtactgtcacctaagagagcagcctcttcagtgtagttgaagtctttcctactggtgactgcacgaagaagaaaagccttgcagaggccaagtgttggttctaggaaatcttccatgtccttggcgtaaacaaactccagaagattaccaatcctccttgctacctttaagtcagaaagtaacttggattccatttcgggagcagaagctagagccagacaaagcttgacattactatcatttgcgcttgagagatcgccaagcaaaaactcaaagcattgtgaaaccgtcttaagatgtagaatgtccggaatttttatgatattgaactctatgagcatcacaagaagcttttgtgcatacatggggatgggatcttcatcctcaataagagagggatagaggggaaggaaatgcttgctggaaatgagctccaaatcctttgacctatgctccacaaaattttcatttaatagattaatcataacatcaaacaaaattttcagacacaaaaatctggcatcaccatccttgttgcctttatatagaacagccaaactaggaaggatttcacgaataaaaatgtcagggctttcaacaattacaggggactcctctgagacagattcaagtatcctgaggagggatatttggaagtcatcccgaccctgcaactcaaatggaaagatatgcaaagtcagcgtactaatatcaatcacattcaaaatctttatattgtttgaagatgtaattgtgctcactcataaataaaaaagtagcaaagatgtgctgtttcagaaataaaaaaataaataagaaatcagattactatttgggtcgtggtaagaagtcaagtatacaaatcgtaagtaaagtttaaaatccagaatgaatactctcattttaaaatatgaatgagtttcaacttcaaagctactgttaaatattcttttaataacttgttaatttatatccacatggctagtttcttcggagttaaatagtgtgaaaaacttgagagggtttgttatgtttttttagttaattacatatatttgaaaacgaggcatgtccagaatacaagaataagtataacatggtctattactgaaaatgcacaagtacttaaaactaatgaaaatgcgttaattgctctgttacttcagctacctacctgaaatggagactcagcaagtttaattagatttgccagctgctgcagcacctgaggattaactaccttgcgcttgaaagatgagcttcccagtaaatgaagaaccacaggaagtaactgaatattattctttgaagtagctcgactggaaaggttacctgtgtgaccatggcgtctcccccccataatttgttgaatttctccagttatgatatccaataacccagaaatagtagaagcaacgacatttatgaaagcttccaagcactgctgcacgtatctatccttttcttttgccaatctatccaccacagaaagtagtcttgcattgcaaaagaattgtggcagccacctcctaccattcttacaaaggagagctacaaaaacaagtgcttttcccttcaaaacttcactcccttgttcaataagagacagaagacctggcacaagattcttatcctcagccaatggtaaaagatatctgccatttgtaaacatttgacttccattcatggctgtatttaagaggttcaaaccaatttgctgctcccgtagactacccttgataagggccgttgccatgtccttaaaagaaagcttttctacaactgattgaatgctttgagggctgaaacaaacaaggcggaccagacatgaccctgcagtaagcctcacactctcctgttttccaacagccctgtatatatagcacaagttatttatcacatcttggctgttgaaacgagacacccagtatgctccttgactaaaaacgttttctattgtcctcaatgcatagagttgagtcatatcatcctctcctttccgcagaattgatgaaaccaatgaaattagtgaatttgggacctgcataaaaaaaagtaaggctaagaaaataaaaacataaaagataggaaataaaccatccaacagccagaatcatccccaaaacaacataattaatttaagacttcaaattatgaataaaaatgtaataaaaggtcgagctacataaaatgcgaactgggttttgaacagtgagaatgaaaatataatttgtacacagaataccaatcaagttatcatgatcaggtgtgctaactatgtgatatatgactgcaaaaaatttggacgcttacctgccagccagatgagggcttgttgtctttcgatggagattctaagggacatttttctttcgtgtgctcattttgggtggatatatagaataacagctcccctaatgcagccatagaaaatctccgaactttttcttgtttatctcttagtccatctgttagtgaacctaaaattccagaatttgctaaactgtcttcaataaaagtggaatgtcgaatcagtaaaccaatcaatgaagcaagttggatacgcaaggccgatactttggacagccggagcattttaacaagcatgagcattattgggccattggtcaagagattggctgcatcagcattagagctcaacatctcaaggtatctgatcacattttgtttctccataatgctattatttccatgcagaatggctacgatcttattattgaatgcatcaagagactccttagatatctttacaaactcagatgtttgcaaagcctcaaagggaagtgagggaagcacctcgagcactttgtcagacttcctactgggcattacaggtctcactgaaagatctgatggatgccaaagagcctgtgaaagcttatcagatgactttgttgaatcagactcgagaactgatcctgcagcttctctgatcctctggtttttaagttgaggactataactgggcaggggggttgctgccacttcaatgtgatcttgagaggattcatgttccaatgttcttggttcctctgtggtagacacatcacccacatgtctggtatctgattgttgcgtgttttcaatctcttcagcttttccttgatactgattctcattagtcaacttatcttcaggtgtacaagcttggttgtcagttccatcaacttcatcctgtccatcatcttcagtgttctcattaaaatcaagttccatatcagtgttctcgattttgacttcagaatcattttcagtagtagtacacatgggtctgcggtagttttccttctcattctccctctgtaaatttgattttgctattcttgagagtcttaaaaggttcacacccctagcagcaccagaattaatttttggtttctcttcaagaactctaccagcaccctttggttgaattctacgactacctggtgtattcttaacaggtgtctcagaaccttttgatgccaaaatagaattctcatcttgcttgacagcacctttaacatttctttcacgagatttaggaggagttctattttggtgaggtttattatcaccattacgctctgtgagagatggcttctcagatagttctatcatgttatcaaaagcaggctgagatggcagtggcactggagttaacttgcttctccagaatgcatgtccacaaagctctggccactgtattctttcagctggatctttaaccagtaaagaattgattagattgacaaaaggacgactaggagaacctggtaaaggtggagttgggtctgagagaatagattttactagttgagtaaattctcttccaacaaaaggaggtctaccagtatagcactcatacaatacacagccaagagcccaaaaatcagaagcatatgaatgaactcctccatcttcaaataactcaggggccatataagaaggtgttccacgttttgcttgtggcaactgaatataagcattatgatgaaagctccagtcaataatatttatgcattatggaaataaaggatttagattcaatgattgaaatataatgtgtttaatgacctaccgaagaagaaggaacttttgatatttcattcagtcttctagccaagccaaaatcacatagctgcattgaacaaaaataaaagctgctggttaatagcctaagcaaaaacattccaaaaaaaaaaccacacaacaataaccaccacatgacaaaagatactgtgttagtacctttgtcctcccattctcgtccattaggatgtttgaaggtttcaaatcacaataaatagttcccttggaatgcaaataccttaacatattgagagatcaaaaagagttaaatatatgcacaattccagtaagagatgtttcgtgtctaaaatatcttactgcaaggctttcacaaggtcatgagcaaaatcatgaattgagttctcaggtagctgaccatcctgcaatccatccacaaaagttttaatcatataattctgaaatgtggcttcgtccattgctataaaagtcatgacttcactatgtcaattagtgaacacacacctatctaaaattttgcacccccaatattcattaatgacctcaaatttaactgagcaaggtccataaactaagactagacaatgccaatctaacaaagatacacaatatacattgtcacataatttttacgaatcattattccaagaacaagctggtcataacaaacatattaaaatccataaggcttaagggggtaagacaccactccacttcaatatacttctacaactttcttttttaggatttcgcaaacaagaaagcccatacttttttctatcttcttctttctacaaaaaaactcaatcagcaacaggttgctattgagctcttccttctacatatacatacacaacacacttttttatctgatttgaagtaaataaacaaaaaaagaggaagaataatacaatcctaacgcacccaaaagtacattaagcttaactacctgttgtaataaggctctaagatctcctccaacacagtactccaaaaccagccacaagtgagcagaagtttcatacctggataaagaaaattgaagaagagggcacaaacaagttccaattgacataatccagaggttaatcccgataatacgtcccatacagaagaatatgtattaacatatatatatatacacacaaaattgacaattcccatagcaaggcaatgtagaacaaggactcaccaagaataaaacttcagaacattttggtggtctagggaatgaagaattctgacctgaaagtagtaaacaaaacccagaatgattatcattaaaacaatcaaaaaccaagaaaataaatctgtacgaaatgactagtagcagcttacttcttgaagaaccttgttcttctgcgatttatcgacacttttaatggcgtaatactcaatggtcttcttcttcctccctttatacacagtctaccaacaaacaattcaaatacaatcaaagacacattcaactgaaccatcattcaaccaaattgattatcgaaatttcaaaaaatctgagagagaaaagggaaagggcattgttaccgagcattttccatgtccgatggcttcgtaaacgtggtagtgattcattgaaagactcaaccgagacacaaggacgagagaatctagtgagagagaaatttagagagagaatctagtgagagaaaatgaagagatttgaaaatggatttttttttttttttttttttaagtcaaagagaaaagaaaagagaggaagtgaactgtgtgagtgtgtgagcgggaacgggaagggaattgaaatcaaacggggaattggaatatgcttttccgagtttatgtttggcactgtatccaaacggagaattgaaatcaaacggggaattggaatattcttttccgagtttatgtttagcattttttctccctaaattttgacatgtactaaattatgtctctgaatttttttagcctttaaaaattcccataaactattga

SEQ ID NO: 14095 - DNA, 10289 bp, Cannabis sativa
aaatagctataaataatttttcataattaaacatgattaactgctaatttttaaattaaactaagcggtctttacacgtggactatgtagaatttcaactggaaaaccatgtaaaaaaaccctctgttcatactttaatttttacagcttttatttttctatgtgaaattactactgcgaggctcaaatttggttaacgaaaatttgcgttaatagagagagagagggggctgccttaggttttttgctgaaatggtataatattggggctgccttaggttttatatattcagtataaaaaaaagggaggggggctataccctacaagtttaaaactgtcgggtatatgggtttaattttttttcttttttttaacaaaaaatcgtcgcctatttatgtaggcacggttccaaatcatcgtgaatgctcattttttccaatggttttaaatagttgctcaatttttttagcgacggtcctcaaaaaaaattgtctttaggaccgtcgcgaattgtcaattttgtagtagtgggtgtttagcaaggatggagttatcatagtaggatatgccataagaagcaacacaggagccatcacgtctagatccaccatgaaaaaatctatttctttctgtccaaatagcacacataatacaaatcaaagtttgaaatttagttttagagtacatcgtggatagatggatcacataatattcgtcttgcatatgatgagctttctggcaatcaatcacaaaagttgaagctttccaaactgattttgcatacagacaagtaaacaaacatgtcctatggattcataagcattattacatagtgaacatgtcatcgagtcaataactttcctcctttttaagtgtaacaacaacaggtaatgcactttggataaccttccaggcaacattttttatcttgggaggcaaatttaagttccaaaagtttttctaccaattactccgagtattagatgtggaagaatcatctacttcagcaatagagtcggccaaatgaaaactggacttgatcgtatagacactcgttgtcgtatgatgacaaatgagtatgtcttaagtttggaaataactcaatggtattgtaatgatcctatcaacattaattggagcaaaatgagtatttagtaaagcaactttccatttcctaatgtccttaatgatcgggtatccaaggatcgataccacaagtgatgttgagtctattcccaattttgtagcgcatgcccttaataagcaactctctgcatcaatgcaatacctttccatgttaataaaggagagtgaccaagacttgcttccaaaaaggattaattagagaaatatttatgcttcaatagctggctaagtagagagtttggtagttcaagaatacgccatgcctacttagccaagagagcttggttaaaatggataaatgaacaaaaacccatacctccctcaaattttgatttacaacgaagtttccatctctttcaatgtatctttgagccattttggttggatcttgacaaaatgtttgccatcataggctctaactggtcacaaaactttattgtgagacgaaagcaactcatagcataagtgggtatggattgaacccaacttttaagagctcctccattctgccaatagataaaagttcgtcattccaagcatgaagtagcttccatatcccttctttgatactactgaataattcagttcaatcttgtcctgcataagctggtaaccccaagtaggtttcaggacattcacatatagtcatacatagtgtttaagagaaaaaggttctcgtaccatcttgtgtgatcagggaaaaggacatgacaaattttttagtgttaagaaactgaccagaggctatataataagggtccataactcaattaatggcccttgttgaattctcattgactcgacaaaataaaagactatcgttagtaaataataagtgacagactgatggaacgtgttttgtgagttttaggccttgcatatttccaattaattcttcatgttgttacaatcgacgcagtcctttcgaacatctgagaaataagtatggagaaaatagatcaccctgacataaccctcttgatggagtggcattacccactggctctctatttagtaaaaaggataaacttgtagatgataaacaattcatgattaaaaaaatccgtttgttgtaaaaccccatcttccccatcattgatgataaatatgaccattcaactctattaaaagttttactcatgtccaattcaagagcaggaaagccattccttccctgggtcttatgcctaagatggtgtacaagttcaaaagccactaatatgttgtttatgataaggcgatttgaaagaaaagcgctttgcatttctaaaattacatttgaaagcacctccttaaaatgaataagcaagacctttgtgatgagcttataaatcacattgcataaacttaatgggcagaaattacccataactagtggcatttgagtttttggaataagggtaatgagtgatttgtttaacaattgcatatttgccccttcattcaaaacttttagaacaactttggtgacttaaggacgcaccacttgccaaatatgttgataaaatatagttgacgtaccatcacaaccaggattcttatccagactcattgaagtcagggccgagtaaacttcgtgacttgtgaaaggctgcagctgtgtatcattcatggcttcagttatggttgtagggattgttgaaataatatgatctaaggcagtatcatctatgcccaaagttgaaaacaattcctcaaagtgtgtagagataatatgagccacactgtgctttgtggtgaaagggacactgtttgagtcattaaggaatttgattttgttgttcgacttccctgaagaggcataagcatgaaagaattttctattttggtcttcacattttagccaatcaatctgtgatctttggtgccaatatatttgctcctaagataataaatcatccaaaatgtctttagctttttttagttcttgtacatctgatctcaattcaatctcaaaattattcagctttaatacttcgttttactttttgtagattttttgcttcataccaccatatttttgtgagtgccacttttggagttcatgagtagaagcatccaaattagagatgaagttctaaataactgtacctggttgaacctatgagtgtaaggcttgaacctccaccgagatttctctatgattcgaagaaaaatagacaagatgatttgtaataattggttggaaggcatatgtccaatgatcattgacaaaacaccaatgaggtcattctttaatcgtttgtatgaatgtctgctttttgcccaaatgaaaggatccccaacatagggtagaacattcaattgatagcggtcaagaacaaattgaaattgttccatttgagcatcattccttaaaagtcctcctatttatcttatttcgataggatctcattgaaatctccaataagtagccatggcagaaatggagaaacatcttttaacctttccaaaagagcccaagtatgcactatttgttgtgtttttggtacgccataaaacttagtaaagtgccaacttaatcctccatagaaagccatgtaacagtcaaaaatatttgcattaagattgagaagagttatatttacatcatccttccataacaacataagaccccaacttaagcctactctagggacttcaagtccattaataaaatgtaaactttgacgaaaatgaaaaatgacattacaactaagtctagtctccatgaaaaataaaaatgaggggaatgctctttgacaagcaacagaagatggtagaaagcacctaggttccctaatctcgagcattccaactacgatctttatggttgagcgcggggctgaagaacagctctcgtagagttgtcttgggaacccgccaaattcatatcatcattagaaattgttaggtttctttcatcttcaacagacaagtttgtagtgaaaagtgatgttgtagtacctcaacactgcttcaatgtttgcctcaaggaaaacccttcttgttgtctcttaaccatacggtttggtgacacgttttcttcagaacctttattagctttagaggcatccattatattgcaagaaatcgtgtagcatggccacatactagccatagtggaggattgtgtggtagaagctagaaatatttgtggagatggaggatatgtagctacaatattttcaatatttctgaggtctagcatgtatatatcagacaaatagtgaaagaagcacttgttgttactgatgtacactggtttgtggtgacaaagaaaggtactattacaacagaagagtgtttcagggctgaattatcattctggtttgtggagttgatgtgtgttccaatggtggtgagtacatcaatgggtgtttgttggccaaaggttgtgttggcagtagtgttttgtagcaaagttgagcctgatttaagaaagctactggtgtgttgctggtgtggatctctttgtgacccctgtggaaccatgattgtccagttaacagtggtgattgcaacagttagagtttatttagcatcaatttgaggtgctgaaaagggtagcagattagtttgcccaagattattaacgctctggtatgttgttccaaaaatctctcttagacctttattgaaacacatttgcaaggttagcagtgttaatgacatcaaaagaaatttgttggccaccaaacgggacaactttagtatgttgcagatccgttggaccaagaagttttaaaattacttgtgtgtttttttattaagaaacctttgttcatgactcattggcgcacgatcaatattataattagtcagtggtacttgttgatgatgatgtggtccattcccttgtgtaacttggactagtggggtgttcattgtactagtcgagtgtagagcagcatatggagccataggagaattgttagaaggattgaaagaggattctccttctaataacgttcgtggatgtggcgaccctcataaagcaagagaaaggacagtcgaaactatggatgtcctagcaagtcttgtgagtagaggccatgcattacctttagcaaaatcagttctatagcgatcatatcctgatgttggtagtgcagcgcctttaagttcaggcccatattccaagtcagggtcgattcctccatcaagtttttccataaatattgggcacttttggaagcgatgtccaagaacaccacattccatacactattcgagcaatcgttcatagcagaattctgctcaaaaattgtcttcgatttttcgaagtttaatcattttgccacatatcaatggtttagtgatattgagacaaacccggatcctaataaaggaccccaacctcattcaagaaatcttcatgaactttaacaaacttttctattatatcaccaacctttgtggccaatgctctagtcttacttaagaaatgtagccgatacacttgaacccaaaaaggagagtaaattagatcctcaagtgtgacattttgcagagcagttggcgtctgaagaacaatgtgatagttttgaaagtgtaaaggctcacgagataggttgcgaaacttatgcccttctcaaccaagtaagcataaacaaatcaaagtgtagttcagagatcttagtgtggaaacagccatccacatgctcagccatttgtctttggattgttaaaatccacactttccttctcgttaacactttagcaactagaacaagattagtgttaagtgtcatggtggaattcatcttatcagcgagagaatttatgataccaactgtaacatagcagaccgatcaatataagtaacctaaaaagaaatttggaaatacttcagtttgaattgaagggaacagtttaaacaacatggaaaggatgaagaaggagagaaattgcagaaaaaaaaaaaaaaaaaaacggtaatggacaataaactgccacatagcactaaagcatgttgggagtcataagtagcattaacgatggaattgaaaattggtgaaatccataaacaataatagaggggtagaacagtaaatacaagttaggccttttttttaaaaggaaatacaagttagtccactgatgcatccaatgaggaagaagatggaccacattataacctataaggtagttgactggtcagatgagtaagttctaatactattttgttggaattcaaaacacattaaatggcatcggaaaattttcaagctaacgtttcatcacaatcactcgtactcaaacacattttcatctatagctttcacacaaacatccattcccaacttttctttggcaaaaatagtccatgtagcctttatacaattttcaaaattacataaaatgtccttttatttatttattttacccttgaatttctaatatggagtatgaaatgaattattttatgagattttagactttggactagaaagtaaaaactacgtcattgtcagcaaactctcctagttttactaggtactgggtcttttcgtatctattgactaatgtaatatggaaagcaagaaccatgttgcttcctactcttaattatattctttacaatggaatatcaacaaagcacatgattttttttaatgatacttttcgtatcaatgctgtattttagaagaataacatatcacttttacaaaatgggtgttgaacagcattttaaaggccatttttttagtgaacctacatcatttcgtaaacaatcaagggtacaagactaaaaaacttttggccacaagtcaaaacacctaatctttatgagtagttttgcacaatagacagatatcaaattatacctagaaattgttaaagtttgtcatatgaacatcgtatattgtcttcttagagtcactcatgctaggaggccaaaaatattcataaatcaaaaacaaaataatatcaagaatcaatacttattgttcgtttaaactatatatgtatatatgtgcgtacacaatactttctctcatgcgtttgtcacggtctcttgacgtgtacttatgtgttttccaaatcatgagctggttggacttgtggtacaagtacagtaactcaagctaattgatcagcaatacagaaccatatggtattcctataactttcttttttctttatcaccttatatttcaatgaaagaattgttttaacatatttccaacaaaaatgggaaccatatataagcaagaaagtacagcatgaggtgggaggatgcaggatgttaccactacaaaacaggcactggaatggccatttgtacggagacatcacccgataaagctgaatctctacttgtggccgaatttcctgctaaggcatatcccacggcgaggccaccataatgcatgactgtattctcgcatctctggaactctctggcaagagaagctgcctttcttcttgctcgcttcgtaccggtaaacaacaaattttggagcaaccccgccaatgatggcgccttaaccaccttttcttttgtggtagccccaccactcctgcataactcaagcaatgctgcaactgcattctctttaccctttgctgttccataacgcatcatactgatcaagccagccacggccatttcctcattccccactgcttcggccccacttgcctgcctaacaatcaaggccaaggcacctgctgcttcctcagcaactccttcatttctcaatgcatttactagagctgtcacagccctcgcctctatcattctcgcacagttatcaatgtgcgttgaaagattaaataatgctgttacagcatccttctttcctcttggagtaccctctctaagcaacccagccaaggcttctattgccccttccacgtatgctattcttttcttgtaatcatggactgctgaaaggctaaacaaagttgcagcagcattttccctggcctctgttgtttgcccaaacctgagaacttcaacaattgattctaaacacccttcttcatccataattcggcttttgttcttgtcatatatagacaggttaagcattgcagtgacagaattctcctgggcaacagggttaacagacaaaagaattgttcgaagatgtggaattgcaccagcttccgcaatgaaagcacggttttcccttcctgttttagctaataaacgaatctcgcgagcagcaacagtctttgcaacttgtgatccatttgcgagctgctgaataagaagagctgctgttgctctgttagcttcaagagcagccttagttggggaagccaccacaaagctttcagtgcactctggtgggtcataagggattccatgggcagtgcaccactgcataatcaaatttctcagtgcgcgattgggaaagatacaggttttaataagcatttggcccgtctttgggcatgtacagtgaccctcttccacccacctggatatggatcttcggtcataagtctgtcctgttgagattatcacagggtctcgcatcaaatccaatgaaattgggcagcaaaagtccttcgggattgttataaaagtgtctgcaatttcctgtgaaagaatcccttttctcagcttcttcagagtccctcttcccaactctacttcgtcctcctcgaatccaaataacaaaaacctggaataccttgtaagcgccacaaaaccattaagaaccccaactgtaggttcattatctccctcgtgattcacaatctgctcttccaaaaactcaatctcatttctacaactctttgggtcttgaatccgtaatctcaccacaagaaaggaacgcaattcatccggatcaggaatttgactattctcaaactgatcaagaaatctaaagaagcgaatcctgagagcttcatcgtccttatcaataaacagtttagcacttctggactgcctccgcaagagttcaacttgctccctaacatcgtccccgagttcaacatcttccatgggaaaaacatctaaaagggtcgaaatctcttggttcaaatcatggaaatgacccgaaatcgaatggttttgaagcaaaagccacaacttactggattgagaacaatagtcaagaagtattttggagcgatacagaagcaaataaagctcctttaaacaaagctccgtcgtccatgagagactcaaacccgaatctctcatgtactccaataataccagaaaaacttccatttttcggacgagggagcgagaattcttcctctgaaagtagaaacgcatgtcggaaaatgatgaaacgatctcggctgtcagggaagcaagggtttgtacgagagcgacatctgtaaggtcaaccggagccaaaaatgcctctaaagaaggcgatcttcgcctccttaacgacgagaatatcgccgccgaagccatcctaaacaataataaatttactataaaaaaatcccctacccagaacaacaaatacaattcataaacaacccagttactcaaatttctctttccagacagatattgatagacaaagaacaaattgaagagaaagagaaactcaaataccaaaaggggaacagagaaaagagaaactcaaaacacccaaaaccgaagacttttatgcagtcttactcctccttttcttctacttcgtcgttattattggtaagctctggccgaagtttgaatcctcaaaagcaagagagaaagaaatatagacaaacgaatgaattcacaacctaatatttttaaattaatttaattgaatggatatttaattaattttgttgagccgaatccgcgttctcccgaaaagactgttgaatttgtaggtgttgggtttctctctccagagaaattcatgggtgaaaactgaaaaggactggaatgggtttatattcatacatattcctgtccattcgttttcttcttacctctccttactctacagttacttctcacccgtatttattattattatttattgagttatttgcccaaaacttttttaaatggtcaggtttttgcaactaatctccaattttaaaatttttgcgataaatctccctaaattcaagttctgttaacacttagctcttttcgtccatttttagctgttaaataccatggtggaatgtccacgtgtacacagtgtacacgtggcacaattttattagtccatgtaaa

SEQ ID NO: 14096 - DNA, 7116 bp, Cannabis sativa
caatgaaaataagtttcaaaaatacatttataaatggtatcaatcacaaattgatgtgtcatcttgtacaataacttatcatagctaactggaaaaaaaaattacctcgttaattcctaattactatttgattattgctttatttcttggagccatttgattgagcaagaagtgggaactgatcacaggtaggtactaattaaattaaaaaacttgttgatcaataaataaataagaaactttggtaaacagtaactctttcaggtttgggaacattacaaagttgtgacttgtgactgtcatgaatataacaaatgatataaacaatatattcggttcaccaagaaagtattaaagtgtacagtgcttcatcctttattggtcaagcacgttcagtttcctcacagctttactacaactatccttagggtgatccaataatattattgtttattcattcactatttcgttgaattaactacctttacaaccgttacaattctcagaaatcggttgatgacactatattgttttattatctattctgaaatgttgcctatatttccatcgtatgccctgcttcaagtaatttttacatttccagttcctacaactaacagacctcgtatatgtcagtcttaactttagacaaaccctcctcattattgtattccctatgtctaggtaactctacgtcgatatccaacactatgtttggtaaatggaagagcgtgtggatagagaaaaatgggaggagatgacaaattcccttgtttgaaagaaagattgtgagggaaagaatagttgaatagagagcaaatccttccaaagttttaatttagaattcttccatcactctaatcttcaattgttgaaaattacaaatatatcctcttaataaattattaaaaaataaaattacatatgaacacaatataataattccataaataaatattgtccattcttctatcactccatccctttcactaaacaacttaaaaagattttactctccctccctcctattctacatccttcaactctctatcctccttatccttcatccttcctaaaaaaacataatctaaaaggaaacttgaagcaaaaaatatttatttgatttaccatatctatgtcataattcactaaaatatattacacaaatgaaaaataagggccaaaatacctcctataacaatatagcagcattaagaaatatcactacgctgaggtgcgtgtaacactgatgaatgaatgaaaaggaaagagaaggaaaccttttaacccgacctcaactctggtccagtagataccttcctgctgtctaattataagcatacatttacacaaaattttacataatttctccgtacaatcaatgatcgataaataaaaagacaatagtgaccattttttaactctcccacaagaaaaatcaaatggcttgaaacttactaatgaaatgggaacccaccctgacagtgacatgaaatagcataaattgtaagaaaaggacaagttcatcatgtgtaatcatacaaaatggtatacattccaacctccactcccccaaactgcctatcctaaccctgtcacatagggcattgcgaaattaagtcgtttcattagacagatcttactttaccactgaacacgaaatggtgttctattcttctatcctaggtccagatacaattcgaccttcattcgaccttcatttttcttttttttttgatatatatatatatatatggtctatgattagtaaacttgagataattgatcctcaccatattcccagattctaaaatgagtttgctctccgtggttttgaagaaatatcagaataagaccaatcctaaatctggatgagggacagtaaaaataactttctaaagaatctatcgatacctaccaatacgagtcactatataccgtcccttttctagatcatatattgtcttcaactgtggcttcctccactttgatatagaccacactgtaaacatcaatactgtaaatatggcaattagtgatataagagtgtgcaagtcatcactaagaatattggcaatccaataatagtgccgcaattctaaatcagctgtggtttgcaagatgaaagctcctaaagcccaatccagtggaatatcttccacctgactggcaactgcaatcctggtaaaaaaaattacaaacaataatagacttaagcaattgaattcacaatggcatatgaactcaaatttcaagaatatatacacatgatgcaagcatcatgtaaaagtgggtagggaacaattgaaaatatagttagataattccaacttcaataatatgatattgagggctgtacacttctttaggtttcaagacaatcaagtagccctgaatatatcagaaaaaagcaacagtcatcacagagacaaacttcaacgactgttgtaagggaaatggactgaagctttcaggtgaagaatgataaaatatttaggtctctgcattttttcctaaaagaaggaagtatggctgtagtatagtaacatacctttcctcatccaatgcaattccaaaagtgtcatgaagtaatgctacaatataagcagaagagaaacaatagtgaagcaaatcttcttcatgaagggtgtggtatctcttcgttagctttgaccaatcttctttgcaaaattgttgtccagccataataaggtcagaaagaaatgccttttgacccagaccaaagaactaacacaaagaaaatagaaaaataacttatcagaaatgaaagcatccacgcaccatataaatcataaggaaaaaacaagaacgctaaaagaaacaactgtttcttcacagatgaatccacagtttagagcacttgtaaacaagcatggagattgaccaaagattatatgaggcaaaaaccttgtaagtatggaagaaattctctgttgcaagaaatttcccttgaagcttaggcatgaatattgatcctatatagcagtgttgagatgagcagttctctgcatcacagaaaaagacattattgttagaataaataacaaccatcataggtgcaatatcacaataaaaaccaaatcatcttacctcttcctttttgtaacatcattatggcggcagatctgcactctgagaagttccctttagatggaagagtgggtggatatttatttttttcacccagcaaagcaggagagagcttccacgactctgcaccgtgtgaatagcctgtaggagtacaaggatccgttgacaacccctcctgaacagatttagctgttgcattgatggggaaaatataagaataatgaaagactatcctgtttattaaacagtaattcagtattgtttcataaaatagtccaagcctaagatgtatacaagtttcaagaacttttgttaaagacagatgaaacataattaaaaaaataaacgtgtatattacctaagttgaactctcccaaggtaagtgcttgcctcaacaagtcatatgcaacattctgcagaatcaaactaataagttagaacatttcaaccaataaccataactcagtttaaattcaaaatatcacaagtagtgattttgcaggcatcaaaatgatctaatcgaaacatttaacagaatttataaaagaaaaggcatgttcttcaactcaaataagcaagaaaaagcctctacaactacaatttgaacaatctatagccacttaaatcttacaaaagagagaaaacaagtcaagttcgcatcacaaaacattatgtgaaagtaaacatgttgataacttgatatatatacacaaatgatataaaataacaatttacctgaccaaaatgaagaaagctgtgactgtagagattgtatgtggtatttctaaacttaatagctcgagaatactcagaaggcactgtctcactggtaacaaaggtaacctggaaaaaaatcaatacaatattactcatctcatataatccaattcaaactgcttacaagctcgatagaatctttgttagtatgaaaggggaagggacatgttttgaaacacattttgaaggaatacttccaatatggaccttatatatacatgctacacttttgtagcgcagttgaagactaagtaggatcaagaatcatgatggtgaaaaaaaaagaagataagcaatgggatctagaatattaacagaaggggaaaaaagaacattgaactaacctgagcagatgctcccccgagttcaataatcccagtagtctgaagaggatcacttccaagagaaccaagggcatagtttgcaacaacccaagcatacaccccttcatcagagcctaaaacaaacgtaaagttcagtacttggtctctagaaaacagttaataactttcaaatcttgaagtaaacgttggggatttataatgaaaaaataaataaataaataaatttcacgaagaagaaaaggaatttgcattattcttcagcatatgttataaaagatatgacaacatggacaacaaaaattgcacccaacataaatgatgaagtcctattcctatgctcaagctcaacaatatataaaggtgtcatagacaagccaattccggaaaattctgaatctaattcctttcatggttggctgttaagaagtcatccaaacaaaactcaggacactggaccagaaagcttcatttccccagaaagtctgttcatgtgtctttctccaaaagatgaattcacacaagtacatatacccacagtttctaaaatcctaccatgagaaatgaagtaataacaaattgttacaaatttttacttccatagcagcaatttttcttttcctaagacattgcaacaatatcaaatttttcatggttaaacggcataataacaaagctaaggtcagaaaatccaatgccataccagtaatgaccgaagcccactcgtcccggaaattgaacccagaagccctaagcgtccgcctacaagaatccaaaattcgattctgaacagacaggtcgagtaagcggagccccgccgtcgccattagtctaatatctgtttccctccaggattccttaggaacccgttccttcacaaactcaaggagctccgtcaacgacccgccagccgcttccgggtcactcgaataagcggaaagccctggattaactctcatcgacaccgacccactgttggtgaaatcaaacacggcattctgaccctccacctcgaacccgaacatgtggattcgagtcccggtgctacctccatcgatgataatcccataccttttattcccaaaacctctcgaacttcgggcgtgaacaaacaaatagcacagcaatacaaaagctattgcaacagcaattgaagcgagaatcaagaaattggatctggttccatgcttgggcccgcgagcgaagaggttggatcgagttgagggacgcatcggaagctttatcggatccatatctttcgaaacacctgaatcaactggttttcgggcattcgaccgtcgcattcaaaaatctaagaatgtcgtggtagtagaagaagatgatgaaactcatgaaaattatttccggaaaacgcgatagcagaagaaattaataactacgcatgtatgtataatagattactacgaaaataatacttctgaaatgattgttgggatcggagacggagaggggcgatcgagaaatgtattattataacttttctttctctccctgtctaccgatcacgtcctgttcttcttggtctggtcgattcaaggtcgacgacggccattatttttattaaatctttttttgtctcttcttcttctgttttcattctatacgagttgggcttaattttatagatcggcctgcaagagagggattttgaggagaccatccagcccaacactacagtagtaggctttcccacgaggcaggttagtgtgcctagtgtaaggtggctgtagttagagctatttacaaaaatatcatatttttgtatacataacttttaacttttgacattttaattcaaaattaaacttttcattttggattaaacaaatctacaaccatattttgattaaaaatatattatatacaacattacgaaaacacttattgtgattaatacataatattatgcctaaatttggaaaaaaaaaataacgataaatatttatcattattccccacgagggtcttcaagaatacaccttaaaaacacacaagttaacaaataagacttcagccaaccgacaaaagatgaaacagaaggaagaagacaaggaacatgaaagcactgccaaaggctgttagtgctaacataaacctaggatgcaaggtcggtcctaggctaaggcggctaggcctgcgcctatggccaacttatactaggggcccaaatttttttttttatataaatatacatatttttttaatgatttttaaaatatcatttattattataaaagggccaaaaaaaattattttttctagggctcaaattaacttagaaccgaccttgctaggatgaaaccctaaggttacttcttcaacactccatgcaaagtcatagtcaaatttgaggctcgattcaaataatatcacataccacgagcaatatggctcactagtagaggtgttcaaaaatatttacaaaccgctctacttgaacaagcctaaacaagctacaaaccaaaaaaaaaaaaatcgaaaaaaaagtgcaactcgaaataatccgataaaaatcctaaacgcccaatgaatacattgagtggattaaaaaaattataaacctctcaattaacctgaacaaaccgaataatcgatactttttttttaaaaaaaaaacgtataatatattacataaattatgtttattagtgaaaaaattttatgtttaaagtttggattttatagtgtttaacatgaaatttagactttatagttaataatttttattgtatttgaatattaaagttgaaatttaaatttgacaccatattattatattttttttttctggttgaatgttgttttaaatattttaatatttactcaattaatatttgttgatcctaaaaagtgatcaaccgacagc

SEQ ID NO: 14097 - DNA, 4969 bp, Cannabis sativa
ttaagagagctactttagattccatcactatagtgaactgagtagtattatctctcgatatcaatacaactaaaaggagagtagatcattaccccctaactaagggggtcaaacctatataaaatcttgtgtcttatcattattcttattgtgtaagacgtgacaatcaccagcattaatataactctgctctcggttggccaaattatgaggtcaacacaatttaattaattcaaggtacaaatttttaatttagttttttgggaatcaattttcgatttagttaattcaaggaatgagtttttgatttatttattttatttaactggtttttgtgtgtaagtttttatctggattgctttacggaacaaatttcttggtctcaaatttttaaatagttgataaatataatactttctttatattatataatgagttattgtgtgttattatttatttcttatagaactaattttgtttatatttatgcctcagtatttttagaattgatcctcactttttttttaaaaaaaaaattataactgattttatgaggtattatgtgctattcatttttactcattttgttgtgaaactagttttgattttaatttatgtttcaatgatttataaactgatttcttctatttttttttaactataactagtttgagttattgcgtgttacttgtttatattcattatattatagaacacgttctattttcatttatatttgagacatctaactctggtgacttttctaatgacgacacaactctgttgacttttttgatgattatttcattgacgtgacttttcgataattttttcggcgacaatgacttttttagcgatgataacttttttagcgactttttcggcttttacttatgttcttttgtttaatttctcatatttgaactttgattcatatcttatttttttttatgtcatataaaataaactccattatttttaacaaatttttatgaaaaaatctcttatttattttcattcctattacccattcgtttttacatatttttttccaccaacaagcaagctagaaacattaacgtaagctatgtttgcttaataaaaaaaaaaaactaaagctatttttgaaaattgaattttggttggaagagaaaattgtcaaaaattaaaaattgaaaaaaaaaaatcttatgtttcataattgatatagaaagaaaaattgtatggtcaaaattttccatacccaatattgaaaaattgatttttttttattctccacattttttttttcttacattttcctctcctcacataaatccaactttacactacattcatagctactaaatcccaaaataaaatataaatgctgtgtctcattgaagtggaaatataagtcccattttttatagttttatagtattccagactatggttgtagcatgggatgaggagaaatccacatgattttacaaattagagtattctcaaggcaggagaaaaagttgatagagctgttacatgtgatcatgctttatggttttctcttccctcaagcagcttcgttttgttccaggcatctcaatgtaaaaatgaagttctatctttcatcttcaaaccacaaggtggtttcctaagacatggatgagatgacaaaaatgttgcttaagtccaatataaaggccataataagaacaacttcgaactcttcacttgtgtggctgatcagaaacaagagcctaacaaggtcagtgagaattacttcatcatgcttgttaattccaccttcccacagaaatttctgacacttcaattttggagatcaatcaacagatcctgtttaaggcacaaagcaagggaataatacaactcatttaaactccaatgaaagatacatacagtgcacagaaacttactctagatagtaataaacaggtaatacaatccccacttggtcaacaattcacaaaagttacaatggcatgaatgagaagggaaattaacaaaaacatcaattctaccgtaaccaaataggagatgccataataggaaagttaactaagtctttagcactcaagccaaaaaaaaaactagaacttcaatataagttgaagaacgtaaaacctatacggcttgaaagctctgaggttatcaaatggagcttatgaagaaaattaatccatacacaggagatagtactagttattatctttgtgtgcagtagtttagtttaagtatctgtttacttgatagccagttacatggttttcccatatcattggttgtgattagtgtgggtttccaatggtatatggtatatgggcatgggtggctacatttatcttctaatttttcctgtcgtcccattagaccaaatctactaaggacaaggttattgttaatactggtaattcctttctcattatcaaaaatcacttattcacaaacttcctgtggggctaatagttttcatttcccatcacatgaaaaaccttttttgctcagcttagccctatccctctctaggggtattttagttatctggctgtgtatagaactgcatgatagtaacgatttctattacaatatgacaattcaatataaaatgtcttccttcaaagttgagcatttcttttaatagtcacagttagaattttctttgttaacaaaattataacaactttgggggttcagacttcatggtcatgtacaactaattacatcagtcaaaggtccgagtgaccgttagttagttatgacagatttgcctagtcagttggctctataaataggagattagtctgattcgatcaagaggagagagttaataagaattctagaatctgagagtgtttgagggttgtaacagtatacatgtgtttgattgtgagtcccagtaacaacagtatttgtactggagcaagtctccacttgagtttgtaattctatgactgctcaatgaagattcaagccatctatggctgttgtctcccgtggattacatatacattgaaccatgtaaaacacttgtcatgattttgttttatgcattccatcatttattgattttattgttatatgtttggtcttttttgattgttgttgagatacaacgacaacaaaatatcaatacttatgtttcaaataaacctccaaattttaaatgttgttatcagaacacttgttaaacagccattcatatttttacgagagaaaaaacaaacttacaagttctactcaatccggttctcaatcatggtatctaagaggtccaacgccttcttcattccttcgcaatcacaatacaaagccttatttaactccattgcttccctaatcctcgcttccctcagcaaacctctatagacaaccttcctcaactcgccatgcggacaaatatcggcagccaccatggctctcaagaccttcaaagcctcaagaaccatcccactcctgcaaaacccatcaaccaaaattccacaaaacttttcctcaagcttgaatggggaacccggcctcaccgtccaattaaaaaccttgagggcctctttgggcttgccctttctgaagtaggcagcgacgagcgtgttgttgatgggcgccacatggtgttgggacattgggctgtgtttgaggcgggtgaggagggacatgggcatggccatgtccgactgggaggcaagggagtcgaggagggcagaaagagagatggcatcgagaggtgggtttgtaaggagggcggtgatggcgaggtgggtcgcagtgttgagttggttcgagaggcagagacgagggaggaggaggttgatctcagtgagttcatcttgggttagaagagtgtgttgatcagtgactggttttaaagaagaagaatatgatgatgggaagagtggtgaaaaggatcgataaaaacgacggagttgggagtgtcgtatgagagtgagaagtgtcattgctggtttggtaagcaagctttgtctgctacttactgggggttttagttcgtgagaagaagaacctctcctaaaaatgggccccaaatgttggcttctatattccaagcccgcttagatttttgggaaatttttaattttatacgtaatattaaaacttattttaaaaataacctcagcaatttaattaaggccaaataccgattgaccatatgtaaagtgaaataattgtctcagcttctttctaagttgcttcaggttttttttttttttttgaattgagtattaagagttttgtttcttaattttattttttttttcttttttttttttttcctcctttctataattttaaaaatctttttcaattacattattgatcatttgagtttaaaaatagtatcattgtacctattttttaaggtggtcattttaatatgtgtaaaacatgcatatttttttttatttttacccaaaaatataatcagaatcaaaaacaactactcggtttcttttataatttattaataaagtagtaaccaaattttaaatgcaaataaaattcaatatatcaactaacttttgttactataagattgtttgatatctcctaaataatggtctattttattagacaattttcgtacataaaaaaactaaatgatatcttaaatatttttaaattttcattttaagtaacattatactcttttgttgttaagatatttttaagttttttttttaataatatttaaattaccttcaaaatctatttgagagtcaagcctagcaacattatcaccaaaaaaatattaccaaaattaaatgtaacatttttttttttgaagagaatttctttttatattttattaagagataaataaccaaagtataaattaaacgaaattttatatatgggtaaatggcggcaaaacccccaatactttcgttttagtttcattaaacccccacaacccaaatttctgcgggtaaaaccccaaaaccaggaaactgtt

SEQ ID NO: 14098 - DNA, 8195 bp, Cannabis sativa
  modified_base (7379)..(7409): a, c, t, g, unknown or other
tgctagttagggtgttacagaataagtatatgcttcttacatattaaaatgatcactttaaagagtagattttttttttttgagagaaagggagcccactagagagaaagaaaatcactaaggttgcaggggtcatcgcctatccaaattgcaacttcatctaaccccgaagcccagtgtgccagcttgtctgcaaaagtgtttgctgatcgattaacatgagatatacgggcagcagggaggtgagacaaagcttccttaatttgacttataaggtctccgaacaccgagatatcttctttgggatgattcagcgcatctgtaatagccttgcagtctgtttctacctcatggacaaggaaatgctcatctatgcaccaacgcaacgcatggagaagggattttgcttcaaaagtggctactgttctcctctgatgtaagggagagccagggctgctactacgagaccttcactgtttctaataacaccgccaaaaccaacttttcctctccccttggggattgctgcatccacatttagcttgagaaggccaggatcaggaggagaccaagatgtgggagctggaggttggctggaacaagcaagagaagatggagccgacattgaaatgttgtagtcatccagaaatttttttgctaagtttacaatggcatgggcctgatcatgtgcttgtcctttaagagctttgttcctgttataccatatgagccaagcaatacaaagaaaaagttctacatcttctttggttaaagagatatatatcatatgagcaacatcgtgaaaaataatttcagaagagcaagaacaaatataaggataaaaatgcgtacctttccagactcttcgaatgctcttacagtagaacagagcgtgtgacacagattcttccaggtttccacaacggtcacaaatcggagactgaatgattttcctagaagctagatttttggcagtggggagggttgaattggtaacacggaaagcaaagtgtttcaccttggtgggaatttttaggtgccaaaattttttccaccaaggcgaaggggaggaagaaaaatatgaaagagaattgtcaaagtaatacataaattaaaaaaaaaaataataaaagtttaatttgcgtgttgaaagtttttttcttaaaaaatatttgtgcatactcacaaaagttaagtaagaaaaaaaatttctatgcttttttaaaaaagaaaacctgtcacttaaaacaagaaaaagaaccattcattttggtatgcgtgcatgtatttaatgaaaaaaatttgatattaatttaaaagagtatatttatgcaattatttttaagtaattatttctaattcttaagtaatactagcttatttgatgcttagttattttgcctcttttgatggttagttattttatcttattatttgttgtgcgtgctagcactgacattatactatatatcaacttctttattatatcatctaaaatacattactaaatttccacctttcttattttatctcaaacttttacattgtaccatacatcaaattttttattttttctctacatcattaaagtattatattttaaaaatatttattaattcagattcaatatttattttttcaataattcatacaattttattaataacaatcaactaaaataattacctgtaatccaatcaggacatctcccctgttggagacacgaccaggattagaattaaaagaatgagtctaataatcagctgcctaattctcagatcgtttgacaaaagaactaaaataaaatcaaataaaaaagattacaacattatagttaactttaagaacatgtatattcagtttcatttaccgctcaaaagacacaacaataagagattgttgcagtagattcattcaacctcgtaacttaagcactcacttattgtgtaaggtacgtaattgcactattttaacaaccccttcagtcgcagagaacttgttatttccaaccactaacaactatttgatgatgagttatcgaaaaacaaagaactaacaatgaaataaagcaaaatagaatcatgtcacacaaacaaaactaaaacactcaaaactatgtcacaaagacaagactaatcataataacaaaaattaaatcgcactaataaaagacattctcgaccaaagtcgtacctatgctcatagaaggccaaaaaaaacaacctcctataactataaacttaaaaacgaaaaacttcaatttttttaatttaatttgtaccaaaacaacataaatttaattctcaatatattcctctcatactgtggtaagatactttctatatgccaactgaactgctaagattcaacatataatgttaatttattcatatgtataaaaaaaaaaatattaataaaataaacttaaaataataaataatacttcttgtagagaagtaaaatacactacttgatttatggtatatttgagtaattctcttttctttttcaaaaaatatgttattttaaagaagctaatgccagtgctctatagcttgctttaaaagtgttaacatcactacaaaaaattatatagtaaacccataatagttaaaagttgcattttatagcttaaattaagcatatcacaacattgaaactatctacacctgaaatagcttacgcatgtcatggcttcttttcctattcaaacacctcatatatgtatgtccaagtcttagaaaacatttacaagagattccaataattcagaataaaacaaaagaagaagaaaaatggtctcttaatgcatcaattttactaaacttgacttagtataaggtgtggattactaactctaaccggacatctctgtccccggcgcctcctagtcacctttccccaacatactacacttctctcttcgttgaccagcttgttgttgctactattcagttgtttcaacagtggctcaactgagcaacccactcctgcattggaggaactaggaatggaaccccgcttcctccccctcgagtacccgtttctagtggcatatctcattgaccctgtttcccaatgtgtgccagcggcttccatcagacctcctataatctgaagatcctctgtgacctcatacctcgacaaagatgcaaggcttgggagaatctccctttggaagtcttttcgctgctttccacgccttgtccgacccttcctttgctgagtaggagatgaagaggtgccagtttcttcctcctttgagccattacttttacaacagaagtcctccatttctgtctctgtcagcttcagtgtcatggcctcaaaatagtccattccatcatgtagaagctcctcagagttgtcatctattgtagttttcaaaagtgattcaaactcatttgctgaatctgttaatactgtggaagctatgccagcaaaccaaagtagggagtcatgtgaaattgtttcaagctgcttgcaactggttatttgggcagaactctgggaccttgatgatgaaatggaaactattgcatccgctgcaattctcgtgagttcatctggcagatcaggttcatccggaccagacaaaatcaagggtgtctcaacttggttttcatctgattctcctctgggtggagaacactccttgttttctggacttggaggagcatcaaaatcaatttctgctgtaagagccagctcttgagcatctaagtcatttatagatgagttcaggtcaaagaggcaaccaaaaactgcaggtttcatgccaaccccatcctctactgcatgttcatctacagttaattcattctctggctcagaaacagaatcacaagccaagttcaagtcaaatacttttcctttgggcctcacatctttaaccaggctttgacaggttattgaggggttgttgctagaagagcagtgacgatcagaaatgtaagatttgttagagtcatgagatccagagatcagtttactcaaggagtcaagtgcttcaacattcttaggttcaacatgcttaccaacagaacaagcttttaaagaaagagactccacctgagctgaatttccatgcccactaccgtctttcccaagccaagcaaactcactagcagaatattcacatttttccatcccctccacctgcgctgaatttccacgtccactattgtctttcccaagccaatcaaatccactgactgaatattcacattttctcactccctgtgctggctgaatacctttcgaaaccacaaactctgaagaaaagttttgtggtctggaattcaagttaaatgaacctttatgctctgataggtcatgattagacaccaacttgctgtctccatcgagctccagtcttcctattgctaatctacgccttttatccaatggtgcagaggtgttaaaacaaggcagtgcctgaactgcaactggattccgtgtagagtcaccaaagtttttcaaagcaagaattgatgactgggaatttgtaatattgacctgaggaccaccatggtccctgaaaatgttctcagaaaaagtaccatgtggtccactatatttgtcaactgagggagcatcattctttctcgagcactccaaatcataaattcctctttcaacaaatgaagtatggtttccctgatgaaaagatgaattttcctgaactagctcgcggtccttttgcaagagaccagacaaagaggacaatttatcatcatttagacctcgatgaaaaggattcaagctgcttctggatttctctgaaaaaggatagggtcatgaaataagaacttagcagattatttaaagacaacatatttagcttacaaccataattaatataatgtaaatcaaaagaaagaaaaaaaggagaaacttttgtttgaatggaaccttggaaaaaaaaatcagcagacttgtcatgacaggataactgcccctcttttctttcagtttccgccaatacaaaatttgatggaccaagatctggcaatttttgggtattttgaaaagattcctccaatgaatatttaatggatgcttcctgtttctctaatattgaagcagggattttgttagtcgcgtgaaaaagagagttcaatacatcacttccaaaaaatgattttacatcactggtgtacactacttgtggagatgtcttcacagactgactggatttctcaggcatatcagaaaccattttatcatctaagaggaccttgtcttcaccattaaagtactcaacagcagtcagttgaagatccaacgatttcttcccgaatttcttgtccttagattctgataatagaaaatcttttgagcacacttcagatttagtagagtaaggagaacatacttgaatgtttttcccttgtactgaaatcaaaggtgagagcttttcagaaccagaaatagacattggactatctgcagggtttattgagccaattttggggacttgaaaagtctttgggaactgttcagatgatgtttgaaagaatacagtatctgaatgtgatgactcaaaccttgaataagacttgtgcaattcattccttctaatttcactcatcaattccatttgtcttctgtaaaggcgatggagctcctgaatctggattggcaaaacaagtgtaccaagcataagtaaatgtataattgctgttattggtactcagaaatctccatcacgggtcccatgcactaacaaattaatgcaactctacattcaatgcttggacatgtattgtgttattacatatatcatgtagtggaacaaataacccaaaactcagtcaataccggcaggaccaaatagacatctttctatgttttattggttctgtgaataacttataatactggaaaccaattgtgacaaacaaatcaaagtctttaaacaacaaaatactgtataaatgtcagcaaaacagaacaagcagcatcctactccttggcagcaaaaagcatagagatttacctgatctttaaaaattgtttcatgcttgagcattgtctgctttaacagttctttgttgtatgttaaaagatagttgggagacaaatagccgttatagtaatttccactctctgaaactttgtcattaaaatctaagggccatgtactagcgttggcatccaagttaagattccttgcggagtgatatcctgagaaatagctattatactgcatgtttgcccccatttctacctgttccaacatagtagtagtgaatagtgtgagcaatatatttatagacaaatttatttacacaataaccagtcaacaggtcagacaaaaggggtaagggcattatcaaatgcaatgtacattaggtaaccacaaaccaatgaaaggaaaaataaaagggtagttatggaatgttgtacaattgcctgtgagcatatgaacaagtacaagtacagtattattaaacatagcttgaataatgatttgaagaaacttcagtgtataagattaactttactaaaaataagacatacattattaaacaaccatatgtttgagtaaaacaataaagaatatataatttatattttaaaaaactagaaagaaagacagcaatgacaattgtgctaaaaagaatgaggaaccccatacagtattttatgatcaaataaataaaagataaaagaaaatacttcccaaaattaaatatattaagagagaacaatcttaaaagaaattataatcttgaattgaagtgtcacaagatggagaaatataagtaccaaaaatgtgataataatatttaaaaactcaatctatctaaaaccagagaccgaggaaagattttaagaaagaaataatttttacattttaataaatccacaaaacttaaatcaagctcaatcaacaatgttccaaaaataagaaaaaggaaatcctgtaccaaataatcgaattattagaacatactataaaacggaaaaatatatatttatttttaaaaaaaatgagaaagaaaaaacaaaatcaagcaaaatatcacagtaataatggccttcaagtttcaatcatcagtaaaacattaaaaataaaataaaaattagagacttacctcttaaattagacaaataatattttgaagaacccacaaaggatatcagtggagtttgagttgagaactaataaaaagctcgagaacagagaagaaggaagagaccccagatatcaggaatcaagaatctgggaatatcaacccaaaatgagctgagacatcaaggcgagaatttcagaaaatccatgagaaagttcgattagacgaaagattttggatctgctgggccattctctctaggaagatttagagagagaaataagagagagagagagnnnnnnnnnnnnnnnnnnnnnnnnnnnnnnngagagagagagagagaaaattgcagacaaacaaaaagaaatccgcagaaacagacgagaaaaaattaacttataggagaagaagaagggtctctctcatcctcccattccatctctttcctccattcaaaggttttcatttgatttatttttctcttttcgagagagaaagaaattatatgagtttgtcttaaagagactctagattctctccattttcgtttcaggtacaaaaactcatctttaatagaatattaatatttttccagataaattaaataaataaataaacaatcaatctcttaaactaccttgattttcccatttaaaaatactttaataaatattttttgttttttttttaattagttacatgagattagtctgtagtgggtcccattaccacaacattaaagtatgtagtagcatgctgattctgtgaaagttctttttgcagtaatgtcctattactttcccttaattacaaaattgtactgtttttcctatctatgttatttttgtaacattgggcatgccttttctgtgaaatttccctttttccttcaccatttttaattacaataaatgttactttctttacctttggctcaattttttatttagtttaaaaaaaaaccaaaaaaaaaaaaaaatgtttcgagaaagagagttgagattggaagagggaaaacgaaaagaaaaaaagtgttgggctcacttgattttttttttttttttattaagaagaaaaggctgaaagaaagaaatgggaaagaggaatgattgg

SEQ ID NO: 14099 - DNA, 9026 bp, Cannabis sativa
  modified_base (8974)..(8982): a, c, t, g, unknown or other
catattcttcattatggcctcacatgttatagtagttacaatttctttttcaaaataactcgagacttatttacaaaaaagtttaaaatgtgaacggcatgatgcataattctggttaaattaatcttcaaggcattatttaagttacttcacttgcaacacaaactaaaaattacagtgcctcaaacttaatattttaattttgttcttacatgcaaccaatgttcataggttaaagagagcatgaaagaagggaatttaaaaaaacattacagtgtcccaaggacgtgaagctttggttggatcgctgtttcgttgtgaaagtgctcggcaagccacaaagccccccaagcctgcattgagtttggttgtacaaaactaagattaatccatttgcaataaaaagaaaataccaataggcaataggtaaggaattgaataccattcttagtagaaatgacaaatatgcaatatgagggaagaaaaaaataccaataggtataattgctgcatctgagccaccacaaagcatcagatcctgcatcaaagtttaagtaatactattattcacaataataattacatagtcaaaaccttacaataaattttgcaaataactagcaatagaggccaaacacttacagcttcacctctaatgatgtggttagctgcgtttaagatacaaaagttgcttgtagcacaagcagtagagattgaataatttggacccatccatccctgcaattcattgtataaagtggttactacaaaactctagcaatcatcagggtcaggacatgcaatgaaatagcaacaatatcaaattcaagcagaccagatccattgcaagcatggcagaacccatatttgtagtagcaaaagggacacagaaaggattcatcttcctgtatgaaatccttaaagcttcaattgcatcgttaaaaacctgttcaaaaacaatattagataataaattagcttgatatttaatcacactctaataagaacagagagatgagataaagctactttatgttattcacatgaaagttcaaaagtgaagccaataacaatttggtgcttactgggaaatgatctcacacattttatgttcactagttcactcagtcctaaatctggtctctattcttattgtttacaataaaaacagagaatgatcaatttaccttcatgccacccatagcagagccaatcaaaacaccacatttagtcctatctaactcattcattaactcttctgtaattccaccatcagctaaggctttcttgccagcagtaagcatgtagagcataaatttatccatcctcttggatagttttggtgcaacccatccatcggtcgagaacgactttatctctcctgcaattctctgaagagaaagaaaataatcaaaacgatacatacatagagccagcaccagctaaagacatttttcactatatgatttaccgttggaaattgagcacaatcaaaggtctctatctcacttatgccactgacaccctcaagcaaattattgtaaaaggtatctaattcatgacctaggggagtcaccacgcccatcccagttacaactactcgcctctgctttgtaaaaggtttcttctttgcagtaacctcctcggtgggttgcacagcaacagaaactgtctcccctgaaattgaaaggtgcaaaaggtaaacctttcagcatcaaccttattctatttcaatacacagcatgtcactagtatagtatccaaacccggttgcatgacaggtaaaccttttccaaatacacaagccaatacaattttcactagagttaaaatttaaatttttagaaaggtacccaatggaaaacaaaatactaaatcttcttcaattctctatgatgtcaaatgaaatgtaactcaagttgcagagctgattttcaaagatttgtttattcttttagatataaactatagtagtttagttagagtagctccaaaataaaacactgcaaaacacagggcaaacaataaaccaagcctcgggccccgtgaaaaaccaaacagacctgaaaatgtctcgattttttttttctctaaaatacaatcagatgaaaaaatgaaagacatggcacaatcagaactaataagaaagaaacgaattaaaatatatatatagatagatagatacacatttatacagttgcttgcaaagtaaaacagcacaacattgatgaaaagtaaataccagaataggcagctcggttaatccgcctctgtctgcgattggtaggggcaacatccttggatctgaagagcgaggagaatccattggagcttaaagaagagagtccagtggagttgtagtagtcattacagggctcaaaagcgaggcaagagctcattagaccttgaatgctggatccactaaaggacggaatcaaaaatcccctcttgttgaattcagagctcccactactgcattgagccattactaccttccttctccgagcccacttgctgagtctccttgaagagcgagacatagatggggtcgaagaggaatggtccctatcgcacgtgaccgacgacatgcaagccgccgcaacgagccacgtgcagagaggagatgtaactgaagaggccgccatggaaagaaagcaagaagacccagatggtaaaatcgaatacccaaatgaaaagactcgatttttcagcgaacccaccactggaaacggagctcagaatggtaatctaagcaaatacgaagttgggtttgtttttttttcttcaagaactaataggtacagtaactgttaatgtaatggtgaagaagacgaagaagcgaatggaatagagggtcgcattcgatctctctctctcctctttctctctcttctctcttctctcttctctctctctctttctgagttatttatttgaaaccgttcaaagacgccaagttttgggcaatctgagtcgtcctctgaagttaaaagccaagtgctctctctcagtgtttcgttctgagacacacacacagcactatattacaaacaaatatacaaaaacatcaatcaccagaataattatttatattttccaaaaaaaaaaaaaaaaaaagagaataattatttatattaatattaaaatgaaaataaataaattagtaaatttactacgagtacaatgtgccaagggcttgtcacatttttttattcttcaggagataaatttaaaaataatatatttatatttttttcggaactactatgcttatgcttatttattatgagtcaatatacattaaaaattgttattatatttatattgaagaattgataatagtcttggacggctaagattgctcccatcaatatcaaatctgatagaaggaactactccctttgttagggcagtactagtaggcacagtctaattagaagttatagtagtcatgacttgagatgactataataccccttattttgtatttaatggaggtgtagaaaaaaaattcacatcacatgcatttatagtgagatatttacaagaaagtatctcattcagaagtagaatattcattgtatccacctatttcaccctctcatttttaattgctttttttttttttttgaaaaaaaattatagtgatttggtgatggcatattccaatttgtttataacttgttttgtggtaaaataaatattagatatgagatatttagtatgtaactgaatgagaaaatacatgcagatgcagtatagtattacattgctacacgtatatacgaatatttttcacaccatagatgtttcagcatgagtcgtacggaaccaaactggctaagattaagaatcaaataggaatgaaattaccttatacggttactcctcctcgtcatcatcaatttcaactttttctatcactccaaatcaaaattacaatcaaattataaaatataacaattcattaggtgcatgtttttgaagatggaacgcaatctacattctattgaaagatttaaggccattacttaaaatataacaattcaatttaggtgcctgtttttcaagatggaacgcaatctacattctattgaaagatttaaggccattacttaatcaaatccatttttttaagagaaaaatagaagtaaaattctaagggacaccaaaagatgtggtatgttgttattggtgtaaattaatatctaatcttatttgcatgaaggaactcctgtatctgttatataatattcacggctgaactgcatattaagttacaaagataaagtatatatatataagagataaagggaatgggcccatgaaagaagaagtgggccgaatgtattgggtcaaaaacctaataccccttctcaagacgaaatatataaattttttaagttcattttggttacaagtgtatgaaaaaagtcacgaaaaaagaggtttggtaaaaatatcaataatatttttttagtagtgatatgaattagctttagtgtgccttcttgaaccttctttcggacgacatggcagtcaatcttgatgtgctttgttcgttcatagaatacggggttctcgaaaatgtggatggcaaatgtattattgcaataaaggatttcaagatctttgtgatggatgccaaagtcctgaaggaaggctcatagccaggtaatctcacaagtggcattggccatagccctgtattttgctttaccgaatgaacgagagatggtggactgcttttttgatttctaagagattgaggatctaccaaagaagacacaatagccagaaatggaccttctagtgtcactgcatgaagcctaatcggcatttgaaaaaatcttaagataaaagtttgtatttaacatatcagtttcagtataagcaaataagttagtggaagatgttgagggaaaaaaagcccttggccagaggtgcttttaagatattgtaatattctatgagcagcagtgagatgaggagctctggaattgaataaaaactgacttagcttgttaacagcaaaagaaatatctgggcgtgtaattgttaagtaaatgagtttaccaatgaggttgtagtagattttcagattttctaatagttttccaacatcaaatgaaagctgaatgttaggttccattagagtgggagcagtgaaagctcttaaataacttgtgtcagtcaaaagttgtaaggtgaatggtcgttgagagatagaaattctggaggaagaacgaccaatctccaaacctaagaaaaaacgtaaaggatcaaggtccttaagctgaaatactgagttaagttgttgtttaaaaggaaataataacaacatcattattggaggtaaccacaatgtcatcaacatatgttaaaagagcgagaaagacgcctttatcattttaaatgaacaaggtgtggtccgagagagattgagtgaaaccagtaaatagaagataatcgctgacttttgcaaatcattgtctaaaggcttgtttcaaaccatagagacttttggttactttacaaataacatttgggggaatttatcccttgggtctgtatcctttagggagtgtcatatagacagttttatttaagtcgtcatgaagaaaggcgttgttgatatcaagttggtacaaagactaattcttaatggctgcaatggcgagcagtagttttaaggtattaaactttgcaactggggcaaaggtatgaaagtaattaataccttatttttgattgaagcctttggcaaccaatcgtgctttgaatcgatcaatagagtcatcagcaatgtatttaattctgtatacccatttacaaccaatgtcatggtgtttgtcagggagagtgacgacgatccaagtatcgttggcttcaagtgtatcaattttagtgtccatgactttttgccatatgggatcttttactacaattttgttgttggtgggttcaactagtgaatgggcagcaaggaccgctgctcgaaagtgttgcgttaacttattataagacaaatatttataaatagggttagcagtagaagaaacaacagtagtattgcaaatgtaatcagaaagacatttagatttggataatgttcatcctatttttgaagtaattggagaaatagtcgggatgttcctgggtgtggatggtgcttcatcaagaatagggttagttgtgttgttgacaaacaagaagatgaagtttcatcagtgttgggaactggggaattttccttggaaggagtatgtgactgtcgtgtaaaaggcggtaaagaatgtgagaatagttcatttatcgaggttttagagtttgtttccaaaagtggaaaaatatcttcatagaaataaacatcttatggattgaatgatctcttgagtttcaatatttaaaagagtataagttttcatacccaaaggataaccgataaagatataagggcgagatcttggagagagtttgtgtcgtttggtttccaatgttgaatcaaaagcaagacaaccaaaaactttgaggtggtcataagtgggagctttattatagaggatctcaaaagaagtctttttgttaagtaatttagatggagtaagatttataaggtaaacaattttataaataagataactccaatgaggtaaagataaatgaaattaaaatgacaaggctctaccaatatttaagttgtgttttgatgtttttgctgaacaacagagtcttgttgagaatgactaacacaagaattattggttgaaattccttttgtagcatagaaggctgttaaattcaattctttagcattgtcacatcgaacaactttttgactaaaaattgagttgcaataagagaaaaaaattgaagaataatgaatgaaacatcaaatttagaagtaagcatgtacacccaagtatagcgagaataatcatcaacaatagttaagaaatatttgtatccttcaatattagtaatgtgaaaatgaccctatatatcaagatgtattaaatcaaaagaagaagtagcaaagttattgttagaagtaaagtgaagccacttttgtattacaaaatgacatatggaatacataaaattgaatggtttcttagaaacttgcaaatgattatttaagatagtacaaatgttcatagaaagatggccaaagcaaaaatggcatggatccttcaagttacatgtagtgtttgcaaaaaaaggaaatgtccgtagtgagaaaatgatgatcatgtatatagaaatacaattgtctaactttcttcgttgtcccaattgtagaagtcaagaaagaattcttaatcaaacattgatcaaaagtaaaggtgagtttattggcacaatgttcaagataagcattaacactttataggttgaacttgaattctggaatatacaagacataaattaatataagttggtcagatattttcacagtttcaaatttgttgatgtgaatttgatgaccattgggtaaagtaaccaagttagcaataatatttttattaagagatgtaaagcaataaagagaatgacatacatgatgagtagcactatcaactatccataaaaaaggggaaaattgttattgccgaagatgttaaaaaccacgaggagatttttattggtggattgagtgccttgaatttgttgattgaggagatttttattggtggattgagtgccttgaatttgttgattgagaagagaattcaactgttgatcaagatgaagtagagaagaaccaaccgtaaaggggtctggagtggtggtcacagatacgtgattttcccgagcaatagtggtggtctttttcttgtcgccatatccagggagaaagccgtgaaggaagtagcatttctcaattaggtggcccaatttaaggctgttggaacaggtaagttgaggtttcttggttcagtaaggttggttgggatttggtttggttgaagtagcaggaacaacgccagtgttgccaagacaacactggcgcttgttgaacaaccacaagtacaagggatatttggttgatattcattgagctcatcccaaagagcttgtaactgggtgaagtaggtggtaaccgagttatcaccttgtttaacgttgttgatggaggttttgagttgtaaaatatagggatcgttgctttaattaaagcaatcatgaaggttgctccacatctcacgagcggtggttttgaacatgatactagcagcgatctcacgggacacaaactgaagaatccatgacataaccatgttgttgcaaatatcctaagtggaaagagagaaatcatttggtggtggacgaggtatggtacattcaataaaaggattcttgttcttggcagcaatattgatcgaagttgctcgctaccatgactggaaattttcttgaccagtcaagagaaataaagtgattttggtgatctttagttcccagatgatacggagtacgttcatcatgaaaaggtcgataaaaaacgacatgaagtaagtcgtgattaacagtaaacaaagagttgtcagtaaaaggcatttggcattgatgtcaaagaaaaggattgttaccatcaaggaaaggattttggacaggcagataggtgaaggttgtagttggattcctagtggtgccagaaggaatggaagtcatcagtgggacagtcagagccaagatcggagcagatgaagaagatggcagaagcatagttatatgtgtctgagatgccatgaatgtcgatgtcgaagcagagtaagaaacgaacggagttgtagatatttttccaatcattccagaactgggaagatcgacaacgtaaccggagccgagcacaccagaagtggaaggatcaaacgtggaaggagtagcaccgatcgtttttgatagagaggtcacaggcagaggagactcgatagagcaacaacgtcaaagtgttggaaatattttaccnnnnnnnnnatttactaacaagtatgtttctttaacatcctaatatgaattct

SEQ ID NO: 14100 - DNA, 5121 bp, Cannabis sativa
tgtgtcacttatggtatcggttattttctaataactgatggtataggggctttcatttccctccacaactaaaacaaaaaacaaaacatagctatagcaaatagatttattctataactacgacttttataacataaccgcttctaaatatcaattttcaataaacgaaaaatatttggatgttttaacttctctttttattaatttgctatagcaaatagatttattctataactacggcttttataacataaccgcttctaaatatcaatttttaataaacgaaaatatttgaatgttttaacttctctttttattaatttgctgaaaaaaattacatctaaaggtttgtttggtaggagtgtgtgcctctaaaactaattgaaacatattcaatcaactacagctaatgatatttttcataaataatacataactcagattagctattacctatatatagacataaacctaacaaaagtggcctataagaaacaagaggttgattttaaaattttaaagcaaattaagtatcttttaaacgatatatatgtaatgtgatagtcttgcttcattgaacaaattaattagtgatcgctttattcattacaaaatataattttgcacaaaataatatgatgataaactagtgcgcactacaatacaatgctagttgaagggggtcacttaactttttacacaatttgtatatatatattaaacttggcctactttaactttaacattccctttcaccgtccaaacctccttttctttcctagtttaataaaatgctttcctttccttcccatgcaacttcccaagccaagaatctctctctttatgttgttttccacctgcatgccattacattactacgtatatatcaatataacactaatattatattacattatagctatatatatatagtttttttcttcaaatagaatatagagtttcaactcataccaacatatatatctaatattataagcccttcttttcttttctgtggtccaaactcatcaaagacaatcttacccctcattccaatcccatcaagcttattttgtatgtggtcaaatctgtaatattggattactgcgttgagaagctacttcatcaacttagaatactcttgtttttattgtgacacatgtttttttttatttttttaattcatatatagtattcacttttgttaaagcaaacaacttttgttcttctatataagaaaaccataagggcattgattttccttcatgccaagtaaactttttttcaaaaaaaaaaaactctgttctatatactactctctctgttctatattacatcttatatattttctttgtttatatcatcatatcaagttattgaaaaagatgaagaacaaggcttcaattgttttgaaacagataatatctttgttgagttcattaggtagcaaagcaaagagcagaacaaatgcagccaaagctcggctcataatgttttcactaatgaagaacaagaaagtactaatggagtcactctctcacaaaattcacaatctacttgggaacaataatcacaacaaggaaggagatgatgatgatgatgtaatggaggaggatttaaacaaagccatagttctatacaatgctaatgccaaagccaatggtcaagacgagtttcgatatgcatcatcaactgctgctggttcaggccaacttgtacaatactactacaactatagtagtgatgatgatgatgatgataagtaccctgatttaaggcattctctttttgatgagctagaggaagatgatcaagatctacaaggagggtctgtgattgatatggtaaggaatgcaaaagaggaagaaggaggtgagtctttcaagttggaagatgagattgaccatgttgcagacttgttcatcacaaggtttcataagcaaatacgtatgcaaaagcttcactctttcaaaaggtaccaagaaatgcttcagagaggcctttaaacacacagagagagatatcaaatccaacttaattattattatttataattttagacatgtaattgtggcttgtttttggttccatgttgcttgtcacctacttgaatttttgttttgttttttcaataatgttgttttaactctctaattactactgcctgtattgttggttaattaccaaaccaaagtactgattatgacaaaaatgaaaaattccatataataatgataatgtttttttcttaattaggcttgtctacctgtctttcacttagaaaagtttcccttacaggtacaatattttcttttcttttcttttttagtctaagcctcactaataaccctactaatatcagtaaaatagttctcttatctttctgtttttactgtgctaagaatgaatgaatttagttataaaagaaaagatgttataaactggtgtagttatatctcttaccatgtcagttggcatatgaaaataaaatatataggtataataaagagctgagatcattaaacattatttgctatgcaacaatcaatgccaaaaagtaaaagaaagagaaaaagccattgatgaagtggtactttaaatagtaaatagctcttcctgcacaagaagaaatcttttaaatatcttatagctttgggaacaaaatttattgaagaaaaaagggtgagtacttgtaccacaaaataacttgtatatgtaagcaaatgagtaaataaagactttaaataaatacagcattaaggatatgttgaaagaaaataacagaaatccaaaatgacccataaatattggcttttgcacatgggatttcttgactgcccagtaaacttgtcactgtcattaagaaaaacactgtgccacaaccagaccaccaacacctctacaacaagagccagagagagccaaaggacagtagtaaagtaatagccaaggagccacttactcctgtcaatttcactgttacatcctttttctttacttttaaaaaattctaacataaaaagattaactcaaattgagctggggttttgctcttaatcacagtagaaaagagaattgtagtgtgtcttgtctgtcaccacactcaccaccgcccactgcccacatcacatgctcactctatctctctgagctttaacagtgagattatatatatataatatataatatatatgactctgctgtgggtatgacctgactttgagtaccatttacaaacaatgtctgtgcattttgtgtccttgtctatgcctaaataaaaacaagacagagagagaagaggaagacaatactcctgaaattcttgccatttattctccaaaattatttctgtataatttcatgagctatacctatcagagctaccaagaaagtttcaacattgttcattgtcatatattagatgtatacaaaagaacaaaacaaaattactttatggccttttgcattgtcactctttctttctttcattcaataaaacagaagataaattaataaacacttacttttttctacagaatataaatcaactcaaaaatgaaatccaatttttttctgtatgattagtatgcttactcatcagttttactactcaaccgagctcaaattaaaacaaagaaaaaaaaaaaccgaagaaaacaggtcaggactaaagagcaaagacaaattcagatccaaaaaaaaaaaaaaaaaaaagaattaaaaaatagtctcaaatggtggtaaaagctccaaactttcctttttcctccattttcatataaaccaaacataccatgcaaaatgttaaaaaaaaataatagcaatagacccctctctctccctcgctttttttttctattttttttcctcattaacaaaactaatgattaaaactatgatacagtgttttctgcttcgccggatccataaaaatcgaccagtttctgcaaaatcacgacctgggtcctcaaaaggacgatgtaatcagccgtttgctggaacaattgttcgggtttaactgtctcctcttcgtgggtaggaatgagattcttcaacgcttccaacttgtccgcgaccttcgaacacgtgcctccgccattgttacagcttcttcgagcaacacacccacgtgaccgaggctttatccttcttcctcctcttcttctcgttcttctcatcacactcattttctgatcctttgtcgtcgagcacattgctcttatatttttttaacaattatttttattttgttttgaagagaaataaacgaaatggaagaagaaggaaaaactctgtttgagactgttataagagaggaagaagacgattcggggtataagtaacggcggattatgacatttgccattgatattagaaattattacgaaaatgccatttgtatcttttcttttgtcgttttgtccaccgtgttctttttctttctctctcttacttttttgttataactaatgattttttattttagtatagaaaaataactaatgatatttttcaaatatatatatattttttttgtgtgtgtcataatctttgtagtatgccatttatgagatattgacaacgtaaaatgatgctgctacgaagaattactggtaattacaaaaaatgagtaattaaaaaaggacataattcgaatttttatttttctctctcaaaaaaaaaataatctctataaaaataagtgattaaaagagacttgtactaatcatattctttaataacatggataaatacatctcacatgttgtaaaagcaattgatgaaaataacaattcaaagaaccaactcatccatttatagtctaattattactttttttcttcaagttattgtgtctctattccactaccacttctattgcttattttttcccatgaattatttatgccattgtataaagactaggttttttttaacacttgctcttctattttatttaggttgtttcactttttattcacgccctcttaatgagaaaaagaaataatggtgaatttataactgttcacatttatttattacataaaaatgtatatacatgtaagagagaatctttaatagaatgttaaataagtggtccaatgctatactttgatattt

SEQ ID NO: 14101 - DNA, 7485 bp, Cannabis sativa
caaaataatatttaccctgataaaataaataaattgaaaaagagtggcacttatttatctagtcaccttgaaaaggtaaaagaagagaagaaatagttaagtagaaaagaatagttgttgtggaagtgtaagagagaagagaaagagcattgattgatgttgaaatgtggtggtggatgaggtgtattaatttaaaaagtgtagggcccaaactgagggaggaatagtcactatcaagaggagcccattatgctgctccaaaagacacggctagcccatttctcggccttttagacgctcctaattatgtgggcccccaaaacagaaagccataaacaaatcctaataggaaaaagtggcaaataataaaaaagagtagatgtccaagtcacgtgaaccacgaaaattaaattaaactgaattgtagatatttgcatttaaaaatcaaaatatgcactcaaatattatacataatgatgtcacagttttaatttacgttttgatagacttcttttatgtttttattgcttacgttgtaactatttagaataatttatgaattttaaaaaaaatttaaataatttacagtgtaaaaaataaagtttaaacagttatttactacacacataagaaaaaataatcatgagtataataaaatatttaaatcttattttcgatattgtaaattattcaaaaaaaatttaacaatttacaagtaatcttaataaattatatagattaaaaaataatcctaagaacaaataagaaatctaccaaaatattattttaagaggtttcactataaactcacccaataatattcatcctttcaaaaaagtgatagaattcatattttgagtttatatgccattactctaactattattattaaataataaaaaaaaaaagggaaatagagatagttttatgtttggttgaagaagtgatgagataataattgtaataaggatgtaggccttgcccttgaaaagtaaccattaattacaattacagagaaaaaagggaatcaattggatagggcttatacttaataagttaataactactttacaaagaaagaagggtagtgtagtactatactagtacgacgctcctagccttggcccactaactattaccctctccaccaccaacccttttaattatgatattcatatcatacaaatcacaaagctaaaaatgttttgttgcttcttaaagtggaagtatatccaattcttaaaaagttacaaataagctccatgctaaatgggtttcaatttcaacttaaaaggggaaaaaaaaagacttgcaataaaatatcaaaatatcaaagggtaagtcaagagtaacatttttaaaataaaaattagaaaaaaaattctatagcaaggccactactactttttcttatctctatcagcataaatatatttatttgcagcactcgaacaaattataattacttttcttctaccttcacaaaatataaaataatttacaatttcgacacgtgcttatatttttcttatacatatgcaatcaattattttaaactttgtttttagtattataaattggtaagaatttttcaaagacgggtaaaatatttactaactataatgtagaccatcatataaaaaaatttaagccataatttctctaattatcgaaagcataaatattctttggacaaaaagtgacacctctattatagttgctccaaaaaattatatagtgtttttatacttctggagtcataattattgtctcagaaataaccaatgacaataaagtgataaaataatagtaataacgtagagagaaagataataaatgaagatatatatttttttatagtggtttaccctttttcgctagtgtggtgtaattcatagaaaacccatcttgcttttaacttacaagaagtggaaagttaattaaagttggttagaaggcagttaagttagttagtcctgtctcttttttggtcaaaggctcagtttgtgagcttttatctaacctatataaacaccaattgtaatggatgtaaaattaagactgagaactaaaaaaaaaagagaaagtgaggattagagatctgtattgagagagagagagagagagtcaaaggactgaagctcttgaaggttatgaaccatggtattcatggtgttctaaccagtcgatcatggaggtttgagagtagatttctttctgttagctactctgattgaagatcaaagaattggtgtttgtaatcaatatttaatagtggagatactccttgggggagagctggaataggactcacattgagatccgaaccaggataaaatccttgtctcatcctttatttttctctattttctgcattaattcttgtctggtttatgtttaattcctctctgattttgtatctggtttatgagcattattgtgcatgtgtgtgtgttgagtttgtgttgtaggaatttacaacagtggtatcagagcaaggttcttaaagaatccaagactcaacaccaaggttgccaagaatcaagaaaggctcatcaatggcatcttcatcaatcagattcgacttagaaaggttttatggctcaggggatttcagtctttggaaagaaaagatgatggcaattctaatctaccagaaattggattatgcattggaagataggattgaaaaatctgagaaggaaggagatacaactaagaaaggtgaagttgaaaccataatgaagcaagcaagatcagctatcatcatgaatcttgctgacaatgttctaaggcaagttataggggagaaaacaacattgggagtttggaaaaagcttgagttactgtacatggcaagatcgacagctaccaagatcttcttgaaaggcaaattctatggattcaagatgaatgccactgttccattggagcagaacttggatgatctcaacagaattattctctctctaacaaatatgggagaaacaatcaaggaggaagatcaagctgtgataatactgaatgctttgccagatcagttcaaagagatgagaactgttataatgtacagtagagatactctcacacttgaagatgtaatgagcactctcaggtcaagagatgctgaactaaactagaaaaaggctgaaaaacaagaaacaagaaatgatgaagccttgatgattcgaggaagacaaccaagaagaggaaattccaaatttagggatcaatccaagtttagaaatcactcaaggcacaagggaaactcaagatcgaaatcaagaccaaaggaaacaagaaaatgctaccactgtggcaaagttggccatttaatcagaaattgctgggaacttagggacaagaaaatgcaaaataaagatgaagaggataaaggaaatgactcaaatgttgctgttgatgatcactacagttcaaatggtgatgtttttgttattatcaaggaacaaagtaaaaacccaaaggtaggagatgcatacacaagttcagatcagagggacaatgatgaatggattcttgacagtggctgtacataccacatgagtccaaataaggaatggttcattgactactctcaaattgatggtggaaaagtcatgatggggaatgaccacaaatgtcaagttgttggtattggcacgcttctgatggcactatcaaaacactcagaaatgttaggcacattcctgatctgaagagaaatttaatttctcttgctactcttgatgatgaagggttcgagtacaagactggtaaaaggattatgacccctgcacaagctactgcagtcaccaaaggcatcaagaaactatgacccctgcacaagctactgcagttaccaaaggcaaaatcgattccaagctttagcatgccagattgggtcatatcaatgagcaaggattagtggagctatctaagcaaggtatattgtcaaattatactcataaaaacttacccttttgtgaaatttgtgtacagggcaaacaacacaaaattaaattctcaagaagcaattacagagcaaagcaagttctggagtacttgcatgttgatctctagggtgcaagtagggtgaaaacactaggaggaaatcaatacttcctctctgtcatagatgactacagccaaaaggtatgggttttcctactaaaacagaaaaatgattgtcttaacaagttcagaaattggaaaatttttgatgaaaatcaaactgataaaagggttaaatctttgagaactgataatggccttgagtttattaatgatgagtttgatgagttatgtgtagaaacaggtattaaaagacatagacatgttgttaaaaatcctcaacagaatggggttgctgaaagaatgaatatgacacttctgaacaaggtaagatgtgtcctactcgattctggtttgcctaagaagtactggggagaaactctataaacttcgtattacctattaaatagaagtcccagtagagctattgatttaaaaactcctgaagagttatggaatggtaagcctccttccttaatgcatttaagatcattcggctgtgctgcatatgcacatacagtagaagacaaactaggaaagaggtctatcaaatgtgttttccttggataccaagttggtgtcaaaggctatagactgttatcaattgaaaataataaaattttgattagtagagatgttgtttcaatgaaaacaattttccttttaaaagaaatgagaagggtattttgcctactatttcaggtgatgactttcaacccaagatacaaatcgaggtggagccattgcagcatactagtggagatcttaaaattcaagatggaaatgatcaagacattgaggaagacaaccaatctgaagagctggataattatcaactggccagagatagaacagggagagaaataaagccccctgccagatttggagaagctgatgtaattgcttatgctcttgctgtagcaaaagaatcaaaggaagatgtacctagaagctaccaagaagcaatcaacagtaagcactaaaagaaatggaatgcagcaatgaatgaagagatcacctcactaaagaagaatataacatggattgttgtaataaaaccagatggacagaaagtaatcagatgtaaatggattttcagagaaaaagatggtctgactgaagatgaaccaaagatatacaaggctagattagttgcaaaaggattcacacaaattgaaggtgtagattacctagaaatcttctcaccagttgtcaagatgaagacaataagaatgatgattgcaattgcagttcaacttgacttggacatacaacaaatggatgtaaaaataacatttttaaatggaaaacttgaagaaactatatacatggagcaacctgaaggtttcaaggtggagtccaaagaaggggaactggtttgtctgctaaaaagatccctacatggcttgaagcaatttcctagacaatggtacaagaaaattgattctatagtcacaaaagttggttacatcagatccaagtatgacacctgcctatacttcacaaatctgaattcacaagctgcaactttcctactaatctatgtggatgactagcttatcatgggcaaagatcaaaaccaaataagcaaactgaagtatgttctaaacagtgagttcgagatgaaagacatgggagtttctaagaaaatcctaggcattgaaattagaagagacaagaaggaaaagaagctgctacttacacaacaatcttacattgagaaggtcattaaaaagttcaatatggaggatggtaactggccactttgctttcacaactgaacaatctccaaaagatgaaaaatcaaggaaaaggatggaagaaattccttatgcgaaagccataggaagtgtcatatatgttatgataagcacaaggcctgacatagcatatgttgtcagcacattgagtaggtttatctccaatcctggtgaagatcattggactggtttaaaatggcttttaaggtatctaaagacaacctcaaactatggtttgaagtttgaaaagactggtagtacattgaagctagaaggatttgttaatgctgattatgcatcaaacaaggacaccagaaattcgattacaagctactgtttccagttgaatttatgctatataaactggaaatctcagctgcaacctgttgttgctttgtcaactacagaagccgagtttatggccataacagaggccttcaaggaagcaacatggatcaatggcattctgcaagaaatcagcatgttgaaaggaaaagtttcagtattttctaatagtcaatctgcaattcacttgagcaaaaacccagtctaccatgagagatccaaacatatcgacattaggatgttttggatcagggaaaaaatagaagttggagaaatcgaattagagaaagttcctacagatgagaaccctgctgatgcaagaactaaggtgctgccaatgagcaagttcaagcatttcatggacttgctcaactttggacctgtgtaatctttaaggttcactcccccaagtatgttgtttcattagttttctatgaattaaggtgtagattgtggtgtaattcatagaaaacccatcttgcttttaacttacaagaagtggaaagttagttaaagttggttagaaggtagttaagttagttagtcctgtctgttttttggttagaggcttagtttgtgagcttttatctaacctatataaacaccaattgtaatggatgtaaaattaagactgagaattgaaaaaaaaaaaaaaaagagaaagtgaggattagagatctgtattgagagagagagagagtcaaaggactgaagctcttgaaggttatgaaccatggtattcatggttttctaaccagtcgatcatggaggtttgagagtagatttctttctgttagctactctgattgaagatcaaagaattggtgtttgtaatcaacatttaatagtggagatactccttgggggagagctggaataggactcacattgagattcgaaccaggataaaatccttgtctcatccttttatttttctctgttttctgcattaattcttgtctggtttatgtttaattcctctatgattttgtatctagtttatgagcattattatgcatgtgtgtgtgtgttgagtttgtgttgtaggaatttacaacagctagtaatagagaaacgtctattttaaatttttatttataggctggggcaaaagatcacaacgaccaagtccatgcgagttccttatgttataggaatgaaattactgttgggtttatgcattgaaaaacccataaagacaattataattgtggggaatttacaattttatatacattataatacttttttttgaatgaaaataatctttattagacagaaatatccgctaatacaaaagactgaagag

SEQ ID NO: 14102 - DNA, 7588 bp, Cannabis sativa
ggcgggacttgccgctagtacctcgccactaatactgaaactaatcatacatgaatttttattaaaccaagggtcctttgatattagttatttttctactgggctttataaactcaccccttattttctctcattctaggaactcagtttgatgctagtggatgaggatggtaccgttgaggaagaaagtcgttattagtttaatcttattctacttatcaaactttcttatgaaactaattttgtatttaaacttgaatggaagactcatatgacttaaattaactatgtactaagtagaaatgataaatgatggatgttagatattatttttgtatattattgacttattaaatctatctattcagtgactacataactgtgaagatattattgtttttttttttttttttatattgatgagtagtcttaattttgttactaatatttttttattgatatagaaattaatttattatttttaaataaatattttgtgatataaattaaaaaattatttataagtattattttcctacaaagtataacttttcactgcttaaattataaatattacatagtgtttgacatcatagtaattttagcttcctaagatactattagttatcttttttcaacacttgttcagttaatggtaattacatatggtattgggatcctaaatttaataattgtgtggctcatttggttgcaaacaatgttcttgtttgtaaaacttttgtgttttgagatttggttggtgagaatattttttttttattgtaaaacttctagtagtgataacactctattttgaaatacaaaatatgtttaaatataaggtagtagttacacataaatatttaacatcttgtttaataaaatagttagtaacacaatttaatagcattaaatatctaaaagtgtaattacacttaattctagatttctcaattacatgattatatttgaactaataaataattcaaattttataattactttaaattaaattcaattttaattacatagtagaggttttacatgattattatagtaattaattatgaattcttaatattttatttgacaatataattaataattacacataaaaataataacttttagtacttaatattacaaatgatatattttttaataattatacaatttaattgaaaaagtataattaaaatttctcaattacttctacaatgatgaaacaaacatacaaaaattatgtaattacatcccattctaattctttgttgactttacaaaggcaagtattgtttttcaaatgaattttggtaaaagctcattatcttctcacctcacacttattatttttcattaacttactatattattatatgtacgtatgaaactctgattggtaagtaaggcacccaataaaataataataaaaaaatattaataataaccggaccacttaaataacatcgtggactaattctaccacgtgtcaccatccaaaccgtcgattaattccaattatcctcgactcacttatcactaatatttttaaaaaattaaaatagccttttgaaaataaataaataaataaaataaaataaaatttgtaattttcaattatataaagggaaaatacaatcttcttcttcttcttctccttctctctcctctgcctttctaaagcaggaccactttcatactccttgaacaaactccattagaagaccttgacccttttctctaaaccctcttcctaaatctgggtcgtatttatttttctcatatttcgatcgatattattatgcacagaaatctccattaaaaaaaaatgtcgtttcaccaccaccaacaccataacagtagcagtactaatcttcctcaagaaatggcttttcaccagaaccctttttcggaccagccttcactatccgccggagaagatgacgttgccgttggagttggtgctccgacgtggctaaacagctctgtgttcagacaacagaaccttctccacttactgtctgaatcggagccccgaaacgaagatgtcttaggggcagcggaaggaagcaagatgagcgatttcattggcgatcaaagaaggaacaggagagaggaagaggaagatgaggatgaagatgtagagagtgagggcgcgtggtacaaagccgatatattgcggcaccctctttacgaacagttgctctcggcacacgtgtcgtgcctgaggatcgcgactcctgttgaccagctacccaggatcgacgagcagctttcgcagtcgcagcgcgtggtgtccaagtactccgagctcgggattagcggtagtggcggtgttagagtggtggatgagaaagaacttgatcaattcatggtttgtttccccaattaaatgaaagaaaacaaatatatttctaaaattgtgattgttggtttgtgggtttattaaatttggggtttttgaacataaatttgaaaactttccatagttttccaacttggttttcaatttcaatcgtttttcattgtcattttactttaacttcttttgtggtctacgttttgtcaaatgtgacatcccgattctcttttctttctttttcatattgtccaaagatatttctaattggatttaaaattttaatttttaacttccatttatgctttgaacccaaaaaaaaaaaaaattagtatatatatatttatatattttgtagagtggataatagtagctaactttttggttgtgatgctaattagaatataattatgtagaactgtcagagggaacatgttgtcagttaccttgttggattctttgcttatgcttttaagaatcttttatttttgttaatgcttccatactttcccacttgtagtcattcatagatacctttgttcccatcttgttagttggtggaatttgttctagcatgaaataacaacaccaagtatttacagaagttttgatcttaaaagtgttttttttttcaaatcttggggttcatccttatcttttaacttcaagtcatgctgaaaaaaaaaaagttttgcatggaagtgcatgtagaacaaagagtttacagatattaccttatgtatgcttttctgtttgtatcatagtgggaaattaatatgatgtttcatttcaatttacttttcttgctcatgttttgtgttttctttctcatgtagacaaattatgttatattgctctgttctcttaaagagcaattgcaacaacatgttcgagttcatgctatggaagctgtgatggcttgttgggagcttgaacaatctcttcaaagcttaacaggtaacatcaaatcatgtcaatccctatgaaaacatctttagctaccaaacaaagcaaagaatagtaacaattgttcctctacatctatctagaaaattacttttgttacttctttttgtcttatttgtcctctatctttctctctcaacacttctctgcagttcacttttaatatttgtttatgattttgccagtgctgttaagttggttccctttatgaattctgactcttaatgcttgtcacgtattcttaaattcatagaggttgtgatcaagtgtgaagctttctttagtatccactatagattgatttgttccaactcagttgtaaataaggatattatccctgttttcttgtttcttctcttctgttttagtgttctttttcttgttttagtttgtgccaaacaaagaaagcaagattttctaagttggtaaacaatgcatgagcaggcgtctctaccggtgaaggtacaggtgcaacaatgtcagatgacaacgaggaccaactagataacgatatcaacttgtatgatggaagcctggatggtcctgatagcatgggattcggtcctcttgtgcctaccgaaactgagaggtcgttaatggagcgtgtgagggaagaactgaagcaggaactaaaacaggtaaagtaattatatagacttgctattattgtttaacacatttgttgttttggctgttgagctcttttttttttttctgtctcagggttacaaggaaaagattgtggatattcgagaggaaattcttcgtaaacgaaaggctggaaaactacctggcggaaccacctctctcttgaaatcttggtggcaatctcattccaaatggccatacccaactgtaagacataacttaaatccattcatggctgaaagatcattaataagcctagcaattaattatcctagtttggtttgggaaatgatgttttaggaggaagacaaagccaagctggtacaggaaacaggattgcaattgaagcagataaacaattggttcataaaccaaaggaagagaaactggcataataatctctcgccgtcaccttcttcaaagagcaaacgaaaaaggttggctctgattatataacacttgtttttgtgtttccattgcaaattttgatagtactgtaggttatctaattgcatatagcttgggaactaatgccaggtgaagcccaacatcttgtatcaacaatgactgttcatgtaaatggccaatcgagttacagtcactccctacttcttaagctatatatactgctccttaagtctctacacttttccaagttcatgggaagctagcttcatatagagagataaaggaagaggtaaaaccaggctgcgggataagattagaagactgttccagagaagattataattcagatatagagaagaaaactcgtacaggtgaaaggaagaagatgagtacagctttgtgttgttgtgtactactaaattcatatgaatgatatatttaaggtctactatgttttgttattgtgcatgagaatggttttgagccttttatttctagtaaaatgcattaggtgataattatatttgatcctgtaaaagggttgttacaaatatgaaataatttcaatcctgtgttgttggaacttgggattttaaaatgtttttgttttgagatagaaaaattaatcattcgaattttcaattggggaattttttaaaatattttttttgtttacattaaataattttacggcaaaattcaaaaatagtagtcttgtcttttgacatggtaatgttgttctctctctagtactgttcttgttttgtcgtcttttgtttattgagcccattggtgttgtatgtgttatggcttccacaagtgcttcgctcaaagatgtggaagaacaatatgctaatatactgattgaaggagaagatgatgggaatgctgtgtatgacatatttgatgattcagaccaaagtggtgaagatcggtggtgcattgtaaggaagtttttaactgagagggctattgattttgatgcaatgagacatatgatggcatctttgtttcaaccaggacgtggtatgtatgtcaaggagctcgagccaaataggtatttgtttcaattctgccatgagattgatcttgaaagggttattgaaggaagtccttggactttcaaccgcactcaattcgttttcgaaatacttcaacggggacaagatcctcgttctgttattatctccaaattagatatgtgggttcaagttcatggcttgcaacccggtttcaaaactgagagaactcttcgcgagttaggaaactatattggcacgtacgtaaagacagacccaaagaacttccaaggcatctggcgtgattatttgcgagtttgtgttacactcgacatcaacgtcccattgaagaggagaaagaagcttcgtcgtactgcggctgaggagggattctgggctactttcaaatatgaatatgtccctaccttttgttttatttgtggcatattgggtcattcggataggttctgtcctcaattgtttgtcatgcccgctgaaaaaattgtcaaaccttatggggctggtatgcgtgcccagccacgacgacgtaatcatttgatcggctcgaaatggctcagaaccggcgatgaagacgttgactccttccatggtggtgcgactggtccaggttcattgccctcaattaacgttgaagatcaatcttcacatttaggaggagttatgaccaccaatcaagggatatcaacaggtaagttacctgttattatttcaaataaacatgaaggagtgaatattggtaagtcaaatattcaaggtattaatgttgttgctgatcctattcacgtgaaaactattatggaaacaaatgaggcttctcctttgcttgtaattgatactaaaagaagaaggaaaaatgaaatgtgttctaatgggccggctggagtgggcttggaaaatagtgacaatatggacatcttagttggtgaagacgatactgaagagggctcaaaaaatgggctgttggtgggtactggttcccaggcccaccgctcattatgaatattctaagctggaattgccgggggcttgggaacccacgggcttttcaattcatatttcggatcttgttatccagaagtggcccaatattgtctttctttgtgaaactttatgtcggaagaatttggtggaaaagcttagagtcactatcgggtttgagggtatgatagctagtgatgctcgcggtcatagtggtggtgttgcggtgttgtggcggtttagtgatgaagttgttttgttgggttactctttgaattatattgatttaaagattaccacggctagagaagctccttggaggcttacggggttttatggtgagcctaatcgttcatttcgtgctagaacttgggatcaaattcgtgctttaaagtctgactctcatttaccatggtgcatcatcggtgacttgaataatgtaacgtcccaagcggataaaaaaggtgggcagccgtatccacaatggttacttgatggattttgtaaagtgttggaggactgcaatcttaatgacttggagctctcgggttatccattcacttgggaaaggggtcgtgggtctaataattggattgaggttcgccttgatcgtgttctagcttcccatgattggtctcaacgttttatctcagcccaactttttaatcttgaagtgtcaatctcggaccactgtcctattcttctccgtactgctgcgatcaatctccaccattcgaatgctcagtttcgatttgaaaatgcatggctccgtgagccattgtgtcgccaagtaatcctagacaactgggaagtttgtgcggggctgactttaattgaaaaaataaagtattgtggtgagaaattgatggtttggggtcaagactatacgggcaactttaagaagaggattgctaattgtaaaaaggagatccgaaggctcaaatggtgctctgacgaggactctgttgctcaatataaacagtctgttgcggctcttggtgaagtgtatactcagcgtgaagtcgtttggcgtcagcggtctaaacaactttggcttcgcgagggtgatcaaaatagcaaattcttccattcaaaggcaactgctcgtaagaaaaacaactccattagctttcttttaaataattcaggcgtgtgggttgattgggaagggggtctttcagatgttatt

SEQ ID NO: 14103 - DNA, 14312 bp, Cannabis sativa
tacgtggcttggcacgtaacaatcacctagtatatatatatacaaaaccttaatgggatcaaaacttctgcctagggaggacagttttagttgataatcaagataaattagaagttactcccgaaaaaacaagtatttatcttttaaacttttcaatattctataatatattgttatacaccttcgttttaagtattaagaatataatatgcatgcaaacgcacgcatgtatatgcagaacatttagttctgcattatcttttatatatatgcagaacattagttcgtaattatctattatattcaactctccaaattgttttggcatggccaacatgtatataaacagctaggtggaggaatagaatacaatctgtattgaatgaatggatgcaaaacttctcatgttattgtactctttcagcgatactacaacgccacatatttctggtaaaaacatattctctattacatacatccatgctttatgtagtcagcacttttaggagtttttttcaagaaaaaaagaatatatacacgagccacgtgtacggatttttaagttaaaaaaatgggggtgaaaaatgtctccacggtttgtttgttcttgagataaaatgtgatccattattactagtattcattatttaaactcaaaacaagaataagaagaaaaaaaaatattgataagtaactttctctcttccgagttgcttaacacccaccaagctcagatgtccatatgaatatcgtgtatgtataacaagacaaatcatagagtaacatgattctatatgcacttaaaaagtaaaatataaataatgatccacgaaaatattagcgcgaatcaaagaatatttaattgttagttctatataaatgaatttaaattataatcaccatatttttctactattgcactcggcagccgtgctcggtattgagataaatcaacccacgtttgatcctctgcaagcgaaaaatatacatattgataaacagatcatacatattcacttaacatagatcataaccaatcctttctttaagtcatttaacattcaaactaaagaaatggaatggaagacaaagatcgccaaaaatttcataaagagagaccacagaccaattagaaagttgaccacaaaatacttcgtttatttcttttcgattagcatagctagctataatttgaaatatagaaacagcagtgaagaaaatatgtccatgaaattcacatccaaaactaaagattcattacctcttttgtatctctcatgtgcagtagctccaatctttcttgaggcctcagatttgatagggtaacaagctgcaaccaagtacatattactttccagttagaaaagatgcatctattctttctccatagtcatgttagttaaaatgaaaagttaccctccttacaagaaaaaaaaaatgaaaagttacccagaagctgaagccctcaggatcttgcactgtgggcatcattgtctccaggttatgaatttgctcgagttttctttgatctatacattagattgcatcaaaaacattaataatgtaggaaagatgcaatataactaagagagataagcctttactagtacaagactgcgtgcggagaagatttaaacggattcaatcatgatgaaaaattaaatcaaaacattttttttcaataaatcagaacattttagtacaagctaacatgacaaacgtagctacatcattaatgacacaccaaactgttacaataaaaccagaaagggaattgaggagttatgaagctttattgaggtttattaatggatacaattgttccaggcagttcgagaagcctggggtctcccaaagaatatgtttactataacttacaaattcattcgcacctgtaaacaagaaaaactttcccccttttaaccaaccctcttagaccacgtaagcaaaacaggacagctcattgaaaaaggaaactgccacttcagctaattattcacaattaatttctttgatctcctagaataagtaaatctaagtggtgtatcaataccccgggaatgcaccttcaccttgtcctcaaggtgaaactcaggaaaagttgtgttgatcttctcaaaactctcccaagtggcttcaaacacagggagagacttccatttaatgagaacctctaagtcaccaagcccttgagtggattgttggcaaacttggagtacttcttcgggttcaacgtgcaactccaactccggcatcaatggtggtgaagtaggagaagttagggtacagccgtgtgccttcttgagttgagaaatgtggaagaccggatgtatggaagatgagggaggtgaaatccagtttataggcgaccgcttctatcctttcattcaccttgaaagggtcataatacttagcggccagctcctcgaatcgacgcttagctaaggactgttggcggtgggtcgaagcttgtgatagaccaagtcacccacttgaaattctgcatggtgttggcgctggtccgcattgtgcttcattcgttgctgagctctttgaaggtgcttgagcaagtcatcaatggtggcatcccgatcgagcagcaatgtatcaacagcagaaacatgtgaggaccttgctggatagcaaattaggggtggtggatccctgccataaagggcccaaaaaggggtagtcttggcagccgagtgagtggaggggttacaccaatactcagcccaagccaaccacttggaccattgctttggtttctcattagcaaagcaacgaaggtatgtttctagtgtccagttcactacctcagtttgtccatccgtctgagggtggtaggcattgctgcgtttaaggttagtgccttgccatttgtacaattcactccaaaagtgactagtaaagattttgtcacgatctgaaatgatggacaagggaccatgaagacggacaacctcgcgaaggaaaatgtgagcaacagtggcagcagtgaaggggtgttggagagtcacaaagtgggcatacttgctcaatctgtccaccaccaccataatattatcccacccttccgatttaggtagcccttcaataaagtccatggaaatgtcattccaaacttgagcgggcaaggcaatgggttgaagtaacccagctggagtagtggctgcatatttgtggtgctggcatatggaacactcctgcacaaatttcagcacatcttttcgcatacccacccaaaaaacttcagatttcagccgctgataagttttcatttcccccgaatgggttcccataggagtgttgtgaaactcagataaaataatcgaattcaaactcaagagtaatatcatagatagaacagtctaactaaggaaaatcaatcatgtcgctctactaaattcttggaataaaattatgagtcgtccctgaatcaacatgtacagtaaccttccggctgctgatggctcccttgatctttattgttttcacaactgtcaccccaatcaccgcattcaaggacatttctacggtaccagtcagctcagcattgtcaaggttaaggtctttatcacacctagagtaccaattctggttcgttgtcttcatcgtgagtgactattacacaattcttttttctcacattgatgccctagtgcccatttgttatcacaacaataacaaatgcccttcagacgcttttcttgcattttggagtctatcattctcttgtattgacccatcggtttccaatcattcggtgaaattccagtacccctccagtcctcattgatgcccatttgtctagagttactccagtaagaacgattgtcaaataaagaatgattcttgctctcaatcttcgaaaagcaagctccattgctttattcaaagttccgagttcaaacaatcgcaattcttcccgtaaacctctttgaggccggaaagaaaccgaccaagtgccgccactcgaataccccgtctaatggtgcgaataattccaaaaatccctcaacagtgttttccacggtactgacttactgaaaatcaagaaattgatcatgtaaggatccctttgaagtgtttcgaaatttatttaggagaagaagcctcaaatcttcccacaaaacaattggacggtagcggagctcccaccaataccatgttagagccttcccttcgaaactaatcgttattgcctcaaccatttcctcattattaattagttgcagtgtgaagtatttctcagcccttagcaccatccatcggggtcattaccatcgaagatcgacagctccaaacagcgcaattggaaatctcgttagtggtccaaacagaactgctggtttccaacactggcgtccccactttctcaaaaactagcccctgtgacgacttcaccatttattccaatgcttctgaagtttggtgaccggagctgggttcttgattaccgacgaatctagaaacctccgtcggtttctccaagagccgtcccaccaatctctttggaattacccatctccacccgaactgtgccaaaatcctcttacactgcaccaatcttggagtcgaccaactcttccatctctgtcaattcctcagtgcgatcttggccaacttttctaggtttctttggcatcgtaattccccccattcatccgctctgatagcaaaatgttacaacaaaaacataaaggaattgagaaggacttatgaagctttattaaggttgatcaatggatgtaattgttctaggcagttcgagaagccgagaattaatgaccacatatgaagtagctctgagagatacggcagccctttcaatgatcaggtgttgctatctgatggttgatgaagtgcataggttcaaaactaggggaggacagttgtatgcaactcttttgaaattttacaccaagaataaattattggtaatgggtactcaactactaaacagtgtggaaaagttgtcagctgggcttcgttcctttgatctagataagttcgagagtaaggtttcaccaaagttgtcacaccaagaatttacatctcaatttttcctttgccacatcttgttgaatttctggaattcgttttagtcaggcaagcaaaggaggaatatgtccagtcttgggtttttgatcaaggcagaacgctaaaccttttcaagttctttcgtggctcaaatccatagtttccaagctagtggctactaaatgacattccttgattggtttttcgatagaggtcgactcgccaagtggtgtctattctgttgcacgacccgccaagttgctcactccacaagcaaatagtcattcccccctttttttggatagaatagacaaagatttttttccttttttctgcaccgattgctcatccacttggtgcacttcactagcagcttacagacaacgctattgtccttcaccttgagggcaaggtgaaattcaggcgcccggtaatgtttgaccccaggattaatggggtgagagagagagagagagagagagaacagcaaataaaagggtatattctttgtcttaaagagtagtatttgggagggaatacaatagtatatatagcacgattagaagaatttggagggttaagaaatgaattgtatattttctctatttgcatcatgtaaagcctaggcctctcaattgcctagggatagtctctgtaattctctaatctactatcaatctatacacaagttttctatttttttgctattgttcttattttggctgctgttcaattgggtttacttagctatggggtttgggtcttatcagcaattgagagtgacatggtctattgggatcacatccattgcttgccacagataagcctccagtaaagttagtatatactatgaggccacaagacatttaaagaaaggattgttatgttctattccaactaattgttatttagttggcaattgtcttggagggttgtgttgtattagttctttttagatcctagctcgcaactaaaatttatttgtccaatacctataaaaaggggggtgattcattgtgtaaagcagcttggaaagagaagagaatagactctaagagagaagcctcttagaaaggttgtaattggagatactaacatcttgaaagctagattattcttttatttcaacatcaataaagaggttttctttgagggatttctttatactaatatggatagataattttattctctaagaatatcttatcaacctccaatctccattttgcaacaagaaaacaccccaacatccactggctccgtggtgaatcaaagcgctcctaccactcgatagaactcactagttttatctcacaagcaaataaccaacaagccaaaccagaaagggaaattttagactttctatttaattaccaaaagaaaacaccctgagtattcaagagttataactcttcccaagagctacagcatgatcccctcacgaatcaccatgatcccctcatgaatcctactctattcccattcatccaccaacacactataattaaaaccgatgttcccatctattttcttatacgttatctacacatgacaaacatcattgacgaagaaaaaaggggagggtatattaactcttacaacattcataaagatgggtactactactaactataacttaattaatatccaaaattcaaacagaacctatttttttccaaaataaagatatgctgacgacaccaaaagtgaactgtaatagattcatggatcttcaaagaaaaaaggggagggtgttaggcatatagataaactaaccaatatatgtaggagatagattgtaaacaagaatgattctcctttttctctagaaaaaatttaaaattaaaatttttgctaagcttgagctgaggtatttcatatttggatatctaaaattctcaccatattgtgctgcctgttttgccctcctcatccacgaccgagtgtactctgatgcattacgtgtcaactcaagtaactatatccataaaatatattagaccattagtatgcaacagatatgtataaaatcagagcaaaagctcactatgtatggtgaaaaatatatccctctagtaacgtgtttaagtttaagtatcaaatgggaaggcaaaacttacttcttctctttctggtgtcccttctagtgggttattatcctgtatccattcgatctcagcaacacgatacctgaattacacaaaaagggatgataaaaaacaaaataagctacatatcaaatgagcaacaaatgtattcgacacttctagaatactctaattacttacccatcttgatcccaagcccggactattcgaaatcttcgacgactttcaatctgcatcaaagtttctttattaaaatcacaagttaatttttactttttttacgttgtactgctagaaaaaatagtaaatgaacagctcgaaagaggtgaggtacaatttcaaaaaatataagctaaaatggaatatttattgtttacaagagagtcgatccaatttttccatggatataagagcccattttggtgagctagctaacagaagaaaatacaattttaggattaattcactagtataatgaggactatagagggaaaataaataacataactttcaagcaaaatttacttggcatagattatttaaagagaatgttgatgtctcagactacattgtccgttgaactgatgacaatatatcataaaggctaattgggatttttacttcctgaactatgacatgtaccaaatcatgtttcctgaacttttaaggtcgttaaaaatgtctcctgaactattgagattgttggatttaaacactttttctaaattttagtaaaaaaatctaacatgaatgaaaatttaaggggcataatttagtacatatcaaagttcgaggggcatgattgagtagttatcaaagtctggagaacatgatttagtacataaacaatcactgaaatagtaaaattgaatgaagttagacaaaagtccttaaatccaacaagctcaatagttcagggggcatttttaacgaccttaaaaattcagggtgcatgatttggtacatgtcaaagttttagggaaaaaatcttaattagcctatcataaatgatttgcactagcttcttgagcaggcattgaagaaaacaagtttgcaaagctaccttttcaagtttcataagaatatgtttgagcaattaattttcagtatttgtttttcgaaaacaattaatattttttgatgtatttaatggtcatcccacaaaagctaaaccctacaatcgtttggtgaaaactacttgggattcaaaccaaaccttactggagaaaaccatggccccaaccaattgatactaccttagagagctcaatacttgaataatcatattacagaagttatgaacagaatcataagttcgtgaggcaaaaaaacaagggagtgtgagatctaaaaggacagtcaaacagcttatcttggaaaatgatgtcataattagaaggaaaatttgtttccacattccaaatgagtaaaactaaaatccttgtcaatgaataaacaaaaatcattaactgcattttccatactggttcaaagaaccaaatttataatgaaatctagatattttctgtgaaaaatcagcatatgttttcctctgatttccttctctaagaaaacaaatgtcaaaaggtttacctgtcatctttatggcagcacaggatacaaaattgaaaggatacttattagcatataccaccagaaaaattcttttgttctttgtttattccttttctctttttaatggaaaatatttcagaatttcatataattagagtaattctgaccaaccataatacagtcaacaaaaatagaaaacactaaagtaaagattacctccaggtagaaacgcccatctggaagtggttcacacctgtatgtattaaaagatgagtgagaaaataaaagcaaaaattaaagatccgatcatatatattgaaatattaatgagtaaaaaactgaaacgctaggcaagctgattggagagagaacaaatgaaagacctactccgttatctcaacttcacaagcaaaatcagctaaggaatttgttgaaggatcaacaataacctacagaatttacacagagacattacacattttttataattttgatatacttcaaagaggaaaacttaaaagagaaaaaaaaaggagtactaaagcaccattcccatacgacgactcccttccattatccttctcacctgtgtttcaagtgaaactttatataaataacatacactctagcaaatgataaattaaaatatatagaattgccttatattaaatacccatccatcatcttccccttatcataataaggtttaggttacaaatttactaaaagaattatttgaaacatagaaaccgtgtataattcagaaagacatccacaataatatgataaacttgaaaatgtatacaaaatctcaaacttatatgcaagtacaaagttcaatgatcatgtaaatttctaaataaggaacttctggaaacaattaattattggtaaacattttcaatactgtattgtaagtggtgatatataaaatccatgtgcattaatgaaacctcaaaccgactcaccattagtctatatcgaggttcaaatatatgcagcggaaatttctgacatggaatgacaacatccatgacaaaaagaggcagcaaatcaacaccaaagtttgtcatactttcatgatctgactttcttgcagcatattcctcagggaaactcttttgtataatactgttaagtgtaacactgagcaaaacaagaaacgatgtcataaagcagtgctctggcaaaaaatctatgaaaactagaactccatcaggaaataaacagcaaagaagcttcataataaattagactcagaccctaccaaaatgatctaacaaagattgacaaaattcaacttttacaatttatttgagagattatgtaaatgactagcattgaccagagaataataaaagcgacatcaaggaaataaagatgattgaaaagttagtaaattttttgatacgtctattaaagcctatgatcttgcagagttgaatgaattaattaagcaatgttggtctatctactaatcaaatgattattagccaacaacgttgttatatgcctaaatgatctcactcatggaagggaacccctacatgtcttgtcccacaccaagcacatggttgtaacaaaaggataggtaggaggaagcttcactgatgcttgaaaggtaaaaccaaaacaagtgatctcgattaatttatcaacagcaagaaacttacctgatagaacaagttcttggactaatgaaaagaactttccggcacaatggacatttattacctagtatttgcaacaaggattaaatataagtaaatataaattgaacatatcttccaaaaataagatcaaccgcacaataattgaacaaagtattttttaaaataagatcaattatgcactaaaagtactcactacgatccattgaccgaaacaaacatgaccgacaaaaagaatgcccgcaaggagttgtgataggttcataaaataacttcaggcataatgagcaattaaattcatcactgagttctggcccttcatggtatctactacccatcaaactgctttgtatattccccaaatcctgtagaaaactctgaagagaaatgctacataaccaaagaaaaacatcaagtattacaaaatggtacattttataggagtaggaattagcaggctacagtacatatatattagtatgtaatcagctgagttactatgattacaggtattacctagaaggatccatgtgaagaccagaaagaagaacacctcgggccacctcgtatctctccaactgcaagatgaaatgacagtcaaattgacaatccaaatcaacaactacaggtgagggaagcaatgatgtttgtaagcacaccagtcacaccccttcttcagaacactacgctgaagaattaaaatatcgaagtgcctcatatggcataaaatatggcatcctaagcttcctatttttaacagtgagttaatctacttattgttaactagatatgccatctcttactaaatactaattagttatttcgtagctattttggtagcttgacactcaagtatttacaaagagttgttaggcattttggtaaacataacttctgcttgtattattctcttttgtgatgaatttttttgattcagtattaagccactgatgctagcttagagtgaggggagaaaaggatgagagggaggtatcaagttcgaagctaaaataaatattcaccataaaataaatattcaccagtgcacgtgataagacacgttcagcctagagtaccagtagaattcggttagaaaaacccctcccctatgaactgtaaggaaatggtgacaaattcttaccaaaatgagagcactggcctttaacaagtatggcttaacagcattacttcgtaggttgatcagcttctctgcatcctttaaggcaagctgaaataatcggaaaataattgttttaacactgtaggcaagagaaacttttgattaactaggatccagatctacttacttcagcatgcgttgtaggatccagcccattcaatggactatcttcagaggttgatggaggtctttctatcaaatatttactatacctgcttcagagaagagaccattagtggaaaggaaaccattctaaaatatgattggaaagcaagtaataaataattgtggcactagtaaaggagatgagccaatcaatgactaacatttaacctgatataagcagtagaacggttgctaagaataataggatcacttggtttgatgctattagcttttatgtaacaatgaattgcctgaagaagaaatatgtttgatgagcacaaaatgttcaaaaaatgataaattctacataaaattcaaaatgaaagcagccacatatttatgaggaaaaactattgcaagcatatcaaactagttggataagacacaaggatcttcaaatagatactcgtactaatatcaatactcaaattaactatacatttgccaagaaaaacaagaaaatggctaaggttatacatctattcacttacatggaggccatgttctaaagtatgtgcaaccacatttgaattcacttattgttgtaaccttaaaaactaaaccaacttcttttaaaacatgaaataattgtacaaggagagccgacagtagtatggtagttatctatttagctcagtattttccatcacgaccttaaatcctctacgtatgtttcacagcttcataaggattatgtcaaaaagacaagaccatatttttaaaacatgtagctgctcctccagtagtctcccataattgcaaaacataaaacattactggggtatgtcaaattaaataataaatttatatataaaaatttagaactcagcttctagggaactaaaatatcacaagtatattgaaagcataagaaaataaataagaatgttgctacctcctcataacgcctctctctaaatgcttgatttcctctctgcatgaggtgaaaaacatgagtaaatgtgtctaagggcaatgcttcctctccttcatttgcctacacacattatgaatttgtaatcagtgtcgttttgattctcaatcataaattaagatagtctaatttcaattaccttagctttattaacacataaaatgtcaatttttaacctttttttttactgaaactaggattcccgccaaaccaaaaactatagcaattgctaagtaggtaccaggatcatatcaaacctcaggccttgaaccacgcctgacaatttcagctacccctcttgggtttacttttttttttttttcttaaacaggtaaatttatattatataatgaaaatcgtgatatgaaccagctctaacaagcgaaaataacttcagattcaacaataagtacatatgcatatacacacgacattgtccattttggatgaaccaatgttcacaaaccaaaaaaaaacagttgtacgctcacttttccttagattttacactgtccaaaagaatgtaaacaaaattatataagctttaatggaaactgttcttagcaggcaaacagttgaaaaacaaaagaaacaaacaaaatctctaaaatttaaatatatgtatataaaaaaaaaaaaaacgaataaatacccacagttgtcagaaatttttcgtagtaaatgttatatagaacagtaggcaaaattgtccggagaaatttctctttttctccgcaccgaaaaataaaatatatactttcttcgttgttaaatgaaagatgacaaaataaaatccgaaaatcaaaaaaataataataataaagttttaaaacagagaaaattttcatgattttatctgtttttatctcgcactttctcgagaatcaaaaaccggacaacaacaacaaaaaatgaaaataaaaaagaaataacaaaaagaaaggaagaaacgatcacccaaatgtagtcatcaacatcgtcaattccgtgaagaacaagtgctgagggcggacgttcaacgccgccagacatgggagaatggtggaaaggccacggtctctgtgtatggaaaaacctgtagaaagaaggaattgcagcttgtttcacaagtaagtaggaagaagaggaaacggaatgagaatgaggagtgggagaaggagcgttgaagagaagaagaggtttttgaagcttcaaagctccttctcctctacactactacttctttttcgactcactcacgctcgaacgaacgaacgcacgcacggaccaaatttcgctacgtgtttcactctcgaaactctcccccttctcacgccttttatgccgttcctctttttttattcttttcggatttttccttcagaaatgctaaaatatgttattagtgtaataagtatcctatctcatataatttaactaaaaaacaataaaaaaatatgcttttaatattactaaaattaaaaatatattttagaattataatttaaaaataatagattttaaaaagcattactattaagtactaatagtgcctagcacttagggtgagcatcatccaatccaattgaaccgaactaatccaatccaatctaattacaaaaagttggatatctaattataattggattggattggat

SEQ ID NO: 14104 - DNA, 2930 bp, Cannabis sativa
tgaattctattgcaggaggaagaattgagaggcgcagttgttctcatttttgcaaacaagcaggttagtgctgttgcccatgtatatattttttttacccaagaggggtagctcaaatggtctgacatgcgttttgctcccacaagttttgagttcgagtccttcccgggtacctacatagaagtttttatagtttcttgatctccaaatattacagggttaagggtggaacctagtttaaaaaaaacaaacaatatatatttatatatgtatatattttttcttaggttgggggtcattgcatgtgaaagttgatttttgcattgcatatgatttaagtggcaagcatcctgtggttgatgatttgagtcctttgacggaattttatatttatactatccttttcgcttttacaggatcttcctggtgcactagatgatgctgcaatcacagaggctttggagctgcacaagattaagaaccgccaatggtcaatttttaaaacttctgccatcaaaggagaaggtctcttcgagggcttggactggtaagcttgacatttctctagataatactggtcttttgacattaacattatagctccacctctattttccaacgtacccatcattaaggtgcacttgactataacatctttcttggctagctgatgaagacagacacattgaatccaaccaaagcatgattaatagtttcaagtaattagtattagtgatacaaaatactaattcggagagcatgaacgatggagttatcaagtttcgtttatgacaaaaacatcagataacagtgttgattgggaaaatcaatttatccttttgcttacattatctttagaacttattaaaggttaccttttcagacatatcagtaacagcatcttcttacatcttaccgcttgccagaagagaaataatgccaattatgcttagcttttgatttctctttctaagcttgtattacattatttatgtttccgcattaaatcgaattcaaagactgacatatgtttctttatgaaggctgagcaatacactgaaatctggaggtggctaactcaattcggctcagagaagaactacaagattgttgctgtgtggccattcgcgaatctcagaaggctgacggtatttacttggtatgaaattctgatagaaaattcttgtttcaaatgtcattgtccattgacctctgatttttttttttctcttctaccattttggattagacaagctgatatacatgtaaaattttcattatagatcacttgtgtttgtcataaaacaaattcatctatgttagtttctcttttgtttgttttacgctttacgggattccacctattctacttgagtggtttgaatccctgattctggagatggaaggtaggcttatttctggcttacttactgtgccctgtgctctgtgctgattagagacactgagaattttagttaattgccattaacattcttttatttgtgattatttttacatgtttggtaaatttaactactttagtactcactcataaatgatgatggtgaatttgaattagtggtgaatagcagaacttaaaactatgttttttttttttcttttcttgtgacactagttacatatgcaaggatgaagttagaaacaaaattcagtcaaaatgattttcaacttaggctctgaatagcttagaaactgtctccaattactacattgattggtatacgtgaaaattttatttaactttagactctgaatagcttagaaactgtctccaaattttaggcgttgtgagccactgtttgtagtgtatccaaatccatcatatgaacaagagaatttcctaggtattatattgacatattgagattactttattttattttctgtcttctatggttcattctagtccattcaatcctttattgggtaaataccatttcgaattttgtattttacaaaagttaccaatagaactctctgttttgttaaatgacaaaatgaactctgtattttttaaaattgtacaaatagaatcttgaactgattttttgtcaaaataaaacttaataataatttaatctaaaaatattatgataaaattggttacattttctgtatctattcatgttagaaattgtcttaaagttagttatattaaaaaatcaaattattaaaaattaaactcaaggtcttagttttacaattttagaaaatatagagtttatttgctatttaacaaaatagagagtccaattgataatttttgtaaaatacagaattcaaaatagtatttattcatcttttattccaaaggttcataaaagaaagaaaggcaaaaaaaaaacatgtcctttctttcttcccaacacatactgaatagggagttaggggcattggggtttttcaatgtaaagtgtaaattgatttcttgtaaaattaaagcaagaagttatacactcatatgttttgtatatatatatatatatatttatatttatatattcgaagataatgggaccataataagctgaataatcattcctccaaacatatggtatattacaaatctgaccactgctgctgctgttgagtctaaacattcagccctctttcttaaaagaaaatatcaaaaatatggtatattacaaaaaaatacaaattttacttgcaaaaatacggattttgtttacaaaaatatggattattagtttgtaacacattttacatatttgtgatttattacttttgggataaaatacaaattctttctcaaaaaatggtaattttttttccaattattagttgaggattctcttgggtctctaaatagaagaaatataagaaatgaataggatccatgtttccactgaggtaacatttgattggatgtaataaaatggaatggaata

SEQ ID NO: 14105 - DNA, 68750 bp, Cannabis sativa
ttgctggcgcggaagctaccgcaactaatagaaaaaaaacaactactagactagactagtagttgagtgctccttgttgttcggatcttgaccgggtccgagcttcccaagctctatgctgttggggaactctgcaagggtcttaccaccttcttgatttactatatttgagtctttggagtactttgggattatattccgcgccgaggatttgtgcttgtgggctagggtgaatattgcagaccagcggatctggtggtcgacaatcgttcggacttggtaaaggttgtcgcggcacttgtagtaggacagaggacttatcgcgatgcccgcggaccaatttacgatgtctccgtcgctgacgttcgtcaagcaggccacgtggattggccagggtcttcttcggctaatgatacctcgatcccgaagccttcggagtatctttttgataggcgcctctatctgtatggggaattcgctgctgatagatcccgcccagtgtcctcctccttcccccgccgccttccgacccgcgggagtatacaatgacaacttccggacactcatgcccgatcgtgagactgcctgttgaacgtccgatgacgcgttgctccgacctgagctatgcaacaacgagatcccccttgatccttgccggatgtgcttgacggtcccccataatacgctcacttggggacctcttactccagctgttccaagagtctccgctagttgaaccccgtccagtagactccctgtttcgctcatccccttcgtcagctgtttgatcgggatactattacctaggttcctaaacttggaatggatggcggagcgtaggtggcaagcagttatatggatacggtgctttacccgtagacgcttctccagctctcgcaagaattgtatgggagtcgtcctcggagggacttcccgaatgaccgtaccggggaattctaccgtactccgtgcagctattgttgttgatcctgcggagcctacccaaaggttcaggccggattgtaggaagtgggcgatacgtttttgtatttctatgagaagctctacggcacccacgattcccagtagtgagtcgtcggcatatcgcgcgtaacaaatccttattaagtaatgggtttttaagggggccgccagcttacgggccaggcgtctctctgacctgataactagtatcgtctccccgcccagctctatcagcaggccctttcttttgcaatacttaataaggtctctcatggcccaattattattacagcgttctccaccatagaattcggccttcggggtcaacccggcggcttctatgaggaaggcggcgcaaaggaggctcgagggcttgttaaggaaggcggcaagggccgacgaaggggggaaaacgaaaggcgttttctggtcccccctgagccggggggtgtgccacgacgaaacaagggaatgaaaggccgctttgcgttggaagctctttaccctccccacaatgatggctctgttgtcttggggagcgttgaagcttgcttcttctccagagttctcttggtcatcaatacgacctgtccttaatagaaccgatctgattctctgaacaatcggaatttcgtacttctgtcggatcctccctatctcctgatcgagcttgtgtaggtagatgttgcctggtagggccgatagtagtacactgtgtgggacggagtaagggcccttctcacctcctacgagtcgtccggcggaaaagactttctgaatggagtaaaagaacttgggatcgtcgatctcttccttaaagattgggatgagtcgatgtcggtcgatggtgtgaaaacacttcctgatgtcgaattccaaaaaccagcgagaggttccccactcttctttgatccgtcttagggccgagtggcggcctcgacccgagcggaagtgcgatgtgtctggaaactcgggatcgtaaatggattcgagtaccattctgatcgcctctttcatgatcttttctataggtagaactactgtgagcggtctaaacttcgacccttatttctttcttcatattgtaaaggagatcaaagttcttttcctcctttttcccaatgtcaagtaaaaaaaaagaaagcgtgacgagaattctttttttttattcatggtccagtccaatatttgttctcgaaagtcttcgtttccgtgtagaagccagcctttcgtcaggtctgaaacttcttgtttaaaaaatagtgaaactcgcccttaactttagaatccattttgctaacctcgtctaagtcttcttgatattggatagagaatggagtgtcttttaacatggatttcaccaattccagactctttagggataaaatccatttccggaaaaagggctcgagttgaagcttgtttacaatatttggtaaattcttgttcgatgaacaacaattcgtttctattggccggatcggccagaatacctgcgactcgttgttcacgaatcggggtgtaatcaaacaaagaagaatataaagaagaagcgggggcctcttgctgccgctgcctctcctggtctggggccacagagggaccgtcccccggagaacgaacagttcgtgaagaattcgtagatgtgaagccactttccgtttcagaaaacggttccaataagacatcgatgtctaatggatcttcactatacggggatgagctccctgtgtcggaaggggccggaagaggaagggcttgccccccccccgacactatcgattagagggaacaacgaggtcaaatccagacctacgtgagaaaacacgtagatccggatcaaagagcctaagaaagatattccaaataacaagaatccatacataacaactacaagtccaatgccccacttgtttttcaactgaaaacaataaagacgaaagagaaagatgaagcccaaaagaaaaagaagtattgaaaaaatcacaatattttgacccgtggtcattagtaccttctgatcctagaaaacgtccgaaaaaacccgccaactggcgaacttaaaagaagccatcgaaccagatttgtcataaaattgagattatttcgtttgcttccttatcagagaggggcccggcccttagggagcggggcttatttattgaaaagggggtgagaggggaaggaagaatggaaagtggggtggggaaggtccggaaagccctcactttattgatgggacattttgaaccccttttcctctcaccacccccccccggttctggttcaggaaagggtcaacgcaaggatcttacttcgaagcaatctctggagttttcctttatccgaacgggtcttgcaataaaataggatttcatattgagctccaaatatacgctattgggataggatggctcctactagttctccccccctaagaaccgcacgtgcgagttcccccgcatacggctcaagtggcgaaggccctttccttcgcgcttggtaagcgcttcgctgtagccaagcttactgctagccgataggctagagccaagcttcgaccgcgaatgctcgtcgcttctggccgccttattccgtcacccgagatccaagtcagcaccggcaaagatctcttgattcctcgcggccgggccggcttggaatcaagctacctgtcgcctatctcaccccctttcttattattagtaagataggttgcccctttctctaataataaggtcaggcgctaacgcgaccctccttcagctgggtgagccttcgctttttggatcgtcttctgcccaatgcggtaccctcccgttttttggttctcattgggtttaccttgtttacaggtcgaccccatggcagcaagaaaaggcgatcttgtgctatactccggtgatctctttccttccgaggcacgcaaactcccatcgtgtcccagatcacattccgtgaatcgaaaggggaagcctactcatccatcagctcctctcgtagatcggtgcggttttacgaagcgtctaagcacagttcactcgcgttgatcaatcaagagctttgccgccactccttaaggttacccgttgtatcatacacttcttgcattgtttcccacgcttcataccccccctatttcttcttaaggtaaggtaaagggccaggcatggtggggtaggagcattctgtcggcaatctttttgaccaagaagtcttatgtcctccaagtcgcacggcgttttaaccgaaagaacttcttgcgcaattcatgcctttctgtttttatgaccagaaattgtttcttgatttccatttcaaattgttctctggactttttatcaatatgaggtgatcgtaacacagtatataagactcgtgattcaggcaatccaatcttccgtgtgtaaggcggaagccccccaaaatggttttcaaaaaatgggtgatcaaaagatcgaatcactatgcgtatcttggtggtcgttacttttggtggtctttctttttggctgactcctcctactcctccttctcctttaggataggatcgtcgttggtccttttgacataacattctcggccgctcaagagtcaagagactgactatctctcgtttatttatacgaaattataagtataagtagcagagtgactactgatttctgctcgtagttcctctcttgttagtgtacttgtgatacatcgtgcaacagcgcttacagcagctcgtagctattatatgcatgggggtgacgagatattgattgcacgagctagccagcccttttcttgcttccatccgcctattaggttaggtgggccgaccttaggcttgacagctcgaagctttgtaatatagcatcagcgaagtatttgagtagcctcttggccgattacaacggcacgcttactgacagggattatagatcctagaaggcccccttgtagatcaatttttagccggggttggtccggccttcgcaggatcgtaaccatgtttacattttaatagtcggtctggtgatcgacaatctcttcaatgactgcggaagatggttcttgtgtgactggtctcagcacacccatttccccgaagcgatcaaatacttcttgggcaacttagaagtctacggtgtaaccgtaggttcaccttctgattcggggtttacgccgtagtggtaatgaatatacaccggcgccgcttgcgcggtcttgggaaatggttgcttgtcaatcaacatctgttttcccttttcgggaaacttcagcaagcctcctcttgtcctgtattgcgtggcagaaggctacgcagtcagctgtggcgtgactattactggcatgaaacttgcatacggggttctgtccctttagtgtgtctaactggacttgatgctctggggaccctactttttccaagcaatcatagatctcatcggcctttgagacatcgtacgtgaagtcacgtggccgattgccaaatttgcctgcagtcagcttcataccaggcttgttcagcatggcagcctgattgggtggggctttgcgtagagcaaggcaaagaactggcttagtgatcttgatccccgccaccattgcatcaagtccgaattgctctctgtaattaagtaccaatagataccgcgcttttcgatacagtagggtacactgaacacccacccaatcttgaaaatagagtgaaatcaatcaactggcatacctttgtttgggcatacctcgaatctagcctgcaatcctatctatcttttcttaggaaattgatagaaaaagagattcctgattcaatggaaagtggtacttttgattgaattcaaccaaaccaggaacttcttctctgacatccactattataataagataagtgacgaaaagctattattacatgccattcgagggaagtgaaatcgacactttcattttcccggtaattttgtttggcatagatcgcctacgagacatcgaaatgtgccatttgagcgttttatcgggattttaaaaagccttcatagacacacattcaaatcggacacgtttcataaacagcctctttttcgtcatcaacagtaaagtcagtagtaccatctctagttatttactactattgctcatgcccgctctcttcctttgatctcttttctacgcgaggatcccatttctcttatcttattaatatgaaaaatggatagttagccgggtgtatcttgttcaagaaaaagctctttcttttagtgaatatccggtgaataaaataaccgttgtaaaagtaacagctacagatgaatgcccagaatccgctgtgaggtttgaagacttgttcacgaatgccctgttatgttagaaggaatcattggacaaaagcgaagttgagccgccaatgggagcagaaaggaggttctagaactggattgtttagcaaataccatagcacaaagtactcggagcccagagaccaagactcaattcataaaagctcaaacttacccatccgaacaagacgcacatatccctttgggggtctgactagtgagccaggcaggaacaaagcgacgaaagtctacgcaattgtactaacgatagttcaacatctccaaacgggcaaacttatggattgtgagctttctcaccatttcgacatctctttaccatttcatcgtcgcaatcagacaaaaggagacccggtccaacgcataagactactacatggaccctatttcaatggtacaagaccttttcccgaacctcgtgcgattcaatctatctgctttagatcataaaaaagcgtatataactagttaataaaatgaaccagcactagtcatcccattcttttttggtttaaacccctaccctattgttgtttgttacaggtgtccttgagtggaattcagggaatctgaaagtagggacagtaaacgcctttctactagaaggaaggctggcgtccagaggcactactaggaatagggacaaggaatgactccacttttgaagattcttaccgccagggagggttctggatctaataagctggtctcctttgaaagcggggttgcctaagaaagcgccttttcctactactactagtagaatgccggttttcgtcacctttctaagagttgatgagggttccaaacctctaggcaggtcgaagagaaggttgttatcacagtcctaccgccgaatacaacaattagactgctctgttaggaagtgctttcccctagacattcccgggtcggtcctttcgcctggccaccacccacaggggacaaggccttcttctccagtcgcggattctccacttcttcggattcggatgtagatgtgtctgctgaaagcctaggtttactattatatatacccaaaggaacaaaatttcatctggaatgggttattgaggctcgagagacctcgcagggtatgatgaaaagctctcaccaggattgtgtttccaggtcgattgaatcaacatttccctctttgtgatagctgagaagcaagcgttctaaatacttttcgacaaggggggcaaaggattgaattgaatacctagggagagtgaagtaccattccatagcttgatcagtaaggctccttgggaatagtctgatcataagactatcatcatgagccacttcagcacattaggcggatgggcataaaaggatttcacgtgcgtaagaggatcccccttttcgctatgtaggttcaactactttttgatgtgggccccatcattccttccaaatctaaggatcatagggttgaggacctcttcatacgaatttttctatttcctcttaatgtttcgagccactgtctcttcaagcctttttagctgttcctggacttttgctaggtttacctagtggattttgaaagaaaggttgttggcaaaagcctgggttaggtgtgaaaggtattcggttgccaccagctcttaagcacacccattggcattgactgcatgggatcgaaagacttccggtttcgtgaacgtgtccataactttctcatggatctgatttggattcatacacgggaagcccagagacctcatttggcattgtgcggcttccttaattgcactagcgcactcaggtgagcaacaagccgttggttgaaccaataggggctctggcagaagataccaccagacacccaatcccagcagaagacatgttagtaggacgaatcggctctttgacgtaggcgaaggccattgcctctgataagccgaatgtccttgtacgactaatttgtcttgtggcgcccgctaatccaataacgcgatccggggatctaagtagggtggctttgttgcctctattttgatctattgtcgaagcaaaaagaaagggcaactgttctcgaatcagcaatgccacatctgactcaatcaaaaagcattttaaaaacctcccttcccccttttgaaaaggaaagcaggaaaggcaagctattttaacaacggggttttcttttttataatacgatatgaccttccaaaattcaactgatgaaaccattcttcagccataccagactaattccgtctacgtctaatgagcctagcctaacggttctagggcgaattccgtctattgctccttaccctataggttatagagactcttcccagtgccaagaactaggatcagaaggaaagtctcaaccctttggtacgaaagtaggctatgattcccagagagaaagaaatggtttcatataaaggcttggcacctagttatctttatttaagtcggccttactcgggctaagttcaagcaaagatcagtcctttaagctaaaagcttaagtgatcaactagaagataccaccttccccaatgaaacttctttccccggagcagcaactgaaagagaaaagaccgggtatgcctgaaaacctgaaacggattcgtgaacaacagataagagatataccccagataccatttgaaccagagctgaaccatttaattacccgagagtgatttcactccagaagacctcgagtcactggctgcctttagaacagactaagaatcaggtacggaaggaagtgaaggtgaagcaggcttgctttaagggctaggctttctctcttctttggcttgacaatatgacagagaagggccctttttcctgggctttcttctttaataaagccttgagccgggcaactccactcaatcaacatggaaattttatttatatataaggctatccgatagtctagtataaagccaactaactagggtaagaataatctaccagcttagacagaagaaaatggaaagtgttctagcaactactttcttcgaagtagtgatcttgtggcgactggttaaatgaagagattaagtcagtgttcattgttctatttgtgtctaatgttcggcttagctgaacaagcttagtcgagattgagttggtgttgagtctaccgcaccgaaggtttacgtcaagttgagcttcaagcgaactattggagtagataagtttcctttcgggcctattatcttgaaggtttgagttcggcagcttgttgtttagttccattagcctaacagctacctttatcagagataaccaagtcgtattcaaattaaaaagccttcatgaagtcaggcagctgaagcggaccaagggctttcaattgaggatcgtcaccagcccacctagttttccttctttctgcatctttcttttggcggtccgagggcaggaatcgttcaatgctctctagccggtagtagggaaacttcttgatgtagttgcttttgaatcgagattggcattgcctgggtcttctttgactcgaacccgaggctggatgtaattcagctgttcactcgtcttttttttcagtctcgttcggttgttgattagttcatcggtagttggttagatagtcgtggtttttttattaacttggagtggtcacttcagttctattttggagccttctcaaagtgtggctctcgttctctctgctctgatcgaaagagtaattccaatggcttgttgatctatgtttctttcgttcagagttccgtagttcatatagccccttcgggcaatgttataacatttgaattactccaaaagaaaaaatcaataaatatgttggaaacagtcgcgtactgggtagactttttgtcaaagaatgataaagtttattatttaacaatgactgtactttgtatccaaggtctcttcctcatctatctctttctagccttgtttatccggatagaaaggaactcgaaaggattgctatatctaggggggttgatcttctattcaaatattcttggagaggcgttgagcttgagatcaggcaccctactgaccgttctaaaataactccgactcagggaaagcagcccccgtccccgcccgtaggagattgagcaggtaaagtgaacctgtaccccggaggtactcaagatattgtgtctggagaggtggatagataggaaggtgaaaagacaggatgtatcccgacgaaatgctattgattttaggaggactataatgaggaggacgacagacccactcacgatctactaaagggcaagtagcttgattggttcgaatccaattcgtgagcagatgagaaattgttgcaccgtggactctgattcagtagcggcagcaaatccttctctattctacgatctgatcttgtctgttgaaaatcgtccgatcaacaatcggagttctcccttacaactccttctgggtgtctactagtgtcctaggcaccttaatagcttattcaaacaaaagaaattaattgatagaggaagatgaatgtgcaattccatttcaatttaatggttgtactgctactgcttcctttagcagctccagtatcggcatcggcaacattcacagttgagctgattctatcactctcacttgcagcctagtctgtaacaagaaccatggcattcgatgcttcctgtactgctcctgtctagcaaagagccaaagatcgtagcgtgtctactattgctagtgatttaaccccctcctcatataaagtaagaagtgccacagcttcctttcctaattccaatcgtgacattggtaatcccgcatctgagatgagtaagactaggaatttgaactaagccgaatctctttcaagcgcactaattctatcctatctattcaaggggctattgcgcttagggaaggaagacgatgaaggggcttttaagcgtctttcttcactatctggctatcgagaataaaaagaatatgaggtgaggatggtcgtagatcaggcaccttctaaaggaactattacataagaaagacattgaatcgcaaaaagtcttctgataaggattttctgctttcttactctgtagcttagaaagagttcaattccttttgctaacttcccacctccgacggaatcgtaccgctatcccaataggaaagactagttaccgctccgtgcgtgggaagataagagactttgctgcactcattcactccggaagttactacttgtccattcctctaactagtctgctctcatccagcaagctcgctaagacaagaagcactcggcttactcaccgaggggcggcgagaaccttttatcatattatcatatgaaatgtgaaatgaaacttagctggctgagggctgtctattaaggaaagaaaccaattagtacctacagcccacagtaagaggagttgatgtttcggaaaagtccagttcaagcaaagggaggacagagagaactccatagatccctccatggtcaacgggcaacgggctttgacttcgttgagcttcaaagcattcccgctccctttgcaatcaaaccccggaactacggctcaaaggatcgtgcagtggatgtgtcgggttcgaaagtctatcctcctcctcctcctgccgttggaatggtgtgttcgtctctgcctgttcaaagagcgacaatcaatggtcttaaaggagcacctatctgcctgactggaaatccaagctccctccgatgaatgattgtttgttcttgcttgattaccggaggaccgacgcaggaaggcgttgtcactgcgacttggtgcctactatgctcttcacggaaaggagtgaaacgagcaaggagagagtcaaccttaatgtcagtgataatagtaaaggaagagacagaatctcatctgcttggctggtcgacacaagcaatgcccaaagagcattcttttctattttcatgcttcataatgtatccgctggattgaaacagtctcttttgtgcctgacctaatcctctagctctttacttgccaggagaaggctcgagagaccaacaactgaaactagctcgtcaagtataggataggtctacaagcggttgggaaaagaccacttgatgcaagtatcgaaatcgaactaggaaatcatttagtactttggagaataaagcatcttatggtaaaaaagcttttgtccggaggccttcttatataaggcaaagcatgaatcaattatgtcagccctccttggccttcacttacaggatttcctcttcattaccatgctaaagtaccgagaaagactttccactcacttcctttcatttgtgatttcctttaccgacacatgctcaatattgggtagcgcttcttatctggaaatccattcacacttcaagcttaaactaataaagaaatggcacagctgagtgctagaatcttagtcgatggaagttagattcactaattcactaaatattcgttcaattgaaatcataactgtcaaactctttgttctcataacaaagagctagtataggggctagtaactttcactagatatggtcttgctctcagcccttttcctagagatctgggatggagtgtcgaactcagatacatataaagaggggattgattcaaagtgtctaggtaccaagagtcaatgaagagaggggcttgagggcccagcagacatcagtccttaaaccggaaagatccgatctacgaattaagatgctaatagcagctatatacccaacccttaggagatccaattctgggcatactcctattagactaggctagtctatgtaatcctcagggctttctaataagaaaagggcttacctgatagtggtgcttttggcaataagcgctcttagcctatccgtagctattgaatcaagatgggccccttaaatcatacaaaagaaagagtttatcttgaagttgttcggtcatcgaattttaactggtatggaactgcttattcaaaaagccttattttaggcccttctatggctcatgtatgaacagcaaaactcatgcggattgccctggatgatctatgggtgggggtatcaaactcgtgagagaagggcacctttcctttcgctgaacggaatcaatagaatttcttgttgacctgacaccacttcttaagagggattgcaaagccaataaaggtataaactcccagggtaagacttctcactagttgacccttccttatcttttttcaatgcttttgggatggggcacaagaagaaagagctccatggatcctttctaggtcaacgggctttgactttgttgagcttcaagaccttcctgccagtgtcttctcgctaatcagcaaacatccttatattatttataggtagggtcagccttcccttccacaaaatcgtccttggtcacataacattctcggccacatctggcccgataggaaagaaaacagtagccagcgactcgcttcgctctagctatagagcgatgcgtacaccgccacgtcgagactctaacgattaggctctattctatatacgtcaacgtcgaaagtaggcaggatccaagcaacactaagaaagcagccgccaatgaccgaagatcaaagcgtcagaagagaaaggaaggtgtgattctaagataagaggttgtgcaatacagattgtttgggtgagcactgacctaagccaatttgatgggaaagttggtgtacaatgaggcaaactcacagacagctcctaggccaggaaaaaggctagaggctaactcaagttgttaagatagcgtagcagagaccaattcgcctaactggaaccaatccgtccagggttcagttctaggctagctaaggcaactaaagcaaagatcccttgtccacttatcaggcaaagcgagcattcaccatcaagattcataacaatgagtgaagcaaactgctgaacaaagtcgaggggaacgaaagcagaagcatgttggacagctaactgcccctagctcactgggggcgctccgggatgggcttttttagggagtggtcggagcctcggcaagacgtcttccgatcgaaacgtagcagtctgaatgtgtagggtgtgtacctaccaggggaatcctggcactcactttcgttcaccaaaaacaaaactcaaagcggcagttgaaagaaagggagccctcctggtcaaaaaagggaaaaagaggcccacatcccagtctcatccgatgctacttcgaatccgggtcgagcttacgtgaacccaatcgccgagggaaggtcggcagaggcttaacttccgagacttggctaaggccttcaacccggataagggcatgtttaaagcacagtttcgcccagaagctcataggtcaggtccaaccccctttcttacttacgcaaaatgcctcttctttagaattagaagaagagatccgcatgcctattcggtagctaagcagcttggtaccacttcgaggattcctcccatccggcttaccaaagatgagatcgtcttccctggtcgcacccgaatgcccgattgaggttgctttcattctattctaacttcttgggatcaagacagagatcggcctcacatttaccttagagcagattcagtcccattccattgcttgggcggcagcaggggagagtgaaaaagaaagaaatagaagggaaggtagttaggagtcggaagggaacaaccggcacattggaggattggactttggccttataatatagctttccaagcccatctatttttactttctcgtagcctgtctccaattcaccacaaccacagactgcctctccattcccgctactaacactaagtgaagtaatagtctgacgagtccttcactctagatttatggtaaaaaagaccccgtggctcttctagcgaggagaaagcaactagacctccacgggtcactggattagagggagaagcggtccgggctagagccatcagtacgtaggatctgcggccaaggtttaagctctcccgcagggaaggaaagaggcaataaagcgacggggccctaacttaagttaagcagtggaatcccgcgctactagcgacaaagagtttagcactttcttgtggaggcggagactcaaacgtggaatcggtagtgaagccaggaactttcgtcgagtgctactctagaaccgattcatagagaacctcggaatacacacctggaactaaactaaggcacatccgaatccggttccaagtgaccagtttatcgactcagcattttctacgggatatttatttattatagatagggttccccaatggcagaggtgccctccggtctcggtgagttcacgaatcagatggagagccacccatcctaggtatgagtcacgtcgacgctgcggagcatctgcttaggacagagtggggattttataatgtccaaagatcccctttcttgagatactactcctacttataaggtaaggatagatagttagctcttgcgtttagagaaagattagaatacatggtgatcccaagtctctctaggggaagtaagaaatacatctattatcccgaaggcaaaagcaaatagcaggaaaaaagactacgtaggcaaaggcaaagatcgaagtgaaggggagattacatctagctcgccctaatcaataagcgggagaggaaagtttggaatagataggaatgactcaccctacccttccttcggagcctataacaagttagttaccgggtcataagcatcgataggtttggttttctatagattaagtgccccttttatttggaagcctctttccccgactaggaaagttctctttctggcaacaggatccactcgaatcagtcctccagtatctccggtttcgggataagataggcttctttacccatccgaggagtttacttcttgaccgataggggaacggcagcatattcgaccattgatcggagaataggcactgatcggagccagttcacaacctgggatagctaacgctaccttgcctgaagacatgggattgccgtagaagtcacatgccaagcaagaacttgctcctttcacttccctagctgtagatcgagcagggcgtacgaacgaactagcgtatgcgagctagcgattcccaagtggtcgttaatagataggggttgctttagttctcccgggaaagatgccaataccgaagacatcgcatgctagaaagaatgtgctttctgcgcgtcattacggttacctgttcactagtaatctggtcgaaaaagatccaacgtcggtaacaatcccgatcaattagaggaacggagaactcatctcccacaataagcaactatataactctaaggatcgtgtcatactgcctttcgctgtgcaacttccaccagcagcagtatgaccttctgaatgctgctaggttcgggccccattcgattccttttctaaaggaacttttatataaaaggaagccgaacccaccttcgatgatcttagacttcacgttctcttaaaattccaaatatcaataaagccgactgtcattttgaaagctgagtcttcgagaggtctaccgtctaccgcattcacagaccctcctcctatctacctcctatgggtccgcggattgctgcctggggcgaggcgtgcctaccacttactgtctgacggacaaaggggcctactccaagacccgggcaacacaatgtttcctccactccgaaggtcacacttgccctccgaaagccattcgtgaggggccgcccactatactctcgcttcgagcctttattcgcaggaggatggcttgagaccaagatcccacccgatatcacgtaaccaaaaaccaactgccggtctgagcccgccagaaacccaattcgattccattgcttgatgtccgagatttgggcacttgccttattcccccagaagagttatccgttccggattgctcattcattccgtaataatcaatcttccgggatcgtcgaaagaagaattattccttccctgcgatgtggtggtaatatcccaagtccggggatagctgacgcaggaacggattcatgctgtggcactttcttagttgttctttgacagaatgccccatttcgggacctagtcagctgcacattcatctctagaataagaagggctttcggaagagaagacggcctttgattaggacttttccgcatttcatctcaaagaggatctaagctaactaagctaaacagtgcttttctcttcctaaacccaaagagtaagagtaaagcatttcaatttcagggcttagcttaggccccttcctaatctaatgccatgcccaaccaatgccgaatccaagacctggttcacgcttgaaagccagagctagtcttcttcccactgaccgctactaataagataagacgaaccactaccagtagtccttcttccaacagatgggggttcaatagctgctgattctgtaagagcttcttcaactcaacctcccccagggaaggttgtaaggtagcaggaatagatctactaggccttgagtcgggcttgaactcctctcccctcactactctctttggttctgccttgttgaggcctgtagagggttccaaacctgctaacccttctcgccaaggaaagaagtccaatagcagctgatcttagctttgagcacttattccttttgttcccagctacctctgagagtggtcacgagcttattggaatcagttgtgtccgaaatggtttgaataaaaaagagtgcttcgaaaggtgtcagcaggtgtgcggagccggagcccagcttgttctttcctatggcccttcgcttcctcttcctagagagaatggagcgaggaggtccttagggaagcccagcgtaacggcttaagtgattgtgcatggctgcttcactctgaaggagttgctgcaagtgttttcttcttgccagctgctagcgattgagttcctcaacggctagctccgctatgcctactctctgccgatgaagacattggagacatatcacactttatatgatttaaaggcatgatctcaaagtctgtctactcgctctcaggattggcctcgaaagatcgactttctaccgtgatccagtcccaggaggaggaggtggcgaaggtcgaacaacgactattcctgcgaattctggttttttagcggaggctagccagaaagtttccgaggccaggggcgaagcgagcagggcttctcgtcagacggcgattgatgatcttcacgtcgctagagctgaacggatgagtctgaataccgaggctaacgctgcggcatccaagagagctgatcttgagaaggctcggtaggcttagagggaataggggcggcttaagtaagaatcgatttgctagctttagcggttgagtctctccccgaagggtctagctccgccttcggctctagcgagtatccgtatcgatgagttatagctcttatcttaatttaatatatgcctttatgcgatcagagtgtaaagctttcaggcagcaaggctgatcacattattcatatataccatatatataagctttatctttaagggcttgctaccgcctattagaggttgggggcagcaaacgaaggagcaagtggaggcgaccgatacgggaacgcgatagaacactaaagggtacgcgatctagctacgtgatgcttgagtgacgggatgaaacgtgtagttacgtcaggtcgagccgagcttgcgaggatacgaccgatagggagaggagcgttaacgaccttacggttgtttagcgcactccgcttattgatgtagttacgtcaggtgaatctctcttctctcccttgccacgatttacttgaatcaggtttttcttcttccttttccctctcttccatacattactcatggctgattcttcttcactctcttcaacatcttattcttctttctctattcaaaatatctctaccttagtctcgatcaaactcactgaaaccaattatcttctatggaaaagtcaaattcagccattccttataggccaaaatctttggcctttcgttgatggatcgtttccttgccctcctcaatttatcccttcttatgatggcaaaacaatgaatctcaacccatcaactacttcatgggttcaaactgatcaaactcttgtcagtctaatcaatgcgactctcaccgaatctgttcttgctcaagtcgttggtcttcaaacaaacctctcgtgacgtttggtcttgtcttcaacaaaatttctctcaacaatcgcttgctaatgctacgcttccaacttatctccggaaatccatctatttctcaatctcttcaacatgccaaaaatcttgcagattcgttggctgctatcaacgaaccagtctcaaatgttgaccttgttacctccgttcttcgtggtcttggtccagattatgctatgctagtcactgctatctttaatatccctcccttaccttcttttcccgatcttcgtgctcgattgctttcttttgagtcccaactcacaacattccttcttccaattcttcccaccctactgcctttgtaactacccgtggtcgtggtaggggtcgcggggactccttccgtggtggtcgtgctattcgtggtgactttggacgaggaggtcgtggatctttcttctcgaattcaggacttctaggccctaccccgtcatccgactttgatggacgacgtgttcaatgccaagccaaatttggggaaagtttggccattctgctgtctcttgtcgttttcgttacgggtccccgttgacgatgatctctccaacagtttcgctggcatgcggattactcactcctatgatcccaactggtatccggacactggtgcgacatatgactggtgatgctcgttctatgactcagaaatctgaatatgttggcaatgatcaagttatggttggtaacggtgattcccctcccattgctaatatttgtacggtttctccttcggaccctcgggttcttctacatttcctctttcgagagtgttacatgttcctaccatgcatccaaatttgctctcagttgctaaatttacgaaagatcattttgtaagtttcacaccttggggatttttggttaaggatctgcgaaccgggaaaatctggcttcaaggccaatgtgaaggagatctctatcctatcaagccgaatacagcaactatccagccgaagacaggacccttctctgccctctccgcctcttctgtttcaggcgatctctggcatcacagacttggacatccttcttttttttttttttacgtttattaatttccaataagtttctagaccttcctgctagaatttcttctactagtttttgcaaagattgtgctatgggaaaatctacccaacagcccttttcttttgttgacagacgggctcatgtccctttttatttagtgcattctgatgtatggatgtatcctatttcttctctttcgagttttcgctattatgttatgtttacggatgattgtacccgatattcatggatttatgcgacataaaaattcagtcttttcttgtttcactcggtttatggcttttgtggaaaatccatttggtatgacactcaagatctttcagagtgatggtggtcgggaatctgataactctagttttcgcagtctttgtgatgaaaaagggattcaccctcgtttttcttgtccaaagacaccacagcagaatggtttggttgaacgtaaacaccgccatatttctgagatgggccgtacgttaatgattgcatcctctgtacctcttgatttttgggcggaagctatttgcacttctgtgtttttgataaaccggttgcctacgcctactatgggatggcgttctccttttgaagtgaagctctttttggtcgtctaccagattacaaggccctacgaccattcgggtgtgcgtgctatccccacttagcaccctataccgctcacaagctggaacctcgttctcgccaatgtgtatttttgggttatagccccaaccataaagggtctcgctgtttcgatccctcttcaggccgtgttttcatatccaggcatgtgatctttgatgaattatcatttccgtttgctactatccagtctccaggttctactaatggcacttcttatgatgatatggttttcatccctgtggtgcgtactgaggtctgcaagcctgtgactcctccgccggcagctcctactatggcagtttcatcaccacttccttctagtttccctgctccagttgatattactcatgccactaatgcaacgacttcggctgcttctagcattgccggtgattcgattactattcctgctattgctgttgaaacagcccctgacggaacggaattccataaatcttttaatccttctttgaatcccagttgtcttagtatccgtcgtcgtctggggtttgtaacatgaccaaagtataaacaagtcttgttcttgtaattccccccgggttaaggaaaactttttctctgtttaaggaccttctccctcttagtcatgtgctcgtgtgttcttgtaatgctaacgaggtactcgcttttctacagaattcgtacattcaaaagtacaagttgtatcttcaactacataagaagataaagcccaaggggaaaggcgaaaccgaaaacctcctcaacttaagaagtctcaatacgcgcttaaagcatttctataattgcgtaagaaaggaattcattgacttcgaacaacaaaaaggaggtcggccttctcttctcttactttttttttggaaaggaatgcttgctataaaggaggcggaattacagttcagttcaagtataatgcaggctttctctctgatagaaaattcacacaattttcgtatagaaacaacagcagcagtacggcttttagagggccctctcctctcttctattacttgtttgagttcccctgtctcccatcctcttttcaagtcccactcttttcccggttaacaacggcggaccctctttgttatgttaaatagagtcccatctaagggaacagaacaatttagtatcaaaaagtcacatggcaacctatgcccgaatcacacattctttttttttttagtttttttcttttatagtcttttctttattggcttcatcccgtccgtcccattacatctagtgcgtgtcatactttggggggtatacgcccttaaaaatggctcttcaacaactctcatctttggatgtaggttgtttaggggatctggcgtggatagttggttatattctttccatttttttcatcgaaaccgaagccacggcaatgatgtttatgggctctgagatttccagttccagcattgaggtaatgcctaatggcatcgggagcgagttggaggggcggcccgagatcttgagaatggcttatcaacctcagcaaccagccctgccactcaatcctcatgctctgccagccattcctcatgcggaacaacaagcagaaatttatcatccagcaccagcggcggggcaattgcccatcgagggtctactagaatcccaatgggttactgatcgcgaaaacaaagtagccgatctcatctgcgaattgcggaaagaagatggattgcgacttcctgctgcacaccgcttgcaggaaattttagagctcttggagcacaaatatgatgtggaaaacctccccgctattctagcggatttgtaagctaatgggcgctctagcccattttacaaggactcccttactttttataatgacctgaagggggtctcagagactacgctgaaacactattcaaataatagagttccataatcccccttttttttcattcttttcttatgaggtcgtgtacaaaaaccttaaccgcacaagcctgggttgggcctacctccatccctagaggagccgtatgaggcggaagctccacgtacggttttgaagccgagcctttccagcaatggggcctagggaccgatatgatgattggtttaggtagggcggccggcctactacgggcacctgtagggattagtgcgtgagaccgcgatccacaaactgacgcatgggactcaccctttacttgggaatgaagaggggaaagatagcatgtcacaagagcgaggcgaggtttggaaccctactgcgagagggacgcctcgcgagccgggcttctagagatgaggccttttggcaaagccaagtcaatttcgggccgccaaaccctgcaactgatgagaaggccctatggagtaaagggaagcgtgtacgttgtcacactccctgccttccaaaggtgcctaaaggacgggccagacgcagcagagcgacgacccgggagcggattcccccccggcagggggacaggagacggccatctcgaggcacatcacgacctacaggcaacaccggcgagacctgggaaggcaacccgattgggagtcagaggatccatagtacctgcagccccacggacttcatattcatcattcattttttaaagcggggggaagggatctcttttctgcaacggaaaaaaacggagcagatttgactcggcacaacctaacgattcatccaataccaatgatctgtgcctagaatgcgtttctagatctctgctctagaaagctatacaggcaacaacaaacgcggtttgacccggggcttccctttcattacttctttcacgacgagggaaccgcgtccgcatcagtcgaagtggtggaacgccctcctgagtcaaagagagagcttccgcacctctctccaagagatacgattcggtatctgaatcggctgaaggagagtgaagaggcggctactctcccagcccacggggaagcctcttctttctggtttacatcaagtgcattgaattccccacaatcagaataaaagaggatgggtcaaggagaggttcgggacgaaaccagagtggatctgcggcaaagcagagcctccggaggtatggcggcttgtgctgtgccgtcatttcggattcccgacctatttcggcactagttaaatggggttaatcacccggatcttgaatcaactagtagatcatcaacacaggggcccaattcattctccagatgagttgggagctgggggagcccgcgcgtgacccataccaatcctacactcctttcttctattgtttctttgtcacttcttggaaatcacgaagaggattcccggactggactgagcgggaggggagctgctgtcggtattggaaacgtcttcagttctttgatccattccgtggcgcgaaatccatcattggctaaacaattatttggttatgccatttttggctttgctctaaccgaagctattgcaatcctttgcccccttcttcgcaagtaagcaactggcctttttgatctcatccgtattccgatcgaaggttgaagtttcattcttacaactatctttttgaagcagatagttcacagtgctcattctatagatactgtaaaagccaactcatgtttccactctattttcattacgaagatgtatcacgtcaggatccgttgctcaaaccgaatcacgccaacgttatggaagttcctggatcgtgtgaaataagagtagtaccaaaggcaccctatgatttcataatcaaaaatggaaaattggctatggagattccgcgcggtcagaaattcatacagacagaaaggggttcgacaggaaagtcgtttcgatccaatccattcttggggtcaaataaagacaaaggatatgtcagtgacctagcacgacaaagcactctccgagggcatggaatgtctaatttttcggtcagaatctcgacagtaatgtctctgttagattctccggtcgaaatacgggaaaactccattcaattctcgatggaaacggagttttgcgaattctccccggaactggaagatcatttcgagattttcgaacatattcgagggttcaatgtgactattgtaacttcggccaacacacaagatgagactttaccaccgtggagcggctttttgcaaaaagatgagggggaaactcagtaagatgtcggagaaacgaaatatacgagatcacaaacgtagattgctcgcggctaaatatgaattgagacgaaagaaagctttataaagccttttgtaaagatcccgatcttcctagtgatatgcgggacaaacatcgttataagttgtccaagttgccaagaaatagttcctttgcacgagtaagaaaccgacgtattttcacggggcgccctcgttccgtatatgagttctttctaatttctcgtatcgtttttcgtggattagcatctcgaggtcctttgatgggcataaagaaatcgtcttggtagcaaccaccaaaccaatagaacaagggctgcagcaggcccacaagcaaggtaagtaggtccattaccggccgggccggctccggaccgaaaagacctaacggagtaattaatccctgatctcggatcggagatgctaacggggcgggaatcgaagtgggagacctctctaccgcctgtgtctatctcctgtcaagtatgctccccagacatagactacgtccagggtagtactcttggaaagatagaatatcaccgcgtgaacataacattaagttacgaatgtaactcccgaagtaaggcggagaactgttgttcattagagcgccggagtgcggaggttgttcccatcattgaagtcagagtgtgggactgagccttccgaatgataaagacaaaaaagtgcttagtttcgttggaaaaaccaacgctcatattgactttctctcgccctacttctaaggatagatagaaaaggttggagagactttctgaaattctctcctttctaaagctgcgcaaggcggccccccccagaacaaagccccacccctcttttcccccctttaatgaaagaccctcgccccgcttcctattcatttgtgggtcgggacccgagggccttttttttctcaagaggttatttcgagaatcaaccaaccgacaaatcggtttcccaggtgactcacagcctccctctcgcccaaatgaaggatgaattaaatcaataagctttttgattgattcagggcgcagcgaagcaaaattcaatcaaggcaaggtagtttacttgcttacttgttagaggaaggtcttgaagagcctgacgctgagtcatcctattcaaatttagttatgctaatggaacaggaaaagttttcagatgatatggacccccaagagatgagcgagaacctccaattgcttaggggtcacactctgtcccgcttggtggacgaaatcttctccccttttagaattctttctcccacacacctttgccctctttcaccgaagaggaaagaagaatcttccaaatatataaatataaaatattatatatatataataatttatataatagtaagtagggccccagaacgctaaaaaggtgggggaacaagagttgtcacgataggaaagagaaaaatgactctaaggaaccaacgattctctcttcttaaacaacctatatcctccacacttaatcagcatttgatagattatccaaccccgagcaatcttagttattggtgggggttcggtcccttagctggtatttgtttagtcattcagatagtgactggcgtttttttagctatgcatcacacacctcatgtggatctagctttcaacagcgtagaacacgttatgagagatgttgaagggggctggttgctccgttatatgcatgctaatggggcaagtatgtttctcattgtggttcaccttcatatttttcgtggtctatatcatgcgagttatagcagtcctagggaatttgttcggtgtctcggagttgtaatcttcctattaatgattgtgacagcttttacaggatacgtactaccttggggtcagatgagcttttggggagctacagtaattacaagcttagctagcgccatacctgtagtaggagataccatagtgacttggctttggggtggtttctccgtggacaatgccaccttaaatcgtttttttagtcttcatcatttactcccctttattttagtaggcgccagtcttcttcatctggccgcattgcatcaatatggatcaaataatccattgggtgtacattcagagatggataaaatcgctttttacccttatttttatgtaaaggatctagtaggttgggtagcttttgctatcttttcttccatttggattttttatgctcctaatgttttggggcatcccgacaattatatacctgctaatccgatgtccaccccgcctcatattgtgccggaatggtatttcctaccgatccatgccattcttcgtagtatacctgacaaagcgggaggtgtagccgcaatagcaccagtttttatatgtctgttggctttacctttttttaaaaatatgtatgtgcgtagttcaagttttcgccctattcacaaaggaatattttggttgcttttggcggattgcttactactaggttggatcggatgtcaacctgtggaggctccatttgttactattggacaaatttctccttttgttttcttcttgttctttgccataacgcccattccgggacaagttggaagaggaattcctaattcttacaaagaaccgactcctaataataataaacactgattcttttttttttatgtccatccctttgatttgacaggcaaaacctgtccatctataactataacgtttttgttttggaattcttctcctattagccccagaacgctaaaaaggtgggggaacaagaattgtcacgataggaacgagaaaaatgactctaaggaaccaacgattctcccttcttaaacaacctattccccttttgacgactttctgttttgtgctttttctaggaccagaaatcactgctctaataacactccgccgtccactttttttatcctcttagtcctttgtctcatagttttgtttcatattttctctggtcaaaataaaaaaagcttacgcccttttcttaaacttctatatatccgcatctgctttctttttgcgctagatccatatttattgcgagttcatattgattctttattttctttttatgggatcactttattatgaatttgttggaagattctctctttctaggaccgctagagagctccgccaattccggcgttggtggcttcgagagcgggcttgaagggccgcccgaagtcttgcgcatggagccgccagagcaaaatgagctctatgcagccgttcagccttatctccccaaagacacctcaggtcccacggaggtctgtaagtctccaagtgatttcgtgcttatgttagagaagaagctaacctccttctgtaagaggaaaactattctcaccaaatttggtaacacggatttacccaatgcggacataccgcctttggcaaaagagttcgctaaggagcactggccagcttgtaaattcaacaaggagcatatgaaattttacaataatatagaaaacatccagagttatatagaagatttcttagaaagaaaatttcccaagaaatgaaacataatttttttactattactttagatcggttcaggtgtactttcttccaattgaaaaaaaaaaccggaagcaaagggggagtttagtctgactgcgcaatcaaactttagagtgggaggtgggggcactagggagggcttgcgacttgaaacacagagcgcccccccggatgtactcacgtagggcagtgaggaaccgggtaaccaaatcacgatcgttatggtatgaagtaggagataattcctccggaagtgctggttcgaatccagctcgtgacaaagccttggtcatatagatttctcggcacctccattttctcgttagatggatgactcccccatttcattgctggtaaatacggagtaggatccactctggcactgaacttgtttgtctatttatctataccagctcttgtgctggttgttcaatactcccagcaatcaatctcgttcaatccaccaatcaacggaacgtagcgcggcagctctgccatctgaagcgaaggataagaaatcggccgaatgattgatataatatattagtttattccactgcaagtcctctatcgaaacagaacaagtctaatactccagccccggtcggtgccacaggtctgcaagcctaacacaaaagtttttctcatctttggttttccacttcccttgagtttggcagatgataagcgccgaatcccccacttcgatttattctattcccagggtcaaggcagcctctattccatggatacatgcttcatattctgtggtattgttagttccttcaaagttgaatggcaatgggggtgtgcgattcatcaggtgaaatcagcaatgcccctactccgtaccctttttgattagccgcgccatcaaagtaagtacaatttccatgccctcctcttctgtgacagctatttcctcgtctgggaagcaatccttaaactcatcctcctcccaataccaactctgcgaaccatgcagtgaaagatgtaactagtggacccgtcagaaacggaactattggaagctttgggggcttccatagaacaacttctttttctaaaggaagggcaagagcgtgactctgattttggatgcgctgagttatctaagcaattcttgatattgttattctaaattcttttttttctttcttttcgaccttgtacccgggtacaaggaacactaacagaatctctgttcaaacaaaaacgacaagcaaacccgaaaactaaagggtcaccttctctagcaagcaagtagacttttctctgagccccagggtagcaaagctagctcttcgtatcattggcattgggcaggtgaacttggctacacaacaactcttactctagcagaggatctagttccacaccaatccgcttttcttatataagataatatatatacttagcgtacctacaattgcttgcttgatttccctcttgctttaagataattatctcctagtttcacctgcccttgtcatccatttctccccccgcatccggttctacctgtcatatgattgctggccccgtatcacgcaggagcgctctactaggtttcaccccgttcctcgcattcccaccggtcccgacaagatcgagaaggtgagctcttcgcccaacccaatacttatcttccctcttttatcggggacaattaaggttggtggtttatgtaaattccttccattacttccctttgaagatacgatttcatggttcgggataagttcagtcgataaaccgatcgacccgccagttaatacgtgtataatatggattgggatccctctcttcaattccgttcaaaggcggtagggtgaattgacgaacagagggtggaacttggacattgacttcattgtcagctcaacacccggcacacaaagatttctctgcctcccttagctgcctagctagcttctttcaatcgcgtagctaccagtcctagcaaagacaagacagtgggtccaaccatgcccatctctttctcttttgctttcggtattaagggaattatttaccagcttgcttgagtgaatgaagagtattgatttctttgtgtctttcttagtgtcctaaatccaattcaccttctcctcctcttatccgtacttgtttcttatgcccacccgtcgacgatcatgagagcttgaagccattctatctccgaccgcttacttttcattcgtacccacctcctcgagccgcccagtaaatgcatttctcctccaatcgttgagcggagacggacgaaagcattggatgatcggccggggggcaaagggcagctcatttgttcctatccccatccttttaagggataagcagcaacctacgcagtgcactgctaatcagtcatagcttgtgttcggagctatctgctgtccatcgttccgagctaagcaaagcagctaagcgatcaatctccctcactcagccctacctaccaaatccgtcgaggttgccatgcattgctatgcatcgttgggaaggagaagaacgaagcgagcgaagctgttctgcatcctccgagcaatcaaacaatcagttcaatcctgccttcgcccttttgttagcagctcggtctcagaggctaatccaaaaggtcactttcatggggtcaaagggatcgttttttgagcttgattttgaagcgtagttttccactctattttcaactatatatagttgagctggaataaaaacctcggttaggctactacgtttttttctttttagttcttccaccgcccggtccagctgtctgaggtcgatggtgcatccggtaagctctttcggtattcatctccagagcccggtcagatgcttcaatccttcattcatattccgtcttactatattgcgagtttacagctcgaatcttttactagtcttcccctcacatgcgataaatgggcggtctcccctagaccttattccgtccaagctaagctctcatagcattcgtctttcttccttctctgctgcacgtctgtactctttccctcgctttatagagatcttggctttctggttttttgtttggtcagggggtgctgtggagaaatcgtttaggaaactaataagcggaaatcaatacacatgaaaggagttgtacacgactttggtaaaacattcacctgtcggttgtacatcgacctgtcgggaaactagaaactctcccccaatccggggctcaatgtagttgaaatctctatcgggcgaggtctctcgagcctcgtgttgatcgggaacctatcttgcaccttcggaatagactggacgcggtagatcctccgaacctcccttttatcgcagcccaacacgactttgacttcattgtttgtttgaactccttgcgtacctgttcagccgtgaaccacttggcttctgtggcgagaacatttcccaccccactctgtagagagagctttttccctcttcttcgggctctctttagtttggccggtcttcggttaacaccggctgtcgatcaggaatgaggtcgtcgatctccaactcaacctcaggttcagtcgcctcatccaagatggagggctctttcaatctcagctgatcaacattgaagacggggtggcgggcagttctagtttgaacgcattctccctgaccttctcttgcagagtgaatggtcccgcaatggtttaagcttgcggttgccttccttaggcaactttaaccacagtcgatctcccacctggaacttatgagcggttccgtctcggtcgtgcctttgcttctgttgcctctgcgttttctccagagtatcagcaacctgcccatggtaccgccgttctccaggaaactaacggctcgcagctgttcagccgcttctctaggagataggagatgtgccgctgactgggttcaggacacaaccatcgtccgacccgtctgctaccaagtccatggggcctttggttggccattagaaacagattaagcacttctgccggtcgacgaatgcgtgctccggttgtagcagtgttgaatgaacggcaggtttggaaccagaccgggtaactttaaattaaaggtggtcccgatcttagattctcaagaaccgacggttctattggtgacccattcaaaataagctggccgcttttactttgattagccaatcgagtgcggggggtgctcctcttcatttgttcccgttaacgaccacaaagcccaacactgctcctgctcgctacttgcccttttttactactttgactagcgcccggcaaaggaattcttttttcccaaagccgacttcctttatcgagctgttgacgataaaagtgatggtccgggctgggctgtctgaaataagcggtaatttttgtcagtcctaataccacgcgaagcgcgtgatcacccagattcctaatgcccggaggagtctattcctattcctgctaactgaccggcttacttgctggcttccttcctattaccaggcctgcttacttggtgtaccagaagtggttacggtgacttgcctctttccttttgcttgtgttgtgccagttgaagtgaagggcttgctactccaactcaagtaagattagataaatagattaaattaagtagaggagaatgatagagggacagaggtaacaggacggagggttggggagtcaagaaggtaaggtgacggtaaaggtcttatcttacagaaccttttcctactggcaggctttcgattgcgtgcttttcttcgtttgtgtctgaccagaggagtggagttaccagcgacgagaggggaagagacagagacggttgctaaccagaggggctagtgacaagtgacctgagttccagtttgctttctattatcagctgactggtaggcacaatcgcttgagtctagttcttcagccaaggaattgcttgcaatgacaatttctctttagcaagaagacatcagacctcttagttaccaaaccttcgatagactaaaggaggagaggaagctttagaaagtgactctttggactagtctcatagccatctatctatatagcataccgccattctgctccttaccgtcccttgagtgagttagatagcccattccttgctgattgaccaacttcggggagtttcaaggctcacactacaataagagtccgagcgactaggaacaggcttgaatacagaaagatattcgtactctttgcgcttccttaccaattttattatctttttaaaaaccccaaaaagtcttaaatatctgcgcctccctcccgaatgctttcttttacgtgaggttctttcggagcatagtgggcgtgagcgtgctttctgaggttcctaaccttcccgtcatccggtgggtgccctcgtggtagtacataaaaaaggtagggctgtgctcaactaagtgagtgaagttcatacgttattaagttgcaatacaccgtgagttagtcctcgaaagttattagacgactatgttctgactcgacgctacgaacttttcaaaatttgatttgattgagcttaagagctctctttctcctcgctataatatccccgcccagacaaacacatggaaaagagacgcctcgtgtgctttccccttctagagccttgaattctagccccttcgccttattaaatgaaaacaaatgtgtggcacttcttggatcagttggaaccgcttacattgttgtttacctcgcttactggggattgatttcgaataggacccagggcagtatcgcttgttgactattccgatccgagcacgtgagctttgaccccccccccttccttgactattctatttatggtatggtacgtcttcctattcaattaaggaaaaaacggtagcttgcatctcgctattcttcagtgaaaaggaaaaacctaattatatcttgccccttggattcatgggaagtggtgccccttttggttaatgaacggaatcaaagccattgtttagagtaaagaaaggaaggaacctcaatcgaggaagctgatacagaacttcaatcttgcacattgaaggggaggcatcggcctgatatcgcccatttattcgatctttcaccggggcagcaggaacagcaaacggagagatcgagactcagtcctgaactccagaagcggacggatgcccgaggagttctaccgttgacgacagcagcgggaatggatttaaaatagcagctgctaacgcccactgagaaggctaaaaaagctacatttccatttataacaaatataacaaaagccattgccatttaagatctttttccaccaggtcataatacccccctatacccctctttgaactaaacaaagaaagacctttcgtttgaggagagaagagaaatgaagggaagagatgggattcatcaacaaagggatagggataaggaatcgcggcgataaacagaggaggcaagataatagatatgtaaaaccttccccttccaccaacagggcattctaacagcctactcgtgcaaacagtcaattgcccatcgcgggaatggaaatgaaaaagtaatttatagatctagagtcagatgaatatgcaacagtctctttcctccctcaaagcctagttgtccactagaagcagccaactatgggctataggctatttggctttcttacttacattcaatggcattttcttcttttttgctttgcctaatcagtgaaatccggttgccctattcccccccctcgcagcttgcagaaaaataatgtatatataaagccttaaaagaaagcatactctcacgcacgaagaaatagcgtaaagtagaagaatagctaagagagaacctgcccgcagtaaatgggcgtcccaaaaaagaattttttggccagaaaaggccggaaacgagaaccggaaccacgagattgcaaaaaaccagcaaatggcggcaacacacagggaacttctcaagtccccagaaaggggaatcagaaatgcactcgtgcaaaagagaaacaagcccggactacaatggtggcagctgacacagatgagcagtgccatgccataaacaaaggaataaacggaggagacctttccgccatagcttacgccatcattccatgcttaactatctcctgcggggtggggaaacatacccgatgtaatcaaccaatttttaaacatagaaggcgtagaacacatagcgaatgcggtgcaggcggaaaaacagatatattaaatcatagggtagaggcggccaaagggatagctgttgataggggggaccagataacttatgtatgagccgcaggagaaatccgcgagggccattgctgtttggattgaagtgaacaaggcggatctaatgtgtgtccacctttctttttttttagaaagggattaaattgatcaccaaccattggataagagaaaaaagagggatggttgacttcgcacaaccggcacagggtattcattgctgctggcctcgaccggtccactagaacggttggagcaactggagctcctattacccctagaagctgctgttggttgttggctaggctcgatttgcaccaccgggcttacccatttttttagtggatcatgcctcctttctttctgagcccagccttccatttctcttcgatttcttgaacggatgggacttttctctctccaactggactagaataaaggagggtcggcccggcctgtgatcgtagcgtagcccgatagctattcctgccccaacttaaccaatggggtccggtagttaggggtaagaatgaacagaaggcgactaaccgatctctctttgaaaccagatgcccggagatgtttgattcgtagggctaggagatcggcgaagagggccagacaaccaagcaaaaagttcttccattacggcgactccgaagcgccaccttctccattcattactggagacgaaagcagctatccctaatgccttgcccctctacctccagtcgggagctaaaccgggggaatgagatagattgaatgacccggcaggcaatagtagattcaacctttatcagcgatggtctgtctcaaaagcgggatatgcaagcacgggattccctacttccggatagagaggaattgaactcattccatccccaacatagatttctgttccgccgacttcacggctcatttactatctatttaaatagaattcccggcttaagacaagacgatgagtcagggaaggcttagctcaaagacttgaaagagcttgttggaggaaattgatcaaagtcaaggcttgataagtaaaggagtgatacagagaaggctactgcgacagatggtttactaatgctcctaccgttacagatagaaattcgctaacaggcgattgcctgcccatgctatagccatgctaccttcacttcctataagctggctaactaaggcctacggacttattaccggtatacgaatacttaaggacaggagacagaaggcagaagagggaaagtagctctatttacaataaaaaaaagaaatcaatcaatttaggcacagcctttgtccacagttacagaagtctttgccgcagatgaccgctttgacatattagcccggattgcgctttcaaatcaatagttcactaccgtgaactcctcccttttgtttgaacaagccttgttactaaagaaaaccacgtccagcgtggagataaagatttaaatatggtgcaatgaaatcatgttcatcatggcacaaaccgtttgccgaagaaagagagggaactccatgaaagtcttgcatctcacgtggaaagaaacgatgctgccaaagcttgctgcaaatgaggcagctgcgaagggcgcaaagctcgctcttacgaaggagaaagaaaagaaccgccgttgttaccggagctgctaatgacgaatccatgctctttcgacctccaaccaccatgatgatgcagctgtcacctctttatggtgtgccgagctacacggatgaacatgccaatcccaggaacttcacagtggaaaaactgctacacgcccttgagtacctccgctgccgcaacttgtctgccgaagaggaggtttttatccgtcatcagcatgactgtgaaatgatgaggctcgagagacctcttctctttactgagatcaaacctttcgaccttgagaaggaacctttcatggcttggagatgccttaaaaaaatgcattcaaagtttggccaagcccatgagagtctcctcatgctctcgaatacccatgcgaagagcactgtcggtttttttaaaatgcaattgaagttctcggtctctcctgtcgaatgacgagaattgcaacagttccagacttcgtgccgctgctcctcttctcttggcttccatgaggtttcatccgtggagaacacaacttttcgtctgcgtgttgctcctacctttctattctgaggctcgagagaccttgggctcggttaaggctaatgctcatggtggattttcccatcagatacaaccatagcagggcttatggcagggactgctgctgttatgtgattgcagcacccgagaaaggcccacggtctgacatttcaccacaaggaccaatgtaactcatgcggtctattttcgatcatgatagaaatgggagagtgatgcaatcacataacagctactgtgccatccactttggcttccgaaacatcaccaatcctgataccgaacaaggctcccatcaccctcttcctgcagcaaaggttctttgcttgacagctttgacgtccccgacccccttccctcgcgggtttggctatgctctataacaggcttctcggagaaagaatgtagccggctttgaagccgtgaccgcccgcccccatggcatgatgttttaagatcggtcctagcattgtttgctaagcatggtgttagcatggcgttccaagaccaaacctgatgtgttctcttcataaaaaaaaagaagaataaaagcaaggtaatgctaactcttggagcatgctccgctcttccttggttgcgactttggcatccggcgctgttgctggtatccaccgcttctttggtttctagcgccactcccgtgcaggttgtcgcctttcttgacagatttcccttttttattcttatgtcattttcctctttccttcttacctgaacctgaagacgataacatggcctggtctcgtgatgacggccccacgtcacttcgtagccgaatccctctcattctcagcggattctcctcatttacatattgaaaacgagcgacagggatgctggaacgccacgtgcttgaattgaagcaaagcacgcacattgtcgtgttcaggcctgactccgttgaggatgatgcgtaccctcttggcctatgaatacttgctttctccgtccagctgctcacactgaaagcacagctcctttactcccccgaagtatgctgcgattgacctgacatatagcttcctcctcttcctagccgcttctctaactaatagcgacagcttcgttatcaatcgcctgattgaacaagattgccagcgcattccatgcctgactcggcgatttcgcgtccttgatatgaccgatcatcttcttcgtcacggtcatctttactttaggacgtagttggctctctcagccttctggttccacacgctagtctcaaatctggctttctgggtgagactgtttatgtgccacccgtgacttccccacaaatcatgcaccttcagatacgacgttgtgcatgtcgaccaatacgaatacttggtcgagttccgcttttcgccaaccaggttatttacacatctgccatggctctcaaccggctactaagcactcttggaaagaacaagactcgtccttcgacagtccttcgtacttccgttctgactaaaagccccgatctgggcgttactttgttgacgtcacttcacgctcccggcactgtcacaacagcactccttgctgaagtagctctagtatatggtcagatgaatgaaccaccgggagctcgtttgagagttggtttgactgccttgctttcgaccccatgccctacatcattaatggtgctaaatcacttccttgccttacccagcgtcgaaggaaagttcctgaaccgagctcactgccttcattaaggaaaggtaatccggttgcttgaagctctcttcccgtgtcgatgaagggctattcccactacgcgctaactagaaaaggaggaaatgaaagagagtgagggctgattctatagcaagctccctctgggcattcaagaagcccttctttcccaagcgattctcttgtgtgcctttaactattgaaaggacaggatcactatgacctctggctcaaggactggccttctcttcttttaatgcctacagagaggcctgctagagcccttttaaggcataaaggctctaaggcctcttacttgactgaaagagtactcatattatggtctgcaagcctatctcgctttttcatttccgttgtccctcaacaaataacataagtgcagtgaagtagcgcttcatcccaggcgacacctccgcccgcctatgacagagaggcccttctcccctttgaaatgcggaagctcgcttattcagacaactactttagaaaaggatgaacgggtcattcgtcgcgggcctttcctgttgacagttggaaggcgggtgagttgattggcaagccagctaacggggccacgaagggcccaacagattgagggctcgaaattttatacttaacacagtgagttcgaagtcctcattcaccaccaacatgcttcaatccaatctcgggggcagaacccgatcatcgagagagcatgaaacttgctggcgacatcggtgtcggcggagtgtttcgcaaacctcccagcctcaccctagccctagggttggctccgagatagggaaagtggaaacctaattctatatggatctctccttgtagatcctttataaacagggcagctatccaggatctccgctttcactttcatactcttcatgtcgcgtgtttcgctcgctatggcgagctccactcccacgctttccgttggtcaacaaccaaccacaactcactataattcttcactactcctacaggctttacggagtctggagggattcatttttgttttccatttttaaaatagcgaatgcaattgaagccctagataaatttttatctgtggacaggaacttttatttaattgctagtattgtttattcttttttgggtttttatttgtgtgcaggcgtggagcacacaataaaatcacggcaggcttattcgtataataagcgttttaacgtacccattagaaaaactaacagctggaggggaaatagtatcgaggtgcaatatcctccagtggagtgtcgtcggtgtaaagagaaagatggcaccgtcgaccttcagtctcgtcaaggggctaaaagcccccctaccccccaatcgccccctctttttagttaaaaaaggttgcggatttttcttcttgatttttttccggtatgccgctccgcgagcaaggagcgaaagaaccaagtgggctgtgttgatgtcagaatttgcacctatttgtatctatttagtgatcagtctgctagtttctttgatcccactcggtgttccttttccatttgcttccaatagttcaacctatccagaaaaattgtcggcctacgaatgtggtttcgatcctttcggtgatgccagaagtcgtttcgatatacgattttatcttgtttcaattttatttattatccttgatccggaagtaaccttttcctttccttgggcagtacctctcaacaagattgatccgtttggatcttggtccatgatggcctttttattgattttgacgattggatctctctatgaatggaaaaggggtgcttcggatcgggagtaatcactagtgatagggctaaaatcggggggaaggacaaaggaaagagcgatgcctacattaaatcaattgattcgtcatggtagagaagaaaaacggcgcacggaccgtactcgagcttcggatcaatgtccccagaagcaaggagtacgcccgcgtgtttcaacgagaacaccgaaaaaacctaattcagctccacgtaagatagccaaagtacggttgagcaatcgacatgatatatttgctcacattccgggcgaaggtcataattcgcaggaacattctatggtgttaataagaggaggtagagtgaaagatttgccaggtgtgaaatcccattgtattcgaggagtcaaagatttgctgggaattccggatcgaagaagaggcagatcaaaatatggtgcggaaaaacccaaatcgatatgaatggaagatgcctctggaacttgtttttcaatgataattttcattttgaaaaattttattagtcttcgacagtcttgagagcgaggtttggaaccctactttcactcttttctagagagaaaaagaaataggggatacccttgacgccgttctggcgctctctcccttttttatagggggtcgccctatacagacaggtccgctgttttctgagcgctttgattgctttttatgaagtagccctttttcgtttgtgcatctttccgttggtcaacaaccaaccacaactcactataattcttcactactcctacaggctttacggagtctggagggattcattttttctcaatcaacaagaatgcctcaactggataaattcacttattttacacaattcttctggttatgccttttcttctttactttctatattttcatatgcaatgatggagatggaatacttgggatcagcagaattctaaaactacggaaccaactggtttcacaccgggggaacaacatccagagcaacgaccctaaccgtttggaagatctcttgataaaaggttttagcaccggtgtatcctatatgtactctagtttattcgaagtatcccaatggtgtaacgccgtcgacttattgggaaaaaggaggaaaagaactttgatctcctgtttcggagaaataagtggctcacgaggaatggaaagaaacatattatatttgatctcgaagtcctcatatagcacttcttccaatcctggatgggggatcacttgtaggaatgacataatactaatccatgttctacacggccaaggaagcatcgttttttaatctcattatgaagcggaaactacaataaaactttctaacaaatgaaaaagtttttgactgagaaacagaagaattcgttcttacttttaatttataaaggaattcgagaacgaacgtccgtgataggcgttttcggatttttttttctgggatgggtgaaaggcccatgtcttcctacacgtgtcaagttgaataaatgaatgcagtcttaaccagagagagaaacctgcgcctttgattttaggccgccggcggcgcagaacgcactaatccgcgacctgcaagttttccgaaaccgaactgaatagaattgttactttccgctgaaaatcaaagaaggtccattttcccacgtagttcgtcggtcaaaccaacgattctcttctcaaagtaatagagagatctttttctagttagacttctatcaatgcaatgaaagaaccatcccttcctatttgtttgtcctgtcagatagaaaaaaaattagaagcccttctttaccactttagggggtgggggtgaagggggggtttacatacaaccgaggcaaaagtggtttatgattgaatctcaaaggcattcttatcatttggtagatccaagtccatggcctatttcgggttcactcggagctttggcaaccaccgtaggaggtgtgatgtacatgcactcatttcaagggggtgcaacacttctcagtttgggcatcatatttatcttatatacaatgttcgtatggtggcgcgatgttctacgtgaatccacgttggaaggacatcataccaaagtagtacaattaggacttcgatatggttttcttctgttcatcgtatcggaggttatgttcttttttgcttttttttgggctttttttcattcttctttggcacctacggtagagatcggaggtatttggcccccaaaagggattggggttttagatccttgggaaatcccttttcttaataccctaattctcctttcatccggagctgccgtaacttgggctcatcatgctatactcgcggggaaggaaaaacgagcagtttacgctttagtagctaccgttttactggctctagtattcacaggctttcaaggaatggaatattatcaagcacccttcactatttcggatagtatttatggttctacctttttcttagcaactggctttcatggttttcatgtgattatcggtactcttttcttgatcatatgtggtattcgccaatatcttggtcatctgaccaaggagcatcacgttggctttgaagcagctgcatggtactggcattttgtagacgtggtttggttattcctatttgtctctatctattggtggggaggtatatgaaggaacgaaacagtggattgagtaatgaaagctcgaagacaaagagaaccgggcttttccaaagaattactgctgctttcctactccctttgattatcatatacaaaaaagtctcttccactttcctactaaatctctctttattctggcacataaatgaagggatcgaagagattatggcagattatgttcaccaagaaatgacccgaaattgggtctttgtctatttgagattgttccttttaatcgtaatcaaagatgttttcttgtctctcgttttttttctgaacaaatcgaagaacctaatggatcgaactcatccttggctgctacgaaacatatcggccttgcgttgcggaaggaacgttctgttctgttttgagttggaggcaagagctctttcttcaataaaggtttggaaccctcgttttgccgtttccttcacggccccgctcgccagtccaacttggtgaaataccttcccgcacctaattgatcaaaaagtccgcgatgagtggcacgggctcctttttgattttgagtgttgttatgggcccgatagtcgatacatagacggaggcttgcgtcatgcgactttcgctcctctcacattcgttcgagtggcttcgctcctcgcagaaattccagatcattgaagaggaatcaaaaaaggtagttttcctataaaaaagtacctggatgttcccttgtcccccaagagaataaagagagagcattgccttcctctactggagaaaatgaaaaagagaatctcaggttggaaaagcaaattgttgtcctccggaggtcgactaacgcttattaaacatgttcgactattccgatgcacatgttaaaagttttctcgtaaattacccggcctacacttcggctactaataagggggcaagaccttacaactagattagagatgatcccttctctccagtaagtgcagtgaaggactctcgcctcacccgcccctttgacttatggcatcatcgacttgcttttcaacctaagcgatttcataaccagaaagaaagacctctctttcgggatcagtcccgtccctagatgtagtagtcaatcagcgggacattcaaagaagctatgcaccttcactgaatgttaatgaaagcaagccctttcatcctaatctcatctactgaaaaggcggccgggcgtagcgcgttcttttttgggacacataggctattacagacgcatcattaaagactttgcgaagcgcggaatggaatcattgcagaataaaggtataacggttggggaccggaacaggattaagcctttaagcatgcggatgctgtcagccccggtttccggattggaataaggagttcatgttcatactgacgcatcactctatgccattggatgtatgttggcgcaggaagggccgctagatcaccccatctactttgcaagtagacgactttccgcttgggaattatacaaccatcaaaccttctttatcatgatccgacccacacctacgaccaagattgagtaccagagctgctcataacaacgtaccaaaaagaagaatgtgatgagttcatattctccagattcgactataaaccagatagtgaggatgaaaaaaaaagcataagctacctcgttcgtgctcccgtctttcccgctgccatcttcggtggatggccccctatctcttaaagcttctatgcgacccatgtagctatttattggtgcctttgcttcccgcggcttcttttactataactctgctgccatccctgctattgcgggactgaatcaatagaaaaaacaactagatccagtgcttataccccttccgctgggggaaccgggtattcaatgggcaatgaatccagatatttacccctttacggaactgaaactgagattccaggatatttgccgactcaagcgggtagtccttattagtcaagctttggctcccgaaggggaactggatccgtccaaagggaaactgattctcaatctcaatctgtatttattcaaagtggttttgtattcgtatatgggcttttaccttttactgggtcattaatgcatcaatggagtcaacttaatattcagtttttttagttgttggtcggccttgacgtatatatactatactgcagttcccacctccgtgtgtattgcgtgtttgctccaatccgggtcaacgaagtcaactgcctttcctgccgccgaaggaacctgtgcctttgccgctggtgttacttcaatggattatggataaatgttaactattgtctctcaaataggaagggattccgggattatgaagttctaacgggatccgcctttgcttgtgtctccacctgtgcccatgcctatgccaagtgcttttgctgttgtctctgccacagcagcgctgctggtttgtttggatgctccaacgtgtgcttcaaccggcgtatacaagagaaatttcaattgaaaaagactgaagaatttcaattgccgaaaccccatgccaacatttcattcaatgtttggccgtccagcgaatgctcgttctgttgtcatacagaataggaagcccttctctaatagggccgatccgtcggaaagaagacagaacggactggatcggacaaagaaaagaaaaatcgaatcgtaaaggctcttgatggaatgcatatatgaggaaccatgacatctctgggttgtcacggaagaagttgaaaactagaattccttgcgaattctatcccattgggttggaggaggactagtagattcgatggcagtgcgccagggaaagggccaagctgtacaagaatacccccattaaagtaccaagttccacaagcaagctattattctggggatctccattgaggagcatcaaaccctaatgaaagatctctccccattagcaacaggtaatcattttcaagccacaagaagggataccctactgaacgaaaggaaagtaagtttttccagttggcattcattagtccggttgggtaggagcacctggttgatcgcccaacaaaatagttgtttagcgaatgactcaacctatgcatccggtatttacacacttcgaggtgtaaatcacttaaactctttattccccctacccctgtattaatgaaagaatagaatttttgactttgaccttgcgagcacccactaaaaatagggagggcgcacttttctctccccgatctccagaaccgcaaaaaagatggaattttccgtcttcttagccgacgtaagaccttcatccggcagcaaaaagctgtcccttggagctgctcccatttttccgggtatgaagaagcgggagtgcaccacatggaggagaaccctactcgcctttgtatgccaagtcactggaccggcgaaacggattctcccgaggtggagctttcaaagcgggatcgttccaacgcgcccacgccttactgcttattcaggggcgggcgaaagtgcctatgggaccattcgacattcatagcctttcaatcctattcggattttgcaagactggaatatgaaacgaaagtcatcctgaaatatgctaggagcttcttccccacatatcctaaccggacatttgactatttggtcgagcggaaagccggcggaataagcagaggaaagaaagagaacacttacttactcttactgttgatttcattcaaaagcgaaggaagaaagctactcgaccaaagcaaacagcaagctgaaaaacgctagctttaacttgaaattgcgaaaagaaagaacaactatgtaagtaaaccttagctagtccgtaggtccgttaaggaagtggaacgaagccaaagcttgactttactaaacaagcgagaaaagccctttctatgttattagtaaagcagcgctaacgcgccccttattgaaaacggcctagctaacgcgctttagtttgattgcagctcgcgcaggggcgctcacgttttttggctgagccgtatcttgctggtaatggattgattcaagaatcttgcttggtttaggcaggtaagtgttaagaggctgtcattaggtatacataactacacataggagtttcttgcaatacaaagtaaattgcctgccatgagacagacaagccgctctgcaatagtgaaggagcggcttcgctatcccatgcaagtgaagggccagtcctcctatcgcgaacctatccacttatctaccgcatcgaggcgaacatctcggcttggttggaaagcttttatatagcaataaaccggaaggctcaggtctttccgaggccaggtgatcagtatggagccgaaggcgaaggtttccagcaggcccccttctcttgctttccctttaagtgacaaggggggctgagccgctccaagccgaaagcgatagcgaatcccgaacttgcccacgctcatccaaaccggcctcaaaaagcgatcggaaagcgaagcccttccttccaatccaagccggcgaagccgcccctatatctaaccaccgctcgccccgatcacatattggcacgttcatgatgcatcatgatcaaaaggccgtaaaaagacctgtcccccggttccctttccctcgcccactcaagttcattaccaacccaatccggctgttccccacatctgagtgatcgagttgactcctctctcacttaatcaatgcccggggccaagcacttactggctggcggacacgcagtaataaaaaccgccacagccttagtttcgggttcgatttcttatgcagttaagagtggggcgtgctagcgggaagtccggttatgaacatatatcaatccctcaaaaaacctttcttccatcgtatgggtgtctgagccaaagggatcaggtgtcggtggaaaggaatcctctcatctagagaccggggcgagggatcatggacctaaatagttggacgaatgctgactcgctgtctagctcacagagagggctttctttaaacggggggaaggctttatagggaggggtggtttccgaacgagagcctttagctttttccgggggtgcgggtcctggtcatcgctgccccctgatgccaatagctgtctcggggagttgagttgggggctttctcttctggttgcttctgggttcggtctaaggttggttctaaggctggtttggaacccttcccttgaacaggcgcttcagcttaagtagccgctggggtcgaagctgaaactgcaggatctgttgtagacgcaggagcttgtctcgtccgctactatccctctgatgatcgatgttgggttttttacaatttgcaaccattctattatataggctcgctccagttcgctattcttgtgattccgaatgcggtgggctggctttcaaaggtatgggacgatcaggatggcttggtccagctccctttaatccttgatggatcaattgaacaactttacagatttttattgaatttcgaaccgctatagaagcgaacgacttgatcgcgaactatagtctttgtttgttcgactgaccgactcgaatcgattgggcttcgttccgggtagtgtttagtcataagcctgtctcttttggttttcacttgtctgctttcgttccactcctttccaactcatttctggttcaacaatttcaacaccgcgccccttctccagggcggcagatgggtctagagaacctaactttctcacgatttccttccggttagctaaacttctcctgagcaattcacgtatcacttgagtagtagtacgaaaccttaagaaaaggtgatctactagttgattcaaggaggatccgttgaagagtgtctgttgtctcgggagggaagagtacaatcttttccagcaccggtgcaatatgaaagagtcctttagaattcgttagaatacgaatgagatcaaaaacgctctgccgaggctcgagtagaagaagaggtacttgaacagagggccgtggaaggccaaggacagggggtcaaagggtatgccgatgctgactgggcgggttgtcctgattctcgtcgatccaccactggctggtgcatgttcctaggttcttctttcatttattggaaatgcaaaaagcaggaacgtatctctaaatcctctaccaaagcggaatatcgttccatgtcttctgcaagctcagaaatcgtatggcttcgaggactccttgcagatcttggagtcaatctccagtctcccacaccacttcatgctgataacaccagtgcaatccaaatcgcctctaatcctgtcttccatgaacgcactaaacacattgaggtcgattgccactacattcgagaacttatcgtcaatggtacctttgactcacgtgtcgtctcatgatcagactgcggacatcttcaccaaagccatgacacgaggtcgacatgattttcttgttggcaaattgatgcggaagtagatggacctgactgagcaggtggaggtgctgttgcttgtgcagctggaacataaggcttaaaagcgggaggtgcagaagtgaaaggagtggaggcagctatcagtgcttccagagctgccaactcagctcttttttatgtcaaaatttcttcagatgtagggggccgatagactgcatttaattgggttttggggactgcaatctcggcgtccctttgtgttataatctaattttgtcgggccaaggctgccctaatttccgtcagttgttcttccactgtctgtacgacggaagagactggagatgaatcggtcgtagtcattgcgggtaatattactagcccacgttgtgaagggaatgagctagctgaagcttctgacgattctgacggggccggactccgactcctttggggagaatttgtgatatggatcaatccgcccggaattcttgaaggatgcaggatcacttccttccgggtggattttggttgaaagatttttcttttcggtggcaaaggcatttgagccggggcttgtctctgggaacgagtgccccgcgaaggcaaattctcagtgacttgggctgatgaaattggatcatgggaagattgtgtagatgaaggctcgagagacctttaggattttatatagctgctcggaatatggggaacctaatagacaaaacaaggaaatgaaaaaaaggcttccctttaaagaagctttgttgagagaataggagtgcgctgcgaacgagccctaagaaagaaaagtcaaacggtggtatgtcaacgcttgtagtcaacaaggtttggaaccctccatccatagtttagaagtccctgagggagggggacacgggtattgactaaagaatagatatatataggcaagttgcctatatatatctttcttcatcgaagaaggcgcctttgattgaatgttcacacctgatccaccgtctgcacttcctacattcactcccggaaattgaaacaggaaaactggaattgtaacctcccggtctgctgtagtcagcctcacggtgtgcctgactagcgagtctgccgtctctacggctttcccttttgcgggctgctcctcaagccttcgagtgccgatcttcgcttgggccgtctcgcgaagatcttcgatccgaaccttcgcatctactctctcttagaggatgaaccacgccttcgctatcgcaagaatatagcgatcgaagagagctatcgctcagctgcttcgcgtattacgaaagccgtatttattgccattgcccgaagggggcatgctgcaagagcgtaggtgagtggtaagcgtaggatcgaagagaagggcagcggcagcagtgtggttccaggtgccgtcgctagattgagtgagatctgcagggtggcggggacttcgactgccttgtatcgggtgaagagaagggggtggtaggcttagtagggctcgaacctacaatataaccgttatgagcggtacgtttcaaccaattaaactataagcccctacggatctctacatgcaattcgctcacttcgggaagagcggacgtaaagaggaggcctttgctctatctgcttcttcctcttcccaggaatgaacaaaaaaaaagattttctttgtttatatctatactatatatatttataataaaaatatataaataattaagcaagcggccctttcgcgactcaaactgccggtacgctttccggctcgcaacgactcaaacgggcgggggctctctattagcttgcaatgccggcagttcgcctttagttagaagtagaggtagagggcgccctttgccccacacttcagaaaaagtaaaaaagtatggattaagtaagaaaaagtacataaggtaaggagtgagaaagaaaaacttggttacgggaaccgaaggttaggccgactacttaagtatagctacacctaaaaaagtgtattcctacccccttttcttcccctttctgtaaatgttgccaattctcagaatactaataatgtaccctcgtgcatacaattgcccaactactttcttcctccgacttagccacttccgcatctgtcgtattcgggcttcgtggcggagcatttagcaatgccagcagcctggtgagggctggctgtctggggacaggttaaggcagggcctgctgggcttgcttctcatgagattgggtgagggaatcagaaaagggctcataaaccgggcttttgggcacacggaaaaggggaagtggatggagggggcttctccgctagagttgggggtggggtcgctatagtggctagggtgagtcttcctacacggctggacgcccggctctagacgaagctgcggaggctcgagagacctctcccgatagactcgaagctcttcatagtcaggcggggtagaaaatcttctctcaaaaagagacagaccagagatgacagaggaaggtattcggttcaaaaaatatacggcagtcagaactgcttcagcccaaaattgactagggacagaagcggagagcaagagagagcgagctgtctccaatatatggcgatgcttccgctcggcaactccattctgctggggagtgtgggggcaggatcgttgggaaagcgctttgtaagtgaagtgagttgaagcaagcagagttcggaaggcagcggagatatattcccccccccagaatcagagcggaaaaccttgattttagtcaattttgggctgaagcagttctgtcaaaaataacatatacggatgatcctcctttcgataacagaggggcaggatgggcttcggacacaagattaaaaggagaagtagaaagagcttctttaataaaggaagggaagagtcttttcccagcttgcaacccatacaagtttaggtacagaccccaacattccagtagaaataaaatatctaagccgtgggctgcagacatgtcctatcctaatctacgatgccacaacaaaaaagggggagtagagggaacaacaccagacacagcagaaaaggcaaaagactgaggtaaacgaagtttatccaaaaaagagagcttgccaactctacggtccttcccaatccccttactccatagggcctctcgcatgatcctgtacaagacaggaggtaggagagaagtgaatataagcttttttttcaagccggaaagaagattcactgagagagcgataagatgaaaaagagcataacatattcgatgataacgagagagagtaccaagactggctagagggaattgttcggagtttgcagtttaaacaataaggaacttagatggagaacgaagagaagaaagaagtgaagaatcaccagtcatattcttcgatgcgcccgaagaaagtaagcagccccctatgttgtaagcgtaagggggagcaagtcgagtctcctcggatctcacatcagcaactgctctttcaatgtctggtggaggcaatgaaattgaattgaggatctaacattctcgaactcaggcctcaagcccataaaaaatttagagagcccctttatactctataaataaggctattctatgttatatgaaattcttcccgacaagagcctttagaatcggagcccctatctttgaaaggggtccctcatgttcagctggtcccatagaagcctaagccttcggtaataataaatagtgtagcacacttctttattttccccataagctaaggcatgttcttcatgttgcaactgatagaaaggtggagaatcatcctgagaatcaagattacttatgtaatcccaaatatctttagcagtcgcaaaagaggtgacggtgtatatggggctcaaaggaagtacacaagtaatcccatttgaagctaagcacttttcatcttttgtaggaaaatccccttctctagtcttgggaaattgaagcgacccatccacataagcacaagattttttcccgagcaaatcattcttcatcgcataagcccatgacaagtcatttccagatgcttctttcggaagagcacgggaaaagcctatggaatccattgtactaagaccctaaagatcatccaaggacttcaaatcgggactcaaaactagtcaagaaggcttaactcaagcaatcactcaagagaagaaagtattttcgctttccggattcgtaaaagaaagaagaagaagccgggtcttctttttagggcaataaaagggctccgagataaaggagatcgtgggatccaagtggacgttcccgatttccatggccgactgcatcccgaggactttcttgattggctaagtagcgtggagaagttctttgattggaaagaactatccgaggtgtgcgaaggtgaaattcctgagcacgggtcatgcctcaatttggtgggatcaagtccaagcaaggcgtgagcggaaaggcaaagggaagtacatgagacaagatgcgatcgaggttgcgggaggaatttctaccctccgcttagacccaaagcttgttcaaaaggttccacttcgctttaaaggataggggggagagaagcgtacaagaaagcgcctactcctaacaagttgcggagttctaccaattgtttatgcgcaatggcttgaacgaatccgacgaagaatcccttgcttgaggttagaaatccaagatgaaatctcgatgcatcggatgtggaaagtggcctatcaactagctctaaaggccgaggaaaagctaaagagaaggaccacaaggaggcaccgaaggtgataggggattgacctctaccatcgggcgaggaaagagaccccctttttaccttccctcaatatatatggcacgctttactaatagaatatcaagtcaaggctccatcctcctcgttgcccagagccttgacttgagcattgtacaagtgcttaaggctccttcgggccatggccacaactattatataaggcaaggcttggtttatataccagcgcctatcggcgagaactaggcttgacttggttagtagtgcccgcccattctgcctcgcccggcctgccggcccatgaattcttcagagcgggccggcaggccgggcggacgaggaccgtcgaagaagtgcctcgacgcgccgcagccactacttcttctccttttatgcaattatgaactccacggaactttctcgattccaacgcaacttatccttttggagctgacgtaacaaactacgcgagcctcccgacgcagccaacataaatcctatccgaataaaaaaaataaaaggcagtttcattatggtggtataccagccgcctgttctggaacttccagttccaatcgaagcatatagatccgtaaatagatttgtatttatagccacttcagtcgtgctcgtcgtttctcgaaagtatcttttttctgggaacatggtcaaccggaaattattatgttcgcgattcttcatccaccgatgcagaaaatgctccagttttccattctcgtatgaggccggaaagtttattggcaacaggtcggcacgaagtgattcatcatgctcaaacatgagccgatcgttcgttagggaccctttatagatcatcaaattcccacaaatggaatgagaagtgggtccatgtaaatgatcgagacctcgcaaacaacaacgctccttccccatatggagttcggaacccaaaggcaatcgttgagtgaactgtatcctctttgtgttagttgacctaagccgcaccattactgctggggtagggctcggcctccgaaccgtacgtgagacgagtttctgcctcatacagctcggctcgggccgaagaccgggggaagtttaggagagatggggagacccagcagctgccggtcgggggggggataagcagcttgtgaagaagcaagcttatcccccccccaaaaaaaaaaccaatcctatagcgctagcgcttcgcgttctttctattccatcccatttcatttcgggataggcggctaatactaatctaataagtgaagtagtcgtctgaccaattggctcggacaccagaccgctcgtgcccgcccattctgtctcgccctaaatggaatggctctcttagttacgctgcgccccgacccgagtccccacgtccgctcttctccgcccgcaacccaagaagttggctttgccaacacaacattagggccgtccccttcattctatgctgaccccggcccggggctggctttttgggaagcccgttcccaccgcgctcacggcccggctggcctgccagcggtagtggaaattatcccgttccctggtcaaagacttggttggatgcgggatctactccacgaggagcggtacggacgtagatgatatcatcacgacctctcttttcgtaccgctagggatgcttaacgccacttcgccaactggcgttacctgtgctttcgtgtctctcagcgtggtcagcactgggtgtttccgagcagcgaggcttacacccattcgcattagttcatccaaagttccttacccttatgcacgaattattgaataagccatcttcctatcaaggttaaagagtcaactgagcatctcagcggcgggattgaatacccggatcgaatcagagttcacgccgcccgcccggaacaaataggaggcgtgggccacaggtcgcacataagccgccgggtcgcacgacagaagaacacccaacatacagatgcacactcctccatgtgaaatattcatcttcattggagctttttggtagtagtcgtgaccaacagccatcagctgtcggctcgttggtaaggcgagagcttcaagcccgatttctggtggcacacccctcacacaagcaccacccaacgaaggggggacggggaaagctacaggccaaaaaccttcgacccttctttctaaatgggggtgcccggagcacctcatcttgtcatttcgtcgttgctcattcccgttaggccgaagtgtttggcctttccttctccgcgcccgctcacgcttcgctgacctatcgcgtgctaaagataagagagtacgaaagaatagtaaacggagcacaccgcagaaagattctaaatatgagaagttccccttggatgcgagaagaaggaactgaagaacgagaacgaaacgaaataaagcgtttctagtttcggatgagcttctcccaattatgtctggtaatagaatagggcgacttgctctgaccaagactccactttttgctccgtccatggagcggatgaatttcctggaatgtagacagacaaaaagagggaatgcagggataggaataggaattatagtaccattggaagaaggggcacctgtgggaacatctctactgacgaaccatttcaatagtacgggtgctgccgtgccacaaggcacggccatggaagtaatgaaaaagaaacagttatatagttggaccatctgctctatccgttcgagtttcgcttctctagagaagatgagacgctaaacataaaagtgttcgcaacgcataccaaaagggtaccaatgaagccgaccattaatgactagttcgaacaccaggagcggtcggatcaaataagggatcagaccgctcttagaaagatgaaacaaaagcaaactctcatagttggagctgggctccaactatttcttcgtaagtgaggtacttctttcggtttgaatagggggtagccttgaagtagccgcgactttggtcgtagtcagttcaaacacataaacccagtccacttgcagccatgttgatcaaaatgactaagtttcatgacttgaccagtcactcgccctcgtattagaagatcatctcaccctgtggtcgacattccattccccttagtcgtgggtgctcgttctattttgatttgaatgggccgggtctcccgaggtacatatggccggcccttcgggtgtctcggtgatacaaacaaagaaaagacgaattccaatcacatcccctatcacttaaagccaatccttacaaaaggaggaaatagaatcgaataatctaccttagtttttcctttccgttgatcccccccgacaatcaagctgcactttcttctaacaagtggctgagagtcagcaagcaaccttggcctcttggcaggctcttcaagaccttcctttccggtccggccgcggtacggcacctgaactcgaagctacgatcagatccgattggatctgatccgttcagattccacagatccagccgatttggtctggtcctatccgacccaaccccggaacttagaacggccggcatgttttggacggtagaacggggagagggggagtcgtgcccattctctctccgggcacgagcaggaacataaaaaatgttgaccgaatacatgtacatgacggaacgacatatataaaaatacgtgatctgatttgataggctgcctgcagaaatagtttaccgaccgcaaaacaattcattcttgtgtgtagcgcatggggccatgtctcccgaacgatcatagtacggccgctcatctaatatcaaatcaatcggtagatctcacttcccttcccccataccatagccggaagggatagcgtatctacagaagagagagtacgggcccttacccttaatttagtttagacgcggctcgaatttacgctataggctgtgttaagcatgcttctttgacagaaaacacactctttttccatgacaacaggactggactataaagggcggggcggtaagctctctatcaacaacaggggggctgttctcctttgtcaacgacacaagcaaggagtttactttgtcaacctttggatgtctttggttaggctcggttgactttgtcaacgctactaaggaccggggcgagcggaattcagtagaggctcgaagaggggcttactaagcgaagggccgaaggcggctttgctatccatcctactataccaccgaagggcggcagcaaagctgcaaggaggtagtgcggctttctttgttctcatggcagagtgaggggcgttatccatccgccaatagaaccggcttttagtgaagatccgctcatatgctgcatgaggggcggctttgctcatgagttagcgatcaagcggaaaaggacctgcgggcttcttttctttccggagcggacttgctcgtagctccctattgatataaaaggggatgaagggtgaaagataaaaaaataagaagcaagtcttgagggagtaaagagccaccgttaggtggttctgcgccaagtgcgatcgattgtccttcctttctttatagattgaactaccgtaactccactcaaccaacaaagtgaattccatactcaaagttgagttaccgtaaaataaaatatctatagaaactaagggggaagagtttttactgaagccgaaaggtatcctaaaggaatggtagcaccacaatccacccagacgcggccatcataaatggttcgtgcgacggcggcggaggcaggttcgggataatccattcaatcttcttcttttctttttctctctttttcttaattttcctcttgaaacatttccagaaactcaagttttatttcctcttcttccggcagcatttctcctttgagcggcatttcctcttcttctttcggtggagcttcctctctaggttcttcaaggccctatccccccgcccctttttttgttaattcttcttcccttaggatcgcctttggaaaagccggaacgtaggggtcatgatgatccagtgggagggatcttcctcacaaagccagaaagtattaatagctttaattgtagtgatggtaggggggtgttggaaattggacacttcgaggcaggtatttgacggtatacctataccgacggaacgagggcacgagcccctactaataatcgaaggggatggagaccagagcgtgactagggagcgagttattaaaaactcccattttctcgttggggttcttgggagcttcctgttcatccgccacgttgatttttccttcttctatgaaatcttgttcaaagtctagcttgcatccgtcgcatgacctggtccccccttcattgggacctaacaaaattctgccaattccttcccccccccccagatacatacttccttttctttctcccataaagcctcctttcctgaatcttagtttttctctttcttatttattataactattatcactttctatttaaaaccgggccggctaaaaaaaacattaacgtatcagggtagtacgcctggaacaaaaaggttcgtcgtacaatttcggcgattacaaaaataaaggagtatatccctctcccttagtgtctttccacttccgtcgttcaggaacaaacacttcgcctaattcttttgaatcccggcccgctttttccccactaacccattacgttacgaccactgaacaaacttggttgacaaacatagtttatgcgccgctaatgtagcggcttgtcgagcatttgacaaactcacaccatccatttcaaataggatttgtcccgtagacacacgagcaatccaacccgttggatttccttttcctcttcccattcttacttctgtaggtttcccggtaatagggagatccgcgaaaactcttacccatatcttaccatttcttcggaattgtccgctcatagcacgatggaattgtccgattgtagcccgacgcgctgcttcaatggctcgatatgaaagacgaccagctctacaacttttagtgccatatcttccaaaacccagttgtgtaccatccggtttgcaacccttactacatctgcctttacgatatttactatatttcgtacgtttcggatatagcacgtccctttttttttaactatatgaaatccacactttgacacctaagattccgtaacgagtagatacttccgcagaagcataatcgattttctggttaaatacattacgagatgtttttccatactttccgcattcagttctagctatttctgcgccttctaatcgacctgaacaacatatacggatcccttcaaccccttttttcattactaatggaataccctttactatttgactaaaaatggaacgaaatgatgttttgtttctcagttgaaaagagatgtcttgagcaatcagagaagcactttgataaacagatttgatcttgaccgactcaattaaggtattagtgtttgttctattagacaacaaagatcgcatttttttcacttcgttcaaataagagttgtacccgtacggaattcttctgtttctcagtatgatctctatcatcatctctattccctttatcaattctcctatcccacctaggtctatgaatttctctatcaattccattaccttatccttacccatgagcttccaacattttttccttaattgacctaggagttgttcccgggcatcctcaaaaaaaaggttattatacatcccaaccccatcccttagaaagaaaaaggtagcaccgaagaaaggaaagagcgagatggtggtttttgttgttcccgcgaagcgaagatcattcgccaagcgaatgaagtgggtcaacctctttttggcttcggccaaacactttttctcactggtcaagctttctacaaaaaaagcgatgcgagaacgtattctcttatctaagcttcttccctgtgcattcgctccccccatcgtagatggttcagccacgcccggtgccgcgaaatgattgagaactccgatggggtcgaaattaatttggttctttgtattcaataagtattgcatgaccaaataattcaaggaggggcgcactgcagggagggtccttttaagtagatgactcgtcgggccgtcggagcgggacttctttggcaaaaagcacttgaataacttcgtttttctgaaggagtcgtcattttctatcaggaacgctatgtcatttacaaccccggcgtatttcggatgcttgacggccctgctgacccgaagtgatttagaaagattcttctttatcgatggtgatcggtcatggtatccatagcgttgcttctttttcggccaaatcctaatttcgttttgcttctcccggtcgtcgagcctgatcgactcgactcttttccctgccccccggcctctcacttcgtttcgttcttcttctgtatcgtcgcttgaatgaagacacccgatcggcccgactttcccaaatgtccaccaccggcccttctcctttccgggtctggatttttcgcgtcgtttcagtcgtcgtggtcgacggggaagaaagaaatgaatgaatgttctttttggaaaatgtagaataatacacctaccgagacgaaagccaaaggtgagtctcgtaggtggacgtatcgaaccgaaataagatctcagattgacatcttgatacactaatttaccataataataaatagagtcaatggtgactccgccgtgggaagagccgcttctttcttgcttgatagtgggggcttccattcaccaacgcagactaaaagtgctctccgaaccgtgctggatagtcacccatcacacggctctcaaacccaacctgtggtgaatcccgggggacaaagtcaaagcgcttgatcctttgccccatactttgagatgctcctccccgccgatcaagcagcgacgctgctcgtgataggcttagctttaagccgctatcgttcggttcgaataagtcaagtcccttcggtcggttcgctcaggcggtcttcccttatcttccctaacgttcagagttgttctggtttgagaaaagagcaccggccgagcgccctgaatgaataagaaatggacagcagagggaatcgatgattcttattcaaccgagttgaagctagcaacatgtcgattacacaccggaggttggtaagaactgaggtctgcaagcctaacctaagtgggcctaccggcgaagcaactggtacttgatcgggcggtttggtttcgtgcaacgccctcgcagcaggaaggggctgttgtcatttgaaaggaaacgccccttgtatagggttccaaacctgcgcaccctgattaaaaagctctttctttgtactgctttttttttctttgaaaaaaaaaataaagaaggggttcgatttaggctccttcccttccactgcatagctgcgctagcaggtactacgagccctctgtcccgcgcatctaaccagctcgcgtggttcaccggttccaccgaaaactctcatttgttgaagcggagcatagtgcgctttaggcgccgagcgagaaaggtctcttctttctattcggtttattcactgatctgattagcacttgttttcttattgattccaggggcggcggcgttcttgaatgaagtctatccgaaccgaattagcacttctcagatcaggctaggcctctccagctgagctgggcgccggggccctggatgcgctagcgatcggcacataggggagtggttgcccgggtttctcggcctggtatcctgcacctcgcgttcatgatatctacattcaactgtgccccggagacacggtcgaaacacgcccgcccagtgtgcttctttcacgacatgctctggtcccgggtgtcttccagtggtcttctagcgttagaagaagtcgtgtccgtcccggacatctgcaacgtcctcccacgctttttttttaatataggacaaactgaaggaaaagactgacccattcggtgactttcgcggtcgccctcactgaaccgacttgaatctgaactacgattcagatcaagtcttaccgaaatcggatttccttttcgtgccatatgcgcttagactttactttttccccctttttcttcccggtccaatatttgttctcgaaagtcttcgtttccgtgtagaagcaaactctccaaatttatgaccaaccttttcttcagtgatcttacaacgaacaggagtttttccattgtaaattcgtacggagcaatcaacgaattccggcaaaatagaagatctacgtgaccaaattttcctgttcaaaagaagatctctcttcttcttcattctcaacaggaatgcatcaacaaaactgcctttccagatggatcgtcgtggcatgaactcatttcttcctttccccacccctgcccgaaatccagctttggtgggcttccctcaaggtgacaccgaaggtctacctcctttcgtgcgcccctcacctcctccatgaggatgatccactggattcattgcaacaccacgaacaatggggcgtctgcctaaccaccggctttgtccagcttttcgaagcttacgtgcaccatggttgggattggaaactataccaatagtagctcggcatcgggaatccatgagtttttcaacacccgaaggtagccgcccaagcctaagagagagtgtagggggccttcattattttagcaaaagttcctgcggcttgagccagctttgcgccttgacctggatgacattcaatatcatgtacccatgttcctatacgtatataggctaatggtatgctatttcctatttgaaaatttagaaaaagtatctcgtatctataagcaagggggcgcggccaagaagcagccagctgacttcccccttccactcggcctttcttcgctgtggcgaatttagtatgtatgggcattctgggcgggtcgcaataagtcgctggtcgaaggtttagaccaattgcaattcatcaccatcttgcccgcttccaattgatgactggctattatataagtgttgacctaagcccctgtgctggggctcggctcccgaaccgtacgtgagttgcctcgtacggctcttcctaagaacttgaagccccctctctcataaggaagcaaacgaaattttaaaatgcatttacaagaaaaaaaatactttttcaaaaagccttcgccctccgattcaacggggctattagagaagcagcttcgttccttgacttctttgctcagtcaagcttccttgttccttagtgtagtctcggtccatagtttaagactccgttccttatagcctagtctatatccacagctgacgtgactccgtaccgacgcctttccctttgtagacggctaagttacttcgtaaccttaaacgtactttctttcttactatatcataggccttcgtcgggctttcgtcctttcgcctataggcggcttcgctatcgctcatgacttggtatagagtccgtgtagtcgtcggccttcccaccagaaggcctatgatatagtggtcggcctttcgaatgcctccttccttttctgagaagccctttacgactataaaggacagagggctggctgttcacctttggaaacttagctacttaagtactactcaatactaaagaacggcattctgttgtacagctacttaatagtgcaacaactgtcgtactactaaagtaccaaggaaaccttcggttccctttgtttgaataaacgccgcctattttagtttccattcattacaaagtaaaccaagcctaaccggtcacgacatcttgtttgttgatatttattgaggagtttgatggagtttcgctgactgaatccataaacctagaaagtaaacgtcactggtacttttttgtactctataggtgggtataggtattggtggagcttgcgtaatgtagttgtagttaaggctgcattgaagtagcgcttttttttgaagatctactgaagtaccaaaggcgaacggggctcccaggccaggacgtctggcagaatgcttggcctcctgcgctggaagcgacacccgaagggtgagcttctggcggttagcttctagaactagataagataataggcattaggcattctgagctggaaggaggcaagcaaatgaagggagggccgactacaagaagcaaagcttcgtagactcgacaagtcgcttatagaatgccgactactaagtgaagactttccacttcatttaataagggaagggggaggtaagcttcgcttagcgagctttataaggccgaccactacataagccgctctggcggagaaagctcgaagagctccctttcattcgttgctaagtcaaggtcccaggtctccgagtcagcccgcgctttttcgaagaatcccgcacccatgggcatacggcctggcaggccttccctttccgccggagcttcatgggcgttgccccgttccccaatcagatgtttggatgtgagctatactccgcgaggagccaaacgggcgtatggccttgccttgccatttgacctctcttcccgtgtgactagaaatgctcagtgacaacctctcaattgtcaccgcctggcctctcttgctaccacggtagcacctagtgtggtcagcaccaatcgtgttcgggcaacgaagcttacactcattcacattggttcatcctgctatgccccgggccttttgctcttctaacgtaaaaaaaaggtggccggccattcgtcaaggcccaggaatccgctggacatctcagcggcgggattggatacccgcatccgatcgaagttccattttagtgccccctaaaagaaaggagagctgtttctaggtgggtcgcttcgcgcaagacattgcttaggaccaacgggtcacacgacaggtgcacgatctactttgcacgctccatccttcggcccttcgcctatcggcttggcaggcaagctaccttgatccgtctttggcttcgattcgttatgctcagcagctccaacaagccctaaagtctcttgccgcctaaaactctgccaagaaagcgctgctttacgtttgatcctatgtgcccagagaatgctatgcgttctccactttcggacctcgcaaagagagaacgtgttttttcctatgagtttctctctcattcgcggagcgaggaaagcgggctttgccccagctaccgctatccttgggaaaccaaaagagctatcgaaggaaagggatgctgtctctccaaaggcctttggagaggagaaggcagagaagaaaacgtcattcgcgcaagtttttttgcttcctgcgcacttactagtaaaggggctcttcaaccaaggaggcattctggtaggaaggccaaccactacataagccgccatcagtccaggagagaagcaagctacctttctttgatccaccttcccgggcagggaagagaacgaaaataggccgcggatggtggtcgtggtaggttcgaggatcttacgcggcggagcgaactcctctatcgtgttgcatttcctctggcggcgtagctgtagctgcacaccctcaatccatcgtactggagcgatccgagaagaacgattagggtcatattctatcctttctacaatgcccatagacgaagtgcttcgtttcagatcaattcttcgctgcaatcgcttcgatccaccccctcggtgaaaaaccgtaatacgccctgaggaattcctaccagcagacttccctgtactcaaagtgaattgtctaagtgctctctcctcttggctttgtctcattttatatctcgtaatcattcgattccgtccgaattagctcctactcctactccttcttctccttcatcgtcgttggtccttttgacataacattctcggccgcctccggtccggtaggaaagaaacctgtagccagtgactagctccgctatggagctacgtgtacaccgccacctcgagactct

SEQ ID NO: 14106 - DNA, 7048 bp, Cannabis sativa
ttttaatacctttcttttatttgaaatactaatttgacatatgaaattaggaagatcttttaagaatgaaaaaaatggcctcttcattgattggagaacatatgatatgggtggtgtttgttggttacttattttaatggcagcaaggatgaggacaagaaaggtctattcttcaattgttttcttatttactactatacccctcatttaatgtgattactatcactcaaactaaaatatttaaagactgccaaacactactcaaagagatgtgatattgtagtcccaaaaatattttaaatatataatcacgttaaatatatttataatgacaactaagaataatagatttaatagcagatctttatgtattgataatactaaaaaaaattgacaaaacagatcacataaatttaattgtgataaaaaaggaacaatttgttttggggaatacagtaagattgtaaataatatacaatagctaattcagtcaatactattccaaaacagaaaacaaaaaatcagtcaaccaaattggaagttaaaaagggcagttatgtcattctatgtttaactgaaacggttggaatcgtcaattaaccatcgcaaatcttcggtgtgattcaccctaaaataaccaaggcatttgttgttccacaatggcaaagttcttttaggcattttattttctagcttttgttttcaaattaactcgaaatcaaacacagaggtctaattctagccctagctaattctgttttaatcattgatttctttggttgtggcagttggtactcgttgcgtgcattaattttgacccatttatcaaaggtacgtgcactcgtgtgtttttcttaagatctcatcttccatttgaatatttatttattaatgatgggaatggaatgattgtattcattgatcaattgatttgtatttatgatggaataaattgttcaactaattatgctattaaaaccattctcttatgtgtatttgcgtgtgattattagatatgagatacatgttaatcttatcaacgtgattttgaatccatataaatctagaaatgttgaatcaaacttgaggcaatatacgtaaacagcttcgtttgaagatgtgatcatatccccattttgaataatgatgtgtatgttgcttttcatatctcaaatataggtggtgacattctaaacattgaagaagaagaataacaacaacaatgtctaatcttcgcataaaatttagtgaaaaggtctcaagttctccaagaacggaggtgggagagattgacacaagggctccatttcaatcagtaaaagctgctgttaatttgtttggcgtagtagcttccccaaaaggaagacctgtcatcaagagaagagcttcttcagaggtatgtattttatttgcaacaacttggattaatttctccttttgggaagaaaaaaaaaaacaatgtcaaaataatatgctgacatttttattcaataacacaacagaatgttctgcacaaggaaacagaacttgtcttagctcagagagaacttaacaagataaaggaaaatcttgaaaaggtcgaaaccacaaaatctcgagcaatttcagagcttgaaagggctaagaagacattatatgagttgaccacaaagctcaatgcagtgaaggattccaagcaaacagcaaatgcagccgcagaagttgttaaggaacgagccaagaagcttgaggtcgaaaaatcaaagaaactgattggaaccgaagcttggaaaacggaactagaccaaatcagaaaggaatacgcatctactgttattgaacttgatgcaactaagcaagaactgaacatgatccgccaagattttgatgcagctttggaagctaaactagctgcatttcaacaggcaggagaagctcagcgtttagccaaggtgaattctgagaaggctgtagagttttcaaggcaaatcgctgagatgcgagcatcagctggtcaattcaagctcgcttttatacaagctcaagaagagcaatcaaagctcatccaagaacgagaggctagtttacagtcttatataatagctaaagaagaagcaaaggaaaaattggagtccttaaagaaagaagttaatattgtacagaatcaagaggccagagatctcgaggtaaagcttgatgaaacaaatgctgagattgaagtcttgcaagaggagatgagaaagtctcatgttgtcgaaatggataatgttagaattgtaactatggagctcaacgaagcaacaacaacactacaaaaagcttctgaagaagagagctctcttaaaagcttagtgaactcgctaaagctagagttggagaatgtgaaaaaggaaatggagacagaatctctatttgccaattatgatgttgaaatactgaacaaaaaacaaaaggaaatagaactctctgatgaactcagcttcaaactaaaaaatctattagaagaaactaatagtgcaaggcaagaagaagaagaaatgaagaataaagccaacaagatgaagcaagaggcagacaagtttcaaggagtggcacaggaagcggagaaaacgctagagctgactttgattgaagctgagaaagtgaaagaagcagagcaaaaggtacttgatgcggttaaggttgttaatgcagaaagcaatgctaagataaaactgtccttagagaagtttcagtcttttactaaaaaagttcaggagttccaaaacatggccgatgcaaaagaggcagagaacgaggcccaggtgggagaaatcaagcagagaaaaatggaagctgaaagaaaggtagaagctaatttgaaagcaattgaggaaatcaagattgcaactgatatggctttgaggaaagcagagatggcagattcagcaaaaactgtggttgaaggtgaacttcataaatggcgtcaacagcaagaacaaaggaatggcagctaagaagctcatacaacagagactttgttatcgtttggtctcatctcagcttataaagatttaaaagataggggtgaaattgatcattgcatggactgcatggcaaacacgccatataaactgaatcaagaaaaccagacaacccctttggtaagactcatttagagctttgctcatcattgttttattaagaaatttgagataattgacaagctagaaagatttttttgctttcacatgatttgttgaaggctggacaagtgtactagctaaaatatcaatgcattaaatttaatgggaaatatatatataatatgtgcaattactatttaactaaaaactgtggaagcaaaagatggtgttctctgcagctgccgctccacttgatcatgttaagcataactatgaactatttatccagctaacatgtcaagttacgtagattacactaataatttcttttccctgcttaaactctcgtagataatgtgagacattactattacacacgatttatattgtatagctgcaactaaccgggctacgaagaccaaacttctttcacagtcctctcaggttgagatagtaatagggtagaagaaacacctccatggtaggctacacacgcattcagctccatcatttcaagcaccatttattcttagtccattgagagaatcagatagaccatttgcacaatttttctttccgatcttgttaaactcggattctaatgtttttacaatctctgttccttctggagctggctcaggtagatccacatgaaaagaaccctgtttaattggttcagtaggttcgttgttcacagattgctgcttaatgtagttgtagagttgttggtgaaagggatgatcaaaggaaaaacaattttcagccccatcatctgaatgtcgagatgatcccgaaccttcttttctacagaaatgtggtagggatgcataatccataatctatagcaaacacagccaacaatagatagtcagtaatcagttccaatcctcaacaattgtttccatgttttccttgtttgatttgagcatgttactcatgtctgggggaatagaacacttgattcccaagggacttaaggaactacaaagagaactaaataataacaaccagaaacagtaatagtaataataccatacctttaacagctcatctctcccactgcctgataacacctgtacttttttccttgtcctttcctgcaaaagaggcttgacaacctgaaaagtgcaaagagttaaggtaacacttgcaatgtaacaaataacgtataacgaatcgttattatactaggggaaaagagtagcgagaaacagctcatctcacaaatgcgtttaaaaaaaagtccacaaaaagagaagagaaggcgtgggagaagcaaagggtttgaccgaaggttaagtcacaataatcatattaatgtaaaggcttaccttccaacaggctgaaaatatatatggaacatttacaatgtagtaggtgtttgtcttctctggataattcaagtcatcaatggttgatatgattgtcaataactgtgtgagaatattacaaaattagtacaaaaaatccacagagagttcctttcacattacaggttgggatactaattagttcataggtatagattcccaaattttaggataaatcattactcgaatcccacacaagaatttcgaaattatacaaaacaaaagtcacaacttcctttccaataaaattcacttgatgtttatctctcaactaattggaacattttctttttccacttattttataaatttaatccaaacataaaacatagacagtttacataaaaatgaaacagtatgcgtaagttgtttatcatagatagtacattgaatatatcatttagctaaaactatcatgcacaaataaaaatttaattatgatagttgatgtaatagtgcaataccttaatttgacttagtgctgaaagcttcagtccggtcatatctaaaaccttcacacaggtggtgataggctttccgtactttttcgaagcaccaggctacagcaagaaataatagtcaatacagatactcataaatcattcaacataaaatagttttacttctaatacccaccaagattacacggtctctgtattcattaatttgaatgtgtgactgcacatagtagtggacctgcaaggaaaaataaatttccatgattatgctaacaacataatagaaaagctaaagggcccccggataaaagaaaagtgccaaaatacttacagacgctctatcaaatgtactgaggcccacaccaatagcaaagactggcaagccctgaaaaggataaaaggtaagacaaaggcattacaaaatgttcaccaaaataatcttatgaatagatgtacaataacaatgattcagtgcaactgcaagcgttcaacgcgtgcaaaacatgttgaagttttgaaattgtcaacccttgttttatttacgaaatagattttatcacagtataaggttttacaaggaatgagcacctctctcgagtaacctgaaagtcctatcagctgtgaatcacgtactcctctatacaattcagcaggaactatgggtttctgcacaaacaaataacacaatagatgtaacaattcacaaaccatcagcaggtaatggtaatttcgcaagaaatagcaaacataaaaatgcaaattagaaaacaggatgaatgtttgcattgtgagacgagtaatgtattgatggcccttttttatccgttcaaagatttattcatgaattaggcaacatcagcaccacttgctattcctagcctcctaggcattcagttgctttccctaagcataaacttttcttagtgaatttgacatcacacaacagttaatatttcaaataaggaatttcactgacaataggtactcagagaaattttagtgcaaatcaaaaacttaccgctaatatgttgtcaatctcattttgtaccctccaatttaaactgtccatcaactggacatcatagaagcattatcagaacacgatacaagggatatcaacgaaaagaacaaacataaatatcccaatcttcaaaactattacaatcaaaggagctgcatctaaccattttgtgggctttggaaacattccaatctcttgcttttagaaaacgcttcaaagtttcagccagatgtccttgatgaacattctgagaaagccatgaaaaaactgtcaaggaattatccatatattatagcatcaccaaagcatgcagccaacatcaaataaacaacggtttccttgtatctcacactaaaataataaagggataatgaataatataaatatataatgcaatggctactgtcctttcggcccttaatactagcatacataataaatgtccatgttctcaatcagacagtatagtaacaatgtgcacccgttttttaaatacattttctactattttccctccaatcttggcacacatccaaatagtattattaaggcaataactaagtattcaaacacttcaagttgagtctgactcaggaataataaagatcccttctcaacctagtgctagtacattcatcttctaccaactttaagccacaacactcggtttaaggtgtactagaaggaaattttatctaagatcatcttaactaaatcagtgatggacatgaaattcatgaatcctctaattccttatgtgagaaaaaagattttagaaattatttgtataattagtgagcatgaaaaacggttgaattggatttgtattttgtagtgccaataattaaattaattttaactaattataatataaaatgaaataacggttgaattggagttgtatggtgaatcagatcaaaacccaggaaaccgataacgacggggtcaactcaaacgtctcagatcaacgggcctgatttggctaggcaaggctcaaagtcatcaccacacatttcttatcaaaaccaaaaaagtcaccgcttcacattttgccatacaacattttccatcggtattaaaaaaaaaaaaaaaaaa

SEQ ID NO: 14107 - DNA, 4625 bp, Cannabis sativa
  modified_base (26)..(30): a, c, t, g, unknown or other
gtatttttgtaattttttttcctttnnnnnatttttctgtttttttccctttttttttctactctatatatatatagtaatagtaacaccaatagataattaatagtttttaaagaaattgatataaatatatataaatgtatacacatataattggatagaagttgtccgttaataatgaattatggaataatttgctgtataaatgtttaaatttaatttttaattataaaaaaataatatttaagtttaattaattaataattagttcaagttattaaatttttattttttaaaaaaataatttaaatataccaatataacttaagtataattactataaaaaaaaattcttaccacaaatatttataccataaaaaaaaagtataattaccataaaaaattaaacgaaagttaaaattaaatatttataccgtaaattactcttaattttattgtaaagtatcatttatcatctagtttagtctaaaaccgattgaattcaattgtcattcaatataaaatcttcataataatggacagtactaattactagaatttggatgatggccacaccaacatgcatgtggtagtcttgggatggtaggcaagtaagtgtacagtacagactcctgtatttctatcttcttaattataagttataacatataaaatttcacacaacaagctgcaagcacaaataaatatatatattcctatgtatctatatataatattagtaataattctcggacgttttttatcatcatatacgtattcaaatcagtttgctaagatcatgataggttatgattcatatatataatatacgagatgttaatatattagacaacaattcatagccatatgttttacttttcttttttatcatttatgaataaatatagtatttataaggctaaaaaaatgagcaccataaactacgctatcttttttcacattttttcaatctatactagttagaaatatatgtgtgttgcttagtttgctctgctcttgtgtgtacagcttgtagttggtattccttcattaaagagaatctttttcttcttgattgaaaaaaaaaaattattaattgtttttttttgttacatatggttacggccggtaaaaaataattcaggctataaatttaaatataaattaattgtataatatatagggttttttattgcgggtatacgtatatatatacggtacgtacatatttagtttcaattacacaaaaataagttactctccaatgatactcccatgcatatagaaaaataagatctgaatattaattatacagatcaaccgacgtctatatagattttttttttgttacaaatttcagaaaaattgttatgatttaatccaatttatatggctcatccttcacctaattactgatcactccacttatccaaacgagttttcgccttttcaacctgcaaaattagttagatattattcagagtatgatcaacaatgagctatagatccctcttttattatttttttatttgacaaacattacacgtgtttttatctaatttaaaaattgagtatatatattattaagagtatcgttgttattgggcaccacacgtgttggctaatgataattagttagtattttttaaaaattattatataatcagatttgatacttaattgaactaaagggtttttagcctttctctataagtaattaaccaagaaaaaaaaaacttcgacccatcgtacgtataatccttttcattaataatcatttccacatatagtgatctgatcaagtatatatacttttattagttattttaataacgttaataattaattgatagagttgatcatcaagctccctttaatagtaagtttaaagttacaatataagtgttaaaacttggaaaaatacctctttattccagtcagtccgaaatgttacccataataatataatagtctgtataagagtgccgcatatcatccctgtccaaattccctaattaaataaaaaagattaaggtattaatatattgttgtatagttaatttacacacatgcataattaatatttatttaatgaattaattattattaccttagctccgagattgaatgtgaagccaagaagtgcacccaaaggaataccaataatatagtaacaacccacgtttacatacgccacgaaagcttgccatccgcacccaacagccacacctgtgtcattcaaacattttatcgaagttttttcatttttacactttaaaacaatttttttacatttttaccgaatccttattgcaactaacggaacaacctaaatcgcaaccaaaaatcgtataacaatctacataaaaactactggagaaaccactttaaaaatctaaaccgtaaatttaaaaaacaataaaaaaataatatataaagtaatttccttttattaaaaacaatttcagaagaacgtactgtagtaattactattaatggtacctaacaacatatatattgacaacattattgtacatagttgaaatgatttggaacagtactatatatacaatattaaatgtgagaaatttatggcattattaatttatgcatgggcgtagcatatagtcactggtgagccagcccaatattttaattactggggacacattttttttaagatattaataaaaaatatatttttattgaaaaaatataaattttataaggatacaaataaaaaaaaatacataaattttataaaaatatgtaagaagatatatagaagaaaaaatatatttttatgggattttaatataaaataccaaaaaattcacatgcaaaattagtattataaaaagttgtggatatataccctcttctctccgccactgtatattatatagtgttaaactaacgttcaactatatatgtgtttggtgttgttttttgtacatgttggttggtttgtcttattatatataaaatattaaatgatacacgaaaagtacgtagtagaagtactaaacatacatactgttgactgttttttgtgaactatttaattgtaaatttaaacaaaggcgtacatagatgatgatgtggcatcatataatacatatatatgagtcatatatatatatgacaaatatttgacaataatctgaaacaaataatacaggaaaatgtattgatgttcttaaaagtagaatactttcttgcaaaaagaaaagaaaaaaaaaagaatattgatatatttcatgagtttaggtcttgattggttaacctgttaattactaatttcaccccctcatgaatgaaaactccatattactgaaatgtttgtcattatactaattacttccattagcggcatgacatgtgaaataacaaatccatacaacacaaaattaatgatatatgttaaaatatacaatcacatcaatatgactagattacctttaaatcgattttaataatatttaattgtacattaattaattatgttggattggatacatggttgtgtcatgcatgcatgtgtttgtcactgttttgcctttttcatatattttttaattatataatatataactatttatcattatcatggataattaaaaaaatgatgtagtggagtggaatagagagtaattaaaaaaaaaaaaaatgtgtttattttgttaccggataagacaggttgaatgccattgaggataatagagacagccaaaaaaggagcaaggtctgagacagcattagcgacagtgacaccatcggtgaatgcgtaactgatgacgtggcgcaatacaagcacaaggatggcaaacactaatgagatgagaaatgagcttaatgttactatcaccactgcgaatgatgctgattttggatgacctgctcctatttcattccccactcgtacactgcatacatatatatatgtaaaatatgtaattttaatttatatataatcatgcctttaattatcacgagccaccaataattatcaaaaataatatgatcaatgaatatttatatatgcatagtggtctcaaaaaatatgtgtacgtccaccaatattctatttgcattgttagtatatatatgtacgtagccgtaggttaagatattcacatttcacatcaacaattattaatgattttttttttcttttttcaaagaaaattcacattaaattttaaaaaaatccattattaaaatatataagttgaaaagtaaagatgtttgtcatttaatggtttgttaaaagggatagaataaatagttgtgatttgttttatgatagttttgcaatgtgtttagtgactagtagtgtagtatgatgatgatgatggtagtacagtgataacttaatagttggttgtgtatattgtacaaaatagtttagcttaaaaaaggattgtattaaaaagtaataaattttattggtagtttagatggatagctcctcaacccaagcttagtacttatagggaattaagttgatactacaagtttctattttttttttttgattattttaaattacaatttaactttttaagaatttttacaattttctagtttcttagttttataaatataggtgtcgtttggtaaca

SEQ ID NO: 14108 - DNA, 1900 bp, Cannabis sativa
ataataataattgcaggaaaggttagaggagattcctacgtcggctcagggtggttcttcccagagacccttttacgaccaaactaatgaccaattgcttcaacttcctggctctgagtttgaccgtccattcctgcaacctggcacccaggtttgaattttaaccctagcaatttgatttgttgttgttgttttaattttgagtttttactcactgcacaaggtattttgttcatattcagggatcggaatttattggggcttttcgctctggtgatcatgctaatcttgcagatgcctgggatgaggtacaagctcctcatcttactcctcaccacagagatattgaattccagcatatctatgaccgtggtgctgttcctcaccttcaaccaactatggaaggtaattcttttgcttttcatgtttgtttaaattatgagtgtgaatgaaatacccatgaggagaaaaaaatgaaattcacttgtttcgaacaaaaagtaaattgacaattatgtaagtaggattagtagagagtgcttaaattgtcatacctcattattctcacaaaattgaagcaaaggggtttgggtttggtcatgtttacatgtgtttctcctcctccttttgcagggccaccacaaagagtattgtcaagctttttgcactcatttgttgagagtggtcggggtggaatacctttccgtcctgctccgctccctactttaggattgtctcaaggagacaaacagtgtatccgtgatcgttccagcataatggccagacacatttttgctgataagggtgaagaatttattaatgcacaggtctgaaacttattcttcttcagttaaagctgataagttctttttccattttcttgggtttcgccatttttaacttcatcctcatctgtttgtattaaaccagttataagtgaacactaaactcattagtctgtctggtagttgtttggaatttgacaacatgttttaattttctttcatatttgtccaagctttttagctgccatctttacattcattgtttggaactgatatctgttggccccatttatttgcttctgattacacttgttccgttttatgtatcttttttctttttttctttcattagaaaggcatcgtgtcattttcttcctcacgactaactttgctcttgtaattttcaggtgaatgcccttttatcttctttagatatagacagcaatggtcaggttaaaggaccttttcctgctggaatacgagaactagagggttattggaatgagtcccaaggcatggcaaaaccaggtcttccaggtgcagatggatgggttactgaattcagccagaatcgtgcagaacttggtgatcctaatgcttgggcccactcctttgagcgacagcatggggccaatggatgggcctctgagtttgagcaggcaaggaagtgtattttttttgttttgaattcttttttcttttttgcctcatctttatccactttccctttgattgactctttatgtaatattgtttcaatctttcatatcagttgcattgatgtgcgtagtgcacaaattggttagctattgattgttgtgttgcactttcatccttttgaagaattataaaataggcatccgtatattgtgtttcattttttaattttgttcacaggagcaatctcagttgacgtcgatggatcatatgggaggggtaaatgttgcaaacttggctgctatggagcaaagtcgtatgcttgctaatacattagctcagaacaatgatcctaaatttcaggtttgtaaactatgttgcgcttgcactattgactttatggtccccttatctatattatgaagatgttcttctgcgtgcatttattgctttgaact

SEQ ID NO: 14109 - DNA, 6922 bp, Cannabis sativa
  modified_base (3699)..(3706): a, c, t, g, unknown or other
ctccccaatcaacctgatattacctaacatccgtctccttgccttgatcctcttctcttctctttcctcgtcagatattttttcctcgccctcctcatcagctttgttggcttcctcttgctctctttctcccctctcaaattcctcctggcacttattcagaagtaatctcttaaaagtaatcttctcatcatcttcactaaaatcaggcaactctccagaaaggtgagcacaaaagttggcatacatctcacagaaagtaggctccataagagctttgtcaaagatctgtgcaataacaccgcgaagtgtgccagcattatcaatattaacagcttttacttgctcaaacagtttttcaaaattctggggagttagcttgttcaatatacccttcaactgcctttgcttggcctgttcttcatctgtaaccttgcccacttcatacttcttctcagttttatgcattgtcactaactgagtttgtggagaaggaattaaacccctctgatggaaattggtggatcgctgccaccgttcagaatcaggactgtttctttgcattgccccctgaggccctaatgactgcataggaccagaaaggatccctccaattggtgcaaactgaacaggtgcctgtccacctcttggattcctcaaaacaccaaaattcgctacctgacctgttactggacgaaaaccagcattatgaacaaaacccatgtccaagcgcaaatcacgtccagccccataaggacttggcactttattccatcggtcatcctccataattccactgccacggcgttccagtcgaggtgcaccaggcctatcaacaattcttcctggactagaatgcgaattgcgctcaagatgagatgcgacattactcagtagcaaatctgatatatcagctgcaattttaaaatcctttggaacatcagtaaactggtcagcatattttaagagaaaatctctggaatacttttttactgtattcttgttttcatctttgtcaggctgtgcatgttcgccattatccacagtttccagctttggtttggaaatatcagcagcatcttcccagtcatcaggctcagatttagcccctgcatctttttcaacaagagcaacattttcagcaggttcatcaacagtaacctggttaaaatttgtgctgctagaagtgccttcagaatccacaacactttccttcttttcttcagggcccttgtacgcattataaagatcagatgttgtcccagcagcatctgccttctgaagtaactctttccgtttcttcttccctcttgcaatagtactctttgtcctactcaattctgaagtggacctatccttagaagctcctaaaactgaaacctcagcaccaacaaggttttccacacttcccgcacaaacactctccatacttccaccttcaggttttgcagactcaatagcctgagcttgggactgctccactccagaattttgtaaagaaacttcattactgatgctatcacctctactagaagtggtatcaacactagttgaaatctcagcagaactttcgacaacttcaacactaataccccctgatctatccatcaaaactccagaactttctaatggtgatatatcaatgcttttacaagtttcttctgggtccaattcctgcctaacttgtttagctgactccacaggcaaagttgtttctgctttttcttcctcaattataacagaacctgatttatcaacagcagtctccgtaccagaaatttcagctgaaatacttgaactgctttctataatctcggcctttgttacagaaggatcagtagtgtcaaccctaggagttaatagtgattcctcagttgcttctgaaacatcgttattattcaccagagaagtaagagtttgattagactcgataatttctgatgcaccactttccaatgatagattgcgttctgaagtctgagaaggcaagcttgacacagaaagagattgcccactaacctattatttaagagtaaatccatgccaagaaaatacaacagaccccaatttagaattataaaacaaatatatacataattcttgtgagtggaaaatagaagcgaaagagatacatatagagaaggaaagtggatcatataaataaaacaaatatctgacaactatacctggccctgagaaaatccttctctcaattctttcttctgctcatctttaattgaattcgacctgctaagagtttctttgctgctggagtcagccctttctacagcagtagtatcatgattaactgatgcagcatcgtcatccttgcattcaacagtgacagcagcaggcatagcagtagatgaatcagtcaccactgccacttttgatacaataacgtcactgccagattttggttgatgtaaagacctatctgtagaaatctcagaatttctaggagactgagaaatgctcacttcagctgacacccttaaaggtttgggcatttcagatttctcaactatggttgaattacttgatactgtctctaccagtaccttctctccaaaagatccagcactgggtttaactgtcacatgtgtcgttcctggtggcacggacgagattaaactgtgtgcatcacgtgtatgttctaggtttgatggttccgaaattccatgcatatgggtaccagatttattaacaggcagtgctgatggagtcataatcgttacactctggggagcctggcttcctggatagttaaatcttggtgcctgagaactaggtgggatttggccactagttggaaaataattataggaagatgagtaataattgatggtatgattatgggagcctggaaaaggttgaactggctgagattgaggtggaacattaggatgagacctcagaccagatgatccaccatctaaataaccatccgaacgtttgtcaaacctaacctcttcatgtgtctttgggttagtaatcttaacagtagttttacgaggagcactatatttccccccagactgaggagagtattgtggagcaatgatgcccatgttgctcaactgttgttgcatcggagccatttgagatgtgaaactcatgttctgtgcttgatgcatcattccctgatgttgcattgggtgtccttgtagaccaggtacaaacataggtggtgcctgcactggaggagcacttcccatttgtaatggcaaaggcaatggcatttgaagaggattggatggcacaacctgagattgaatctgttggttgggtccaccaaattgcatggaaacgtggggtggatggaatggagttggcatagaaatgccagtcattgaatgaccagacggcttgtgcgtttgacttgcaggaggtgctggagagacttgcacatcctttttaaccttgggcaatggatgcgcctcatacgtattgagttgatcaacagaaacatgatccttcctaggtaatggctgcttaggaacatttggagtaggcaatgaaggcccagctttaacagaattatgacgtacctgcaaaaatatatatctattataactacttagctaataagtagaaaataacaaagcaatatcatcggcaaaaactctactacaatgtgatccgtgtaaatatctgacttctgtgtgtgtgtgtgtgggagagagagagagagagagnnnnnnnnagagagagagagagagaattttggcaaaatgattagtttagtgacttggagtgggcagaacgcctaggagggtcctagggggagtgtgttgccaaccttaatcattcttttcttttaatttggggttaagaaaagagaataaaccaaaagaactttggtcaaaaaattcaagagacactacaatggaagacaaatttgaaggtaaaaaaaaaaaaccaacttaatctttacgcaatttaaatattgttccacgtggtgtgtgcaactgtgcaccgaactgaaaaagcttccttactttaaataaagactatatgaatgaaaagagagcaagcgaacctggtcacgtttctgctcatccaaatttggcggagcagagcttgtacgagcaggaacctacaaaaaaacaaaacagcgacaaaaccctcatgttctttaatctacaataataacaaaatttgtatagtgcagaacttaaatcttacaaactactggtacaaagattttagcaatacctgcattacattcaccaaaccagggcttaacgaaccaaattgaaacactacagcctttgatccatcatctggagctgcaccattagaaaacaaatcaataaaaactattctttttttatttattacaaaacaaattaataaaaactattcatttgcattcatcaaattctatgcatttttaagaatgtctctatccataagcttattcaataaaccagaaactaaatgaataccctcacacactacaccaccattaaaacacaataattaccttacccaaaccagtgtcatgacaaggaaaagagtcaaaaacaaccatcatatattgattcatcaaccttcaaactcaccttttgtcggggtagtggtggctgaactctcactgctcatggtggcatgttgtgaagtcggtaccttctgacctcgaaagtttctttgagatgccaaagtttcagcttgcttagcagctgataagttaaccggtgcatcaggtgctcctaaaacaataatcgatcctttcgattaaaaatatatacacatatatctagaaaaacaagagagccagaggacatatatatacatacacgcacacacatatatatacataccgtgtaatgggggctgtagatgggcaccattttgcactccacgaagtgttgcaacattactatcagaaggatttacattcggcacatttgccctaagttgcggcccttgtgcattgtgatacttcttactgaaaagaattcaaatttataccagaatccgaataagcaaccatcactcataataataataataataatagtaaaaaacgaaaaaacattgttgaaagaaatccaatttccaaaaacaacaaaagacaaaaaaaaaaaaacaatcagaatcagcaaaaccctaagaattgaagaaagaaaaaaaaaacggaacttttacccgcgatttattgacggtgaaggggcgggcccgccgcttcccctaccgtaagcgcctgagtgtccacgcaggtgagtggagctctggggtcgcccgggtttccgattatagttctcgctcttatcgggctttgtttgattgaaggacatatatcccaatccttgatttctcaattctttttccttcagattttctctgcaaccaaacacacgagacagatccacaatttcacaaatcaaaatcaacactttaagaatcaaaacaaaaacaaaaccatcatcatcatcaacaacaacaacaacaataaactcgtattcattatctcaaaacaaaatactcattagggttctttcattcgttcgattaaagagaactacagaaagaacaaaataaaaagagagagtgtaggtcaaaaaaaaacctggtgaagtgagagtaaacagaaagaaagaaagaacgatagaaaaattagggttttattatgcaaagctgaaaaatgcaggagagagaaggaaaattatgatttttggagagagaaagaggagagagagtgagagagaagggtattttgttgtggtaacaaactgaacagtaagatggtcaaaactaactataggttttcaaggagatcagaaatcgaataggtcttttatgcaagagattttttttttcaaatatatataatgttaataataacttattaggattagaattaataaaaaaaaccctttttaaatatgataaaagataagttttatttattgcaggcaataataataatagagtgactgttatatttaatttcaaattatttgtttaattaggattgttatgttagactttttcatttggaaaaaaagataaatatatttagtatttttcataaaagtattagaaataaataaatatataaaaaaaatacttatatatgacataataagggctttctagctatgtgtcactaaaccgaacttgctaaggaatctcaaagaaaaaaataatatatttaaatgtagagaaaatccaagaggaatcccactttgttaatgcatactctttacacgcgctactccacgcgccgccacatggttttggatggtggtggggttggggtttgagagagatggttaagcttattgtattttttctttctttaaacaaaaaactttattgtattttttttttagtaatttgttgtgtaaatagttaattttaactctcggttatagataaatactttagtttaacttttaacagtaataatatttaacttatatttctggaacttccgtagctacctaactgttaaatggtaagtcattatccacatatatatttaaataaagtaaaaatttaatgacttggactaatcaataattgacacgtggcaattcactttacacttagagcatattcaatggtaaaactttagaggatgcttagtgaggtggacatattatatgacaaaatattgagatgctataccattgaagagaaaaggatgtcattctagaaatttgcatggatgctatgttgtggtattgatgctattcattttttttataaaaaattgaagctaaaaaactattgtagctaaaaattaagatatatattaaataataatgtgtaagatcataattatagcacttttagagagtgatatacattggagtatttttagaagtaagagtgccaaaaatgatatggaagagaaataaaataaaatattatatttttagatgacgtgtaaatttttagcatccttaaa

SEQ ID NO: 14110 - DNA, 8338 bp, Cannabis sativa
aacaaacttgtaaaaaatcagtaaaatataattaaggatcgtaaacaacttccttacagaacacagtacactaaaaacatgtaaaaaatcaaagtagaaaaaaaaaggttgagataccgattgaaacgagacttgagagtgaagatgagcttagaaattttttgagcagagcaagaggtgtgggggactcgacgaccggggatggaggggtgaggtggagttgggcggcgtcggtttcaagcacaattggtagaggtgggaatgagcggttggggtcgagaaaggaagcttgggggctgtgcgtttttcgtggttcaggcgagacaaaacggggagggagatggtggtggtgacgtactaccgtggtgggtttctggtgcgagtttgtgccctggttaattttggggcttagatgcaaaatgccataatggagagagatttgagaaagacaagcaggcaaagagagagagagagagtcatgagagaataaaactattctgtttatttaatattaatatattatatataaataaacttacggtcgatttcggtttttttggtcagtttgtaactgaaatataaaccgaccgtttaatggcagttttaaccgttgacagttttttcagttttggtttcaatggtttcggttctagcggtgtttggcaggtcggtttgaacgactttctggatttcatgcttagccctaggggaggccagtgagaatgagttcaaaacattcaaactgttgggaaggccgttcttaatggcctcttcaaatgccttccttgtgcccttatcaaacaatagcactctagtcttgtcttgtttttaattattttctctttaaaaattacaagacttaatttctttcctttaccactttccccttgtcctctcttttctctctttccaactttgctgattaactttggtggggtacttactatgtagggaagtagcaacactttcacgtttgcagcatcaacatgtggttcgctactatcaggtgtggtttcttggttctttcattgctttgcttctgatttagtgttccattttttctattttttttcctttatatgaactgaaacatacattttctaagagagtaacattttgtagttgaaatttcattttttaaattttctttcggttgctgcgtatttgttcttttacattcacatctatatctttgtcataatttgaaatgatctaatatgtagctttatttgtataccacaaacatacagggtttaattgctattttcctcaaaatttgagtagtttgatgtaatacaaagtttattgttgtgaatgttcttcatgatggttctaataatggtatgaacttcctaggcatggtttgaaacagggatagttggttcttatggtgacaccactctggggtcaagaacgacagcaagctctagtttcagcttcaccaggacaagttcagcagatgcccttggacaggacaccaatcttgaatcaacttatctttatatacagatggaatattgtcctcggtaaaagcctttttcgttttttttaaataaaaattcaattttgtttggataattaggtaaaagctttcttgaatgtttccgtcatcattgaaggactctacggcaggtttttgattcgtataatcactttgacaaagagttagcatggcatttggtacgtcaaattgttgaaggattggcacacatacacgggcaaggaatcattcatcgagatttgacaccaaataatatattttttgatgctcgcaatgatattaaaattggggattttggtcttggtaagatatatgttcatggtaatttgacattgttttcttcattgagcacgagtttcagtggtatggttatgtcattgggtctctatacaccaatagcaaggatcatcatgtatcaaaatagtaattgtctcaaacttcagtttttgctgtataatcattacttgaaacccctaaattgttattaggcaccagtggtgtccaacatcaccacgaggtactgctttacaaatagttagcggttttctataataattattcaattaaaatgtgtgggatccgatacttaattataccaacaactgtatgacacttcgtggtggtgtcatgagtgccctttagcatctcacaaattaaaacgttgcttccagccaatggttctttttagaacttcatcaaggtatatgtttttgaatttttttttttctgtggaataagttcatttggaaatcttctattcacaggcaaaatgtttcttgactggttatcttagaaagataatactagttaatggtgtaaagaaaaaggcctcaccttgatatttcttacttatgatgtgtgatgcaaggaaggtaataagaagctagagagttttaatttctgaatcagtgaattgtagtgtgagcagagtatggtataaattgtaatgatactgtaagactgaaatggtgatttttatgaggaaatttgtggtgatgacaattccttgggtcatttggctggaaggaaacagccatagcttctctttgggcttcagtagtgaaataaaataacaatatcaggccttctttagtcactgatggctgtcaaaccactttgtttagaggtttttattttgaatatgttttttttttgtgaggtagtatatcattattttctgtcttcgaggataccttattctcccatgtcccgtaatgttaattttgattattacaacaagttttgtttgttgttgttgctgttattgtttttaaaacaacttaacgcagtacatgctactgaatttacttttctgggtattactttttacgaggccaaacaagaaccatttagagaccacattcacagttacactgcaggttgtgcaatttgatgaatagctcactgaaacctatcggtcctattattgatatcttagcttgtagattccttaaaggcttaagctattagtaggatgcaataatgtctgatactccccttatacgtatttatgtatctggccatccactagtaattcacttgctgtaaaatatatggagcacttatattggctgttagctaacaactatttatttctctccttgtagccaagtttttgaagtttgaacagttggatcaagatctgagttgtcctccagatgcaactggtgtgtctgttgatggtactggtcaagttggtacctatttttacactgcacctgaaattgagcaaggatggccaaagattgatgaaaaggtgaatgcttgtcttgaaagattcttttgttgaactccatttgtttggatgtgtgtttcttttgctccatatttgaatgttctataacagaacttttgagataaattgtttattcagaattggacttcactagtgtttgaataatttcaaattgcaggctgacatgtacagcttgggaatagttttctttgagctttggcacccatttggaactgcaatggaacgacatgttgtcctatctgatttgaaacagaaaggagaacttccatctgcatgggttgctgaatttccagaacaggcatctttgttgcgacgcttaatgtctttaagtccatctgaacgtccttctgctacagaactcctacatcatgcattccctccacgaatggaatccgagttgttagacagtaagtaaatataattttggttatcggagtcatttaagtgcttcattacaataaataagattggacaaagcaatcttaaaagtggacaatggaagaatacagcacataaaagagaaagagtatgatgatgaattccttaagtttcatttcctccaaaaaatatcaaagtgtgcaataactaataagcctataaaacctaggaaaggtgcttgacttgacttgatttgatatgtatatatatgtatctatattatatcattatgttgtgacaacattgtctattgtttgtatattctacgggcttctttctgagtagtgtttggagatatttgtttctagtttatggtttgaacaacctttttgtacaggtagagtttgtaagtgatggttatttctttttcgtcaaactggttttcatctcttccatcaatataaagaaaatgtatttattttctctgtttctttctttctttattattttattttaagtttatatttgtaggttattggtggcagttaatttcactgttctcataattaccggcctccttgaaatgttttgtgtgtgtgggtgtgattggattgaaatatttacgataaatatgatcaatagagttgattttctttttttgtattttatgtcatcagatattctacgtacaatgcaaacttcggaggactcaagtatatatgataaagttgtgaatgccatttttgatgaagacacattaagcataaaagacacacatcatcacactggtagatttaggttatcaggaggtggtccttcttccatccagtatgctgatttagatactgaggtccgtgactatgtcactgaaatcacaaaggatttctttcgaaaacattgtgcaaagcatttggaaataattcccatgcgcttgttggatgattgcccacagttcaataggttcagtgcttcataaattaccttgtaatcatgttaaatatttgtttctcttaatctttaataatcaaatggtatttctgtcataacatttatgatgattaggaacactgaaaactcttgagccatggagatctttaataatcaaatgctatttctgtcataacatttatgatgattaggaacactgtgaaactcttgagccatggaggagacatgcttgaactttgccacgagctgcgattgccttttgttagttggatcatctccaaccaggtgttgtactagcttaaattactgaagtctggaacttatctttctgttaaatttatcttctttgccatcaatttaaagtttgttactcatttcttggtttattgtgccttaacgttttcataggttttattatctagtaagagtgcaattattaaattggatgacatggaggcctgacatacaaaacgaatgaaaataatgtagacttacttgcacaagagagtattgattttttaatttacgaaaacttatatatacaaattacataaatatgtgataacacataagaaataaaggttcatcaataataagcataagtagaaaatgtagaaattattttgggtagacgagtttgacccattttacatgtatcaagattccacgttgttaatgtgacagatgttgaagtcctacttaacttgatgcgtgtgtcagttaaatctcaaaacccatagagccaaacttgaaatagtcactgttacctgatactaatgcttctgcagcttattgaccaataccttggctgctaatctctcctttagttatctcttttgaagttctacatatttttcctggtctattttttgtttcctctagagtagatgcttttttctcaatagtctgaaagtttctctgctgtttaacttgactgcacgttcactttctattttgtagaaattttcattcaaaagatatgaaatttcatgtgtatatagaagagcaattggacattcaccaccaaatcgctaccttcaggtatatgttataaaattattaagaatgctatttggttgaaactatatatgtccgctgatttgaaacttgctcttcataacagggtgattttgatattattggaggtgcatctgtgctgacagaggcagaaattatcaaggtactctatgcttctgttcattctagttttctcttggctgtatgcagaccgttgtggttttggatattctttatttcaactcactagaactgatggttgcagaactaggtatacttgtctaggggaattccaggagtaagtggtagtacatcaacgttttaatttgtaagactaagaccatactgatcctgttgtatggtttcggtttcatttttgtgtttgcttcatttagttttaataggataatcattagagaacactatgatgctcagatattgatgagaggccgagagggatagtagagtttaataatgtgatttacttattgcgtatgtcaagagttggagcaagtcaactttcagaacaataaggttgtaaaggatgctatagaaaaaaggtcaatggatcttgatagaatggaagggacaagcatgtggaaccaatccttggttgatgagagaaagagcattaaaaaggtttggcaggaaaaagttcttgaggaagaaagaagtgtctggctgaaatctaaatgcaaactcaaattctttttcataacttaaatgctaggaaggcaaaaaattccattactagaatagaaagagaagatagtactatccttgctcaagaagatggcatagttgacgaactaatctctgtttttacaaagctatatacctccaagaaaaaacaaggggtgggtattgaaggtattgaatggcaaagaattctagaatcccttgcaaggcaacttgaaagaccatttgatggagatgaagtcaagagggctctctttagttgccaaggcaataaagttccaaggccggatgaattttgcttggcagtcttgcaactaaattgggaggtaattaaggaggacctcttggaaatctttaaagcatttgaaaaaaatgctagaattcaaggaaggaagcatgagtgaaactttttatgcttgatttccaaaaaaatcaatagatgcaaggtcaaagactttatgccataataagtgtgtataagatcatagctaaagcacttgctatgagactgggaggggttttggaagttacaatttcagagacaaaatccgcttttgtagtagggaggcaaattttggactcggtattgatagctaatgagacagttgaaaatatagaagcaggagcaagagtggtatggtaatgagttcttggaactagttatgttaaaaaagggttttcgagaaacatggaggaaatggataagaggatgtctttcatctacatcattttcttatttgtcaatggaaaaccaagaggaaagtttcttgtaagcacggtgttcctctgccacaagtgaggctctcaatcttataacggggggatgtcattctatgataagtggcctctctctttttccaaaaaaaaaagaggaaagttcaaaggttcttggggacttagacaaggcgatccactcttgtctttcctctttacactagtgacggatattctgggtagaatggtggatatggcagtagtttcagggtctttatctggtttcattgttggaaaaaataaagttcaggttagctatttacaatttgcggatgatactattttttgtgaatgatgaggattcacttctgaagttcgtaagggtcattgaaggattctgcgccatatctggactaaaggtcaatttaaacaagagccaattattagggctttgcatagatgaaagggtgggtagttggccgatgaagtaccttagaaagaaagaagtttgggaacttgttttggataaatgtgcaaaaagacttgatgggtggcaaagctcattcttatcaagggggaatagatacacacttattcaattagttctctcttatcttccaatttattttctccttgttcaatgtacccactttagttatcaatacctttgagaagatgattagagatttcttttgggaaggtggagacgtagcaggtagtgatcacttaattgcttgggaaatggtgtgtagaccaagagatgagggtggcttaggcataggaagactgggtttgagaaataaaagcttgctgatgaaatggcttttgtgatttccccaagaacccgagtcgttgtggcataggatgattaagagttgttatgcttgggaaatagcgtgtagaccaatagatgagggcggcttaggcataggaagattgggtttgagaagtaaaagcttgctgatgaaatgacttttgtgatttcccatagaacctgagtctttgtggcatagggtgattaagagtcgttttggcaagacagacaatttgtggaatagtgtcgtgagttggaatttcaagttcagaaggaatttgttaaaaagggaaatgccaagtcttatcagtttgttacagcagttggagcatgttaaattggtgaatgtggacgttgacatcagactttggaaaccagtttctcgtggaattttttaaagtaaatcagcctttagttggtttacttctagccggagtcaaaattgacctctttggtctaaaactttatggaaaagtagagttccctcaaaggttaaagtctttgtttggtt

SEQ ID NO: 14111 - DNA, 13684 bp, Cannabis sativa
  modified_base (6225)..(6225): a, c, t, g, unknown or other
  modified_base (9485)..(9491): a, c, t, g, unknown or other
ataaataattataaaaatgtcagaaattagtgctaattgcctttactaatccaaattactaaagcggtcattacagagccgatccgacttacatttagtttgcttattgcaatgcctcactattctccttcagcgacatatggtttctcgttaatacactaagtgtcagttcgtacattgattcctcgcttaagaccttacagtcagcgggttacaaatatactctgatacttacgcaattaatgagttattccataaaaagatattgtaccgattcacattccctttaccttgacacgtgtgctccatccgaatttcgagtataacaacaagtatatagagtcaacgagttgcaagctcttaaaactactgcacaagatattgtcatcataaatttaaatactcataaatttaagttggtatttgtatttattgaacacggcagaacaacataactatgtgatgtttagtagttagttttgtatttaagacttagtgtaagaaaatatttattcattggtgcttgacttacaagaagctttatttatataacttttaaaaggttttctcacaattaatcagtattactagtggcaccagtcttatccgataatatctctttttagctttgcttgcagagaaatcttaatttttcaaagcattttcaaggcatataatgtaactggtattctctatctttattttttcatgtattatttaactcaacagtatgaagacacaatttccaccgttttcatttgatgttttgggttattgagatgttattattttctagtactgttaagatataatatgatatacaatggttaaatttatttcttagttgtagaaactctaggattgctttacacaaatcagtacttggatagagttactgcacaagttattgtcaccataaatttatgtacatgtagctctcccatgagcagcatttaacacatggttgaacaaaaacaaataaaagaaagcctagcatggtgacttgtaaatatatcaactgtttttaatattaacgcgtctctatcttagagctcacctttagaattgattttaaaggctttgactcatcgtcttctccattctcaaacgagttaaacttatcaaatgatctgcttctcttccttttcttcataattttgtgtatctcctcgactctgtcattgatactgaccattttcttgggaaccttcttttgttgtaatgctgcttttccttcttctgttatctcatccacaacacccgacttgaactcattcttcagctctttgtcaactttagtgccttgaatcgatgagagtttcttgtccgagtcttctgtattgttgttctctaacataagcctggcccttgaagttctacttttacctgaagttccttcaattatttggtcacttttaataccaaatttatcacaggtagcagcatcaaatggtgactgatggcccaaagtgacccttttaatggcttgtaaaactagactattcatcatgaagttgaaaattctgttgcatatgccatgaggttgggtttccttttcatccattttttgtgttctttttcgtaaaataatcatacggcatgttattcaaatgaaaattgaatgaatcaagataactttggataaatttggagcttacttggataccgctcttaataaagaagtaaattgaaacttgtaaggaacttctttctttctttgcaaaataaagatagcaaaaaaactaataaaggttcgtgagtcattgcttgatggaatgtagaatgaatcgcttggaggaatgggtacccaaaaaagttgttttttgaatgagaaatctgagtgaccaatagatgacataaaagaaagaagcatgaatgggagttcaacattctgcctcaggatagtttatgctgtccttagtagcccccataaatgttatatttctcattcgagtaaaaaaataaaaaaataaatatcaaataatataactaagtgaatgaatcataagaaagtttattattatctgcagcttacaaaattgggtacaaaactttatttgtcatcagcatgtcagaatagtttgcttagagcgatatccgaccgcaaagacgccaataagaacccggatgaaagagggatttctcaaatacccagatatctttaaccagaacctatggagattgataagaatcagtagtgagcacagaaggaacttagaattgaagtatcataaattttattatcaattggaaccaaactaaggatatctattgaggaggatattgttacaaatgagagtaaagcttagtcatgtataagaggatggcggaaattaacgaattatacctccttagatttatctccagaaactacattaccatttgaatcataagcttcaaacttctgtaaaaaaaaatgttgcagagttctcatgaactgaatttactaaaatataaaagcataacacaaagaatgaaacaatccaaccccagccagtttacctgctttgataaaaactcgagtgtaagctgtataaacaccttattggtgtcatttcgatcaacgccaatctataaaacaataataataaaacaaagttgaataaataaataaaagataagcataaaggctttaattaattttaagaaagttacacttcattcttttgtcctcttttgcataatatcctacaatgaaccaaccaagaacatgatagatagcagtaaccagactcgatgagaaactgatgtatcccaacttcactaatactaactggatagtcacaatgtattgaatgattttatttccctttattactatataggagaaaaatagctagcttttgataaatgataatagcaacaaacaatttattaaaaccattaaaacaagcagaaacacctccaatcctattcactcaccactcttaatctacagtgtaaacaggaaattaggactctctccaaccactacaattacaaattcttttctaatttttgaccatcaatataaaaaaatggcatggtatatatatacatattatttatttatttataagtgattttttctttaaatgcaaaagaaaaacttgccagtcgagctcgaagagttcggattttgacaataggttggatcagttcccagtagacctcgttccatatggattctctttgtttaatctcattcttcagtgtctgaaaagacggagaagtatgtctcagaaaaaggtgaagttaaaattacagaagtcattagtgtgctgattactgaaagaaatgaccacggtaaatgagataaacatcctaattttgaatggcagacactatattgaaagaaaaaaagaaaggagaaaagcataccgagtacatcctctctgtaactgcctttctaagtgcatttttgtctccatttgatattagagtattgatctggaaaattgtagataaaacaatataaagccattagctaaaaactcaacaaaactaaaaagagtcaaattaaaggaaagctaaaaaggtaataatcttgtattacatcatcaacaataattagaggccaacctcttacctaacaaacagcaatcctcatgtcaaaataatcatctcggcagtgaaattccagttcacaagattatgtttcttattatgatggatggtaggtgaaattgatttagagctaaatttaatttataaatcagaatatagttcattggcttcaagaaagtcctcatctatattatgcaattccattagtcatgttatggtccaaatatcagtacatgcaagttacatgtaagagaattataaacttcctgattagaaatagaaatgtttacaaaacttaataagactacacatttactaacgctaggtcaacctaagcatacacataacatacaaaacataacaaggcaaagaaaatataatgatagcaataatccaaacctctctgtataattctaccgcttctttgtagaatttctgcttcgagtatccagtttttcttaatttggcaatggcatatgcatttttcagctgaaaaatgaaaaacaggaacatcccatgtataaggacttcaagccgaatcaaagttggattttaacttatatgatcttcagtccacatgacacgttactaacgaatcccatacttggtcatatgggatcctaacgaatactttaataaacatcttaaaaagggtgcaggcattggaccaagcaaaaaggactaaaaagaataattagaaaatagaacaataatcttttatgtatgtataacacatatatacatgaactgtgaaaaaacatggctgtttgagtggcaagaaaaccccacaagaggaaaggaagaaggaaagtgaatatgccaacaacaataacgcccaaaaaacaattcaaaacagtttctacaatgctctaaaataacatcacctctaaaatcatatcatctttcgttcttttccaaccaggtcttgtaaaccatctgaacagaaaacatcaagagatcagataagagggctctattaggaaatgcagttgttatataagtaggaatgacgagctatctatagtatgatatacgccagatctatttttgcatagtagaaaatcaaaacataaatgaattcaatgaaattttaatagtacaatcacatctccaaaataatacaatttattcttcttaaaaaaattaacatcaaagaaactaagcacttttgcctccattaccttgttataaccacaatatactgaaacgaagatcaataaaaaagcattatccccaaaagggccaaaaccactctaactcacttaaaagataactaacctccgccaaaaagagattgcttcacgaggaccatatggctcgtaaacaaacccaggactgaacatggctactttaagtccctgcaaagataacagcatatgcatgtatgatgcaattgttactgtaaaatattccagactgcatacatattcacaaagtgaaaatcccaaaccacacttgtgcgtggatttttctttcacaaatgggatccgtagtgaatgattgattaaatttattcaaataaacaaaaaaaaaaaaattaagcaggataagattaagcagaagtgttccacgattaaaaattaggtatagacatcacaccgattttcgtccttgtgtaggagcagtttttgcttgcgttgctaccaacctagtgtcgttccaaaaaaatgctaactcagcagcctaaaacaaaaccaaaaacgatgctaaatattttgcagcactgaaacataaattaataaagattcgaaggcagttcaacatcaatatccaattaattgtataaatttcttattttccaaactaaccattgtggatcgaagtgtcattgcgcttcgatatgtccatggaagtgcattctggcccttgaatgaggatgaagacaaatttctgcaattaatttccgcgacgatttctgcagtaaacaattacttttttttttcttaattgatatcaacccatgaatacatacaaaaatgagaagatacttcattaatggtctcagatagataagtaccatttgaaagaatacttgaatagcttgttgagcttccaagcctaacaattcaagcaaaaccacttcacaaacattaattccatatgttaagagaagcaaattacaacttaaattaaagttttatcataaaatcgttcctgagtggatgcccagacaaataagatgaatataaaaataagattcttttgagtttataattttacgagaaactaattaaattgattaaacaaaattatatatgtatataagctactcgaactgaaattctcgtactggttcttacatttgattttaggattagaaattatactcacatatatgaggattcccgaatcaatgccgaccgatacaaagtacgaaccgtctgtgagcttcgaaaagccatctctgatcacaaatcttcaaaaccaaaacttggtttattaacagtaacagatcaatgattgatgaagatggcgaagaggtttttgtttgaagggtttaaggaagaagcatcgtgtgacaaaaatgggcctcttacttagtgggcttcatccaagagttggcccaaatttaactttacaggccttgggctctgtatttttcaaactttaattgggagttttataaagggataattaaaggggaaatttacagaaatactgaaatttgggttaattttnacaaaaatactgtcatacggaaaagttgtcaaatatactgtgtttttataaaacactagtaaaacacaaaacagaacaacttaaaacaacagtagaacaactaaaaaacaccagtagaacatcagtgaaaacttaacacagtatactgcagtatgaaacatataaaaaaatacagtaaaaaagtaaaaaatactgcttaacagtatttttgtaaaaaaatgacaaaaattagtataccatgtaaaatttcctaattaaaggggttatttcacaaaaacataaaaattacaaaaatacgtgttcacggaattttaaacatttttacaatttttttgattttatttacagaaaatatagtctttttatgttgtaatcttattaatttgttgttgatattttgttatctgtatattttttttttttaaaggaaaacactttattcagcaaaaataaaagaactacaactggtcaggcttctctgcatttataaaggcagcagcacaagagggtaaaacctctgaccaaaaaaaattacatatgtgagtaatagcccacttaactaaagagtgagcaatattattacaatctctattaacaaatttgatacccacacacacccatctaaaagattagtagaaaaaattttcaacaaaggcaccccccaatctgcccgaggagctttctttgacagcagttgattaatagcggtaaggctattggagttgacaaaaaaaggtctaaccttcaatctctgcaccaggttcaatcccaccctgataggcaaacactcagccaataaaaccgaaacacagtcggtctgaaagagagcttctgcagctatcaaacggcccaaactatccttgataacagcagccactccacttccttgttgatctttagatatcgctgcatcacaattcagcatataggcgccggtcggaggagccaaccaactactaatccccttcgctttcttcacttctctgctgtcagtggccttctgcagcgcgttgtcaatgtaatcaagagcccaaggagtccagctttccaaaggagtactcttattttggaaaatttgttgattcctttggctccaaaccagccaactcaaacccaaaaatgtttcaaatttctgtttagagcagttttttcccataaacatgagaaagtccatcaggtccgacatcaagccaaggcctttaagaaagaggtgtcagaaccccgcatctctccaaacaaacttcagccgagggcagttccacaaagtgtgaccaatggtctcgtcatggctccagcatcccgaacaagtcctatctatcttgatgcctctcttcaccaattcactctttgtaggaacccagttatgacaaactctccaaacgaaattcttcattttcggagttaagttcaagtgccatacctccttcaaccatttcctcaaaattgttttgttagaagtctccgctccctgtttctcaacttgtgacaagatatacccactagcaaccgtgtaatccccatttacaatataatgccaaatgagttcatcttcgccacatcctctccgaatttgaatccccaaaatccaaggaatgtcgtctatatgcatcttctcctcaatagtctctaacttccattccctagtttcattaatgagagaatccacatatgtattaggaggaaccaaagcgggggttctgagaaggaatgtggctcctctaggaatccagcgatcctcatttattctaactttactaccatcagtcactcgccaccgcatccccttaaaaacaagctcacgtcccatagaatgcctctctaaacattagaacaccaagtaccaaggccagcctctaagaattctgagttcgaaaaatatagagcctttaacactgagcaaacaagctatccggatttgtaacaagttttgaaccttgcttcgcaagcagggcttgattaaagtcttccaaatttctgaaccccatacccccagaccatttatctctggataacttcttccaatcaccccaatggatttgatgtttagctgttgtagaaccccaccagaaccgagctataagagcttgaatctcacgaatcagaccgtttgttattctaaaacagctcatgatataaaccgtgatagcttggataactgatttgatcaacacctctcgtttctacccttggagtttttcccagaccttgtcataaatcaaaccgaaagcttccttcttgtttctaccaacaaaggcggggagtctgagatactttgtgtggttttctataaaagtaacccccagagaagcagcaagtctctgaccttccgtgcttttaatcttccgaccaacacataagttagatttgttaaagttaatgcactggcctgacaaagaggaataaatccgaagcacctccgcaagagctttcccttcctcaaccgctgcatccaaaaagattagactatcatcagcaaacagaaggtgtgtcaaccttctctcaagatgtccaaaacggagcccaagaattttgttggctcggcttgcttcattaagtaagcaggacaacccctctgagcaaataagaaacaagaacggagatagaggatccccttgcctcaaccctctctccggtatgatgtgaccccgagcctctccatttagcaaaactaagaaagtaatcgtcttcacacagcccattatcttaccaatccatcgctcatcatatcccagacacttcatcatcccttcaagaaaatcccattcaacacggtcatatgcttttgacatatccaatttaagggccatctttcttccattcccaaaccgacccttcttcaaacaatggagactttcaaaactaagaatggcattatcttgaatctgcctcccctttatgaatgcactctggttttcagatatcactttatccatgctcattttcatcctattagcaagacatttagagatcaccttatagactacattgcataaacttaagagcctgtagtctcccaccattgtctagtccttcactttggggataaggcatagtaatgtctcatttagatagctacagtccatattattattcaatacctctattaaatatttttacaaattttttttattttatttacagaaaatacaatctttttatgttacactcatgttaatttgttgttaaatttttgttatctgtatgttatttttttgttgttgttattttaatgctatttttatattattttttttttattnnnnnnntgttgtttttatgaaaaattataaaaatataaaaataaattcaatttaatctttttacgaaataaaattgtgccttaattatccgttaattattattattataaacaaagaattaagcagaataccggagaccgagaatgaattgaacgtggaggctccgcctaagatataaagaacagcaatttagccaataaaagcattcatctcagagtcatagtcaacagtcccgcgttttgagaccctaaccctaaatttcgaatctgaaaccctaaccccgaatttgaaatctcgaaaccctccttttcatccatggcaccgaagcgtccttcccatctggacgacccacccgttgcttcttcatcagaagccgaggaagattcttcgtccgaagaagaagaagaagaagaggaagaggaaggggcttccgaagaagacgaagagcaggaatcacagaaatcgaaaaccacgcctttaacgaaggctgttccgatttctaccgtcaggtcgtcggtgaagagaccgagcaatagcgaggttaaggactcgaagcgagcgaagaagaaaggttcggaaccagatggaggttccgcgattgcggaggatgaatcgaagaagactggtgacgagtcgaagaagctgtttcagaggttgtggagtgaggatgatgagatagtgattttgaagggtattagtgactacgctgctaagaaaggatcgatcccatctgcggctgacatgcatgcctttcaagatttcatcaagaagtcactgcagattgatttcacgaaggcccagttgtcagataagctccgtaggttgaagaaaaaatacgagaacaatgctagtaggaagaagtacaacccgacgaagcttcacgagaaggaagtgtttgaattgtcgaagaaaatttggggtggtggtgaaaagctcgttgtgaaagctgaacagcccaaggctaatggcactggcactgcgaggagtagcaaggcattagcttcaccgcagaatctttcctcgccgagtttggggccggcggaggatttgctttcctctcctaaattgggtgtaatggaggagctgctttcctctccgagcctgggcaattttggcttatcggagcatattttgagcaaggggcttgagttggtcccggagtcgaaaagagcagagttggatgccaagtggaagaaaatacatatggctgagatggagctttttgctaagaggagtcagttgcttgcagatcaaactactctaattctggaggcgttgaaaccagcggatcattaggtgaagaaagaccgatcagacctctatgtttattgatgaatatgtacttaggattaatgtgagatgttttttttttcctttatttgttgatgtcttgcagttaagttgacttttccttatttttcatgtcagaactctagaattctgcagtaaagttttcttgttagttcttgtttgtgacgaatttcaagtttgaaaataaatgtgtagcagtatccaaagttacttgcagtcaatctttataggcagataaaccagatggtattttaacatctgattaaggctttttagaaacttctaaatgcaagactatctttgatgaagttctactcattgtgcacagtttacatgctaccatgctttacttttagtttagtacatagcttttgtgtagtgaccacccctgctcctttttgtacatgaaaagaaaggcacgaatttagaaacatatatggttactttcggtttcaagaattctgatctgcagcatcagttggagaaccaggaacaaatggaacaaagccccgtccaccgaaaaccggcctcatgaatctgtcatcaaattttctccaaaagtagtgaactgttgtagttggatgtctgatcagaaggcttaagctacttcttttagggagttctgattgattgtttccctgctcagctgagttgtcattttcgataaacagaagctgatgtaaatcttccaggcttggaatttcagctgcatctgaagtagatggttttgaatgctgcaacattactgcctcaattagaggctttgttatagagccaaagacctggtttgagaggggaaggaagagtaaatttctcacgtggacgtccaaaaaacgatgtcaagaactaacaaataacagaagacataccaaaactaactcaaataacagaagacctaccacagtgctaaacaaaacgacgattattgtgctggtgatcattaatgcactatcaccagttgatttttccttagactctgcaaacttaaagtttggagggaaaaatatcagcatttggctatttcctacaaaattccttaggctgatgaaccttgagaaccattaacttacttggttgtaagacaaagcaatggttactgcacctctgattaggcctgcccaccatataatgaactaagaagcaaaaagttagctaattagggagtaattgtaaatgagaaccaaggatacaggcgccagcagttatacctgctctttgaattcaatttttgaaccatttcttcttcccacacagttttcaatatttgcaattggaaacacaaatgctgcccttcctatcaaaaccagtgtgaacaatattgcactaacagcaattgaagttcctgcactgaattaaagagtgtaatcagggtcaggcatggctacattttgttattacaacatcaagtatgcacaggacaatcatactggtataatctatgtgaaaaagcaatatgccattgtcgggtcatattaatagattcaattatatcaatacacagtttcaagtcatttaatgcaagttttacagatgaagaaaataaccttgcactgctgcttttccatttgttaatgtccaaagcatccataccaacataaaggaatatgaaggtttctgaaatgaaagaaattgttgcaaacgcatgcctgaaattttaaaaaaatgcagttgttcagtacagaaattatacttttctttgcaatttgaaaaaagagcagctttaaaaggctctttaaggaagtgtttaattgtgacagtttcttgaaaaatgaatagaacaagaactcgttcttacatagtagttattcttgagctttcagtaacattgtgccatgtataatgtgacatgactatgccgcagaaaaagactgccaaaatcccactgagacttaaaaactgcaagaaacatatttgtcaacttgaaattaacatgatgcaacacattcaaccttctctctactcaatgtgatgataacattgcaaaaggaaaaacagtttgaatgaatggccgaaattgattagcataaattaattgtttcgaaaatgattggaagttagctgagttatctacctctgccaccatgtatgacaaatacgccatgagcatcatgagtgcaacttcacgattagtagaatgtctgttgatcacgtaatgttacaggtcagtaaagtctcataatcgggagaagacagtttatgttaagagtttagtatactcgatccatcagggagatttaaaaaaatatggtttgcctaaatgtattgttaatgagtcacaaatgaacaacatattcttggaaatgctagtgaaacctgcttttatacctgccaaagtagagggtttttataatgtatgcactcacgagacctgcctgaaatataaaaaacagcaagttagcgaataaaaattcactcacagcatgcatccgtctcttttaatctcatctagccttagtgatttatcttgccaaaatgttcaatagaaaacttacagacacaccaagagcagtgctagtgaaaaagaggtaaaggaaagtccccaacaacttcaacactgtaccggcgtcaatgttactgaagtctagatcttgcacagagtagaaaagcacaatagaggtagcatcattcaccactccttcaccaaataccgtgctgtaaagaaagggtgtctggtcttgacttagaacctataacatgaaagtgataaatcagccatcaaagtagtttgtcaatattctgcaaaaacttttttactaaaaagatttgtaaaaacttatgcttggctatatgattatgtgattacctgaagtgtgcagactgaatctgttgcagacagtatggcaccaatagctgcgtttaaaagtaaaatcagtttttttttttttttt

SEQ ID NO: 14112 - DNA, 11801 bp, Cannabis sativa
  modified_base (57)..(60): a, c, t, g, unknown or other
  modified_base (453)..(453): a, c, t, g, unknown or other
taaatacttataaaagctataaattctatatttataatcagcgctcccactcaattnnnntatcatgttcccaagatgtaagtattacgccggccgagctttaacgaacaactctaagaacataaataatacatgtaaacagaacctaaccatatcaagattgagatctattgacctaagatcaactaattgatactgacttagatagatataacggtaagtttataatatcttatcaaagttcaatatcagtccagtccaatgtatactctatacatccaatcctaacatactttgttaatgtcatggaaaagacataacacttatccaaggtgcaggtatactttatcgctgattatcatatcagtctaaatccagtgtactaacaaatcatgagacataaacttttgaacatataatcataattatattctactgtgttgacaacactanaatcatgaataactatatgttttggacttaatagaatttaaatttattcattaaacatacaatcatgaaataaatcatgtaaaccatacaatataaaatgatttctgattttttatttattaataaatctaattatattgaaataaaggacataaaatcccaacaaaattaagatacaaaatgacataaaaagtcattatgattcatgataattagtaaattaaatataattttttaaaaattataacaatattgtaattaaaaaaatttattaaagtcattaatattaaatgataataatataaataaaaaaaatattaaatgtgtgtcaaatttgacacaatattatttatagtgctaaattactaaacttttagcatgtgaatgtgtcaaatttgtcactccattagagaagtattttttataaaaatatcaaaatatataacttgtataaagtgaactgaaaaccacttgaggttagctcaagtggctataggagggtgcgtgtgtgttggaagtcttggattcgagtcccaaattatatatgattgtaatatataaacgctcaaataaaaaaaaatgaactgaaaaaaggaaaaaacaaaaaataaaacaaaacaaaatacacaaggaataactcaaaaaaaaacatagagtatgctatgttaaaagaaaagttctctcttgttatttggagtttgggcatgctagagtcgaaatgtttaacttattatctaagagaggaaaaaaatcaggtagatatttcaagacctacgtaaaacaatcatacttatggtatgagacacaatatacatgcttgaaactggagcaaataacagatcaaaataaattatttagagttgaaattaatgcatggaggtttctacatacaacactatgctcttatcacttttcttcttttgggaaggtcaatcttgcttataaaccagtgttgggtattctggggaccacatattgttcttcacatactctacaatttcctcctgcaataattaaaaagaaaagaagcagttatcagataatgctacgcttgaaatctgcagttgggtttcctaatttggcaacacaataaactatagtggtctatctcatattctcatgttagcttacaacttagtgcactcgtgtcattaggttccttcttaagctttcaattagttttttttttcttttagaaggtcggccaaagcaagcgaaccctataagttaacacaaatggctcgtatggaacgtcgtattaagtcgtattgtattgtattatattgaattagattatatatcattttttatataatactatgctaaactttaatttatattaaaatattatagatttaggtgtctataaaaattaaaaccacatatagttttatataaaaatattacataaaatacaatacaatacgacttaatacgtcattccaaacgagcacattatgtcttgatagccatagagcatccaccaaaactagggtgagcgtggcatatttagccaactgacccttttaataatgctgataaaatcaatacttaagtctcttcatctctttcactgatatctatagtccttcatcgaaggtattgagggtgttcaaaaagtcatccgattcaatcaaaatcaacggatccaatcacaaccgatccaataaaattaaatattcaattataattagatcggattggatataaattttaaaaatccaatttgagcggatcagttgtcaaatggaacacccgatctaatgaacaacctaccgaactaatataattatcatccaattataattatatatatttttaaagaatatttattaattttattcttaattataatgtgtatatactaacacgtttatggattatgatggattaaatttgtattatattgtcatattttgagtatgtgatcataataactaagttagactaatgtttatatatatattgaatttgtgttttatcactgtagaaacaagtttaaattgtgcttattttatcttttctttttaatgaatttagcctaaataatagttaataagattgaatggatccgatttaattcaatagataaccaattaatgcatcaaatggttagaaccaatcctattcaatgtttccagttgatcagatcggatcggttaagtcaactcgattggatttgattagttgacaaaatctaacatccaataaataattagattgcatcggttgggtctagatcccaagaacactcatctttgtctaatttattttgtgatcactttatggctattacttgatcttcactccattcatgtattaacatctctccccctctgtaatctactctattgttcttttaggtgggtatttttcaggaatgttccgaacaatcccttagttccattacttaacgtacttgagttagtgtcggtggcattcaagtatgatcctaactttatatagtaaaactacaatttgtaaaaattgaccaaaattacaaacctgtgtaagtttactaagttcgcgtgcatccatttcacggtatccttcagctagatcctcttctatagcttcctttataacagctgcagctacttcttttgttatatcacgaatgctgcgaaaattcaaagaagtcaaaaattttactctaaatctaatgtgctacattcttggaaatgcatataatgagagaatggaagtctgtcgatatatgtaccttgatatagatgggtatataaccccatttagaacatcctcttccgacatatatgcagctaggctgtagacagaataaatgtcagaaaatatataagcaaattgaacaccttgtcagttgtcataaattgataataatgagaaatcagaaatatttattgtaaggaagttgcaaagatctcaaactaatcccattagattgatttttaattctttacattttaatctaatctaccaaaacttttagataaatcacagtctagaaaacgctctaaattctttttttttttttctatccaaatttctgatcctagggttgtaaaagtatgttcaagttgcagtcttgtaatgtacatccactaaaataacttcttaagggtatatggaaataccattcagccgctgcttgtagcatgccatcagagatgatcctggatccagacagaagagtaccaagcccaattctgcgtgttgaacaatatacatacataagattaaaactaaaacggtaacactttttatgttatctatcttcatcttttaaaaggcattagtggacaaaacttaccctggaaaaaggtacatgttgttaccctggttgcagtgaccaatatgaccatttcctgaaaaatagaatatagtcagtattttcacaaaaagcaaaattattccagaactgttttttactacagaagataaattaagctgattcataatagaaatttaatctcccagggaataagcccggtttctacttgactaaaagatgaagatatatattatttaatgtatgcaagcaagtacgtatgaccgcacacataagaaaagataataataaataattaggaaaaaaaatcaggattcctgttgggtttggaattcttgctgtatttcttcacagaaaaatggaatatacgtaaaaaacaaaagcaacttaaatttgtttaaatacatacccagatcgacatccttgaatggacttccacttgcaaatacaatattgtctcccacaatggagaatgcgtcgtcaggagtacattcagctaaatcaccaaaaaaaaaaagtgcaggtaaatctctggaaaaggctgtattcatacaattgtaggcatcacactcaaaggcgtaaaaataccgtttttagtaggatttgacatggcaaagatggcaggccttgttgaagttgaacctttaagtgcctctagtacctattgcataacatcaatttacaacaaaatatgagttagcataattctgacattctcccaaagaaaaacaagccatgaaatttgacaaatgatctcttgatcaaatgataatattgatgtatacccaaatggtgaaatcagatgaatgcaagataataaaggaaaagaaaaatctatctgttccataatttgctatcatgatttatgatttaactagtcttcatatgtttgctttttcttgagcttctcatatgctgtggcatacatgtaaaatcgtgaaaatttcatattgacattatccttaaagaatataggaaactaaaccatacctcttttgagaacaaacccccaactgcagataatccaagaagcacatcaggctttatttgtttcacctggttagttaagaatcaagattagcaagtggtgactgttaatgagaagacaaatcaagtactggacagttctaagaaaaaatcaaagacaggacggatcgtaaaatttgacagtactaggatcccttttaatatttctttggtgctggcatagctcacaaatctgaatacaatccaaggatgctaagagataacatcctcaaaaactttaaagattcaatagccaagcctaattttacaccagtattcttacattggtatgataattaatgcatttagtttcctttgaatggagttttccaaagttacaacttctcacgcctaaagaagctgcagtaatcccctatgtgtatattttggtccaaacctccaagaagaattctcaattctttgttctcttagtagtttgaacattgggagttgaagtgaaacaaatttctcagtcttattttcaaagttttattgtactcacaaacattttaagctataaagagtcgtttagaaaaccccaaacaaaggtgaaaagctaacataccacttctgcaagacttgcaccttcctttaacccctggcgatgaatttctttgatcttccttgcaaaaggaagcgcatcaggatcaacattttcacgttcatctgtgatcaggccctggaaacacaaaacagcaaatataattatctccttttcactaatagaatttgtgatttgaagcaccatctttagaaactgcagttaatgataattctagagagttggaaattatactcacattggcatcaactacccagaactgtctcagagcactctcaaaagcagattcattgtttcccaacatccttgccattgtttttcttgcagcatttagaacccctattcctgcactgcatcggtacaaaaatttaaaacaaaaaaaattatatatagatgctaaacatgcatgtccctgggaatcattccacatcatatagatgcttactaaatcaaagtatataactatacacattctttagatattaataatgattaaactctaattgaacataataaagtagagtcccaaacttggaagtatatacaatagcaaaaaatccagcacagttatagtcgatcaaacataagcaacataggttaaaaactcagcattctactctatatcgaactgattagttcaccttttagcttaataactcgtgaatggcatcatttgacttactaatccaaacagcaatcacacatataaataaaagaggctgaataatgaattaataagtcgtgttgcaccaaattaatcgacttaagcaaaacttctcaaattttgctagatactaagccactaacctcccagcaccagcaacaacaatcttctgttttgggaaatcaatcattggccttccttgtgctcttacagctcctaaaagtccagcgatggcaactcctgctgttccctgtcagaagaaacactatactttcaaatacttcaaatatgacattaaggaagaaaagaaaaaacctccaagttcgattgtcaaatgcatatttttcctaatattaacataatctcatcaaattcataaaatgttaataacaacactacacaatttaaaaaaaaaaaaaaaaaaaaaagagacagacaaaagaaagaaaaaataataacaaatgatggctgactaaaagtaggtcaaccatctgcatggaaactactgttgtaaatagtacaaaaacatctattacatccttagcatgtgtgtctacccaaacgttgttactatcatacacaggatcccttttgttacccaccttagttccaaggttttggaaatcctatttggcaacaagaattgagatagagcaaatacaatcacaaaaatatgggaaatatggcttgaaaggaataacaaaactgtagaaggggtagaggaagttctgtcaattattttggatggcacttttgatccttaacttaaaaacaaaagatttcaattttctttcacttttctgagcttattagagattgtcatctctagttgtaccatgagatgataacttaccatcttttgtaatctcctttttctttaatatagattagtatcttataaattaattaattaataaataaaaactataaaagtgtggggtataaatagaattgatttacaaatgtatcacaagatgttacgatgttgcgcagagcaagtagctaacctggacatcatcattgaacattctgtaggtggctctataacgctgtaacaacttaaaggcccacttgctttggaagtcttcaaactttaaaagcataatgtattagtatttctcaagaagagatcaaacacaacagcgtttttcttgctaatgattaaagaaacatctatcagatttattgtacctgcacaataacatggggccatcgagtaaaaactgcctccataaattcatcaataacagcaagatactcgtcaccatctagacgatgtctctgcaatcccagatctataacaaaacaaaatgttttaagcccctcacaaacagcatttgtaatatagtttagatagggtacaaaaaatcccacaatatcttgatcattaatgcaagaggtaatacgtacacaaagggtctttgagcaatttctcgttgttggttccaacatcaatcataacaggaagtacctacagtttcatccagtacaagatgtagagtgaataagaaacaattttacaaatagttcactctcctctctggtgatgtgacagttaaaacaaaaagtcttaatccttatttagttttggacttgaatccttacacaactccaccatctatttatttacgttttggttgtgggaagaccacttctcagttaacctttacattttccttgtagcttttaacaagttcaattatttataatataatccaaacctacgttcaaatcacgcaaaggtttccatgtcaaaatatattttgcaagaaaataacgaataatatcctttagaaaaaatgtagttgggattcaaataatgcatatttaaagccagtgatctattatatcattagaaacatattgcaattatcatggtattagaaaaaataccctttgaggatttatcccagcagcagctacatacaagtcaagcttcccaattgcaataccaatcccctgaacaccaaggtctccaagtcccaatattctgcttccatctgtaacaacaatcatatcgacctgcaaatcagaattttccattagaccaaagaaatgatttattttctaaccactcattcaactgaagtaggatataatagaaattatcagatcacaatatgaaggtattgcaggagaaggtaacttagttttgagcttgcacgtatgtgtgtgtgtttcaatattgcaccctcagcttcgagattgtctagaacccaatataaggttatctattctagaattccataaagcataactttattattccctagtagttattgacaccccacaaattaatttgcaagcctctgcatccggtttacataactgcacttgaaagaacagctcgcttatgaatttagaccacccacaacgtttaatctatattccaaacccatttaacagctatatctagaagtctttcatttttattgtctagcttgcctcaataggcatggtgatatcacaagtaagaaaatacttcaaacacaggaagatacaaatggcaagatgccaaatcttaaaattcagatagaaactcattcaagatgtacaaacatgtaaacatgtaattatggaacattgcatacatgaatgcatattatcacagatctacctgatcagctggccaattataaaccatagacatcatttcaccacgatcttcagcactgaaatacattccccttggccttctaaacaaaccactgtagttttgacaaacaagacctacagttggagtataaactataggagcatattcctcgatattagcaatcaaaacctgtcaaattaaaaagcataacattatctaaacattaggattaaaatacgattacaaaaaagattattcataactacccgtaccagtgtgcacttaaacttaatgatgttctatgatatagaatgtccaatatgatatctgaacatagtaataattcatggtttccacaatttagaagcaagtgagaagtaatcacaacaaaagcaataaatgggcctggtaagcatgaggcggagaatgaaaatttaaagtagaaagtgtcttctctaagaaacacaggggacagtgttatgtgaacggtaatgacttgtcagtggtggtatggctactaatgaagcttcgaatagatgaagtgaactccttttaacttacgttatagtacatagtctcatttctgtcatgtagacgattaagtatgcgccactttgccagtgcgtatggatcagaaggtccatctcgtgcttgcacttcaagccttttcaaatcagccactgtgatttcaccaatgtaaacagtgagatttctacaagtaagctttgttcacaaaattgtggaaaattcgaaagttgataaatggtagaaattcgatgggtttaaaaactagcatacatacataagttcgttcagcatattaatcgtttatacctctgaatatacatcagtagttcaccacaacaacaaacactagaagtagtccatgaaaaattacttaaaagcacatatttagactaaattgcttagcatttggatcgtgatagctcaaaattataccaacaatttggagaagacttactgaaacgttcaatttgctgctctgtagacataacatttggaggaagaagtcctctgagatccagacggtctcgctcagtcattgtaaaagccgttccctaattttccattggcatggcaaacaaagacaaagaaaccaaaaattaccaaacaaacaaacacacacacattcaagctttctgaaggtaaatcgacaatagctatcatctataaatccatatcgataataactcaactcattcaactaaaacaatgaaacgcaataatgatccacaagcaaacttgatctgtaaaacttgacagattcattcagacacaaacatcaatatctacagattcaaccaaagagatgagaaaacaaaatattactttattgaaccaaggatcgtggagaatgtcgagactgcgcttgtggaccatggtgggacggtgaccctcggttgtagtaaaagatctggacttcgagagccatggattcccgacgacacaggtaccagctctcagtttctgcttaaggcgattcaccagagacgacgacgctctgatctggccgtacaagttccccatttttacgcgctctctctctggactttttctcacaaggagaagaagtggtggtggtggtaatggtaagctaagtggagcaagtgaatttcagtgttcacactctgatctctttccttttgcttttggttttggttaaggtcaatccttgtcgatgctttgacttttcttccatcttcttcttcttcttttcaatattatttaattaatatttattattcgccaaccaataattgatgatattttaacattgcctcattttaactaaatttacatgcatataacatatttaactaatgagtttactttcgaaaaggaaaaaaacatttaactaaatttacatgcttgatgatgatgcatataatggtactactactactacactacacatctctttaagaagtgtaactcagtacaataatgagagatgatgtaaataacaaactcaaagaaataagattataagtaaaaaagaatacgaaaaaaaaattaaaaaaaaactctaacaaccaaaatcaagactagtggggatcaccaacttaaataatgaagttcaaagtatgtgtctaaaaatttattttttctattattaaacatgtgtgatttctagtcaagtacttttttaatataaattttgtatcttacaacaagtgagtatttacattggctggccgaggcaactacaattttatagtggggtgtaaaaaaaacttttttttttttttttgaatggaaaaacttttttttttggtagaagagtattagtgaaaaatataatttttatggagataaaaattaaaaaagaaatgagaataaaaatcaaatataaattttataagtataaaattaaagttatgtgggataaaaaaaaaaattgtgtggggttatgaaaaatataaaatttacagagataaaaaatacaaatatataaagatacaaacaaaaagtatattaatattaagaggcaaaaaatataatttttaaaaaattaaattataaaagattgagggagaggggagaggggcaaatgaccatatactcctttcttccaccctaatatttacagtacgtttggtaaaaggaagagaagaagggagagggatatagggatttaggggtggtcatttgatccaatttaatttttttcttttcatctgaatccaattagtaattagatttaaacaattattatccgatccaatccaattagacctcaaaatccaatccaatctgatccaattactaattggattggatcggttttttaattagatgtccaattacacacctaatttttaatattaacttaaaaatatgaagataaatacgtaaaaattaaatatcaccattaattttaagtttaatactccatgaaaatattatttttacaaacgaaatgtaactaagcgtttgaaataactaaaacaataatatttttaagtaataaaatataacaaaacattatgaaaataaaaacatagaacaaccaagtattacaaatttcacaaataaaaaagtcactaaaaatataattaatattttttttattgtttattagtttttattatataaatcaatataaataattttctaatatataaaaatacaattggattaaaacgatttttaattggatcttaagattgacatccaataaccgatccaatccaattagaatccaactttt

SEQ ID NO: 14113 - DNA, 5921 bp, Cannabis sativa
  modified_base (37)..(55): a, c, t, g, unknown or other
aaaagtaaaaaataccgcctagcagtatttttgtaannnnnnnnnnnnnnnnnnnataccatgtaaatttcccttcaataatctatgctatttaggcaaatcttgtttttaaaaataccaacaactaaatttgagccaataaaattaaagcacaacattttgaagttgtttgccacaaatttttcccatagtttattcttaattttaccttgtggttgatttaagttgtcttaaacaaaaagtcatattactctttattaattaggtgaaaaatcccacattgttaaaaaaatattgtgagtatctatatgtaaactataaataaaatttttgtttgacacttttatctatacaattatttgtaatttactaatgttaaataatttagaaatattataagtgtaaataaatatttttgttttcttttaccagtttcctgttactagttaataaaattgttacagattttagagtactgtaattatttaaacttaagttctcactataaaagtttctcgcattaagagaattgatctggtaccgaaaaatgagaaattgtatattcattctataatagtaaatgatgttttgttgctttaatcatgttcatccaaattaactttataaattaatgacaaaataataatatttttgattagaatactattaaaaagaaatatatttttttatggatgaaattcattttttttcaagtgtcattatgacgtgttaagagaatatgattggaaatacagttagacccacacaaaaaaaaatggaaaaaaagagctaattaatttcaaataaattctctaaaaggcttgtttttttggtaaggtttttaatttttattattttttaaaaatgcatattatttttgtttaaaagaatcaacctaattccttcaaaaaaaaaagaatcaacctaattattttgagtctagttgattatttttaattattgtattttctaggaaatccttctttgttttaaagtaggatctttcttagatttttttgttagtttgctattcagttttcctgaggcatctctgattcatgtttattgtacacatgaattagcaagatgataaactagtttggatagatgattttttatcttttttctacgtataaacttttgaatattttcaatgaaagttgattgttaaaaaaaaaacaataaaaaaaaatcaacctgaatatataattgggtaactattaatgaaaacggttattccatatttccacaaccgtcaataaccgccaaattcaaatttatatatatatatatatatactgtacctctttcaaaatcatttccacaaatttctgaaacccaattcccaagaaaaatggacacaccagaaggaatcggaatcaaaatctacgacacaaccccacaagacgacatagaatcatcctcactaccttaccaccctccatccacggcagttccaggacaaggtcgaaagcgacgcgccgtcgcaaagggcgtgcaaaagacgctctcaaaaacatcaatgctggcaaattttctcccaacgggaacccttctgactttcgagatggttcttccgtcaatctacggtaacggcgagtgttcccctgtttcaaccaccatgatgcacgtcttattgggtctctgttctctctcctgcttcttcttccatttcaccgacagtttccggggaccggacgggaaggtgtattacgggtttgttaccactaagggtttggctgtgtttaagcctggattggatgttgaagttcccaaagatgagaggtataaattgggtgttactgattttgttcatgctcttatgtctgttttggttttcacggcgatcgctttttccgatcaccggataactgactgtgtttttcctggacatgagaaagctatggatgaagttatggagagttttcctttgatggttgggattgtttgtagtggcttgtttcttgtgtttccaaatactcgttatggtattggatgcatggctacttaattagagttaattattacttaattataattatattagtaattagataaaaataataatatcttattatatatatatgtatgttagtgccacttgtagtagggttggtttattgattgttctatgatgaattatgaaatgtttcatgttctattattttaagtatatgtgttaatttgttgtttattgataatttgatgagcatgatgttgtttaaatgtggaagcattctcttctcacaagtcacaacattttaaaaaattgactcagtcatccccaaaaatactttagtattaatttacttttggaaaagacatctctgctgtacatgttaaaaggccgttttcaagtattacttttaagtccatagatataacaatggaacttaaaaactttataaggaggggccaacaaaaaatacatatacattttagctacaactatgatatttatagatataataataattctattataatgattaatttagattagtatatgatagagattaatatttaaatcccacaaaaagttttttttctttttttaaaaaaattacttttgtccttgtcttacaaaaaaataaagcatgatgccttaaattaaatattaaagccacaagaaaggcatggaccatagtttaatgatcatttctattagatattagtggtgcaatattttttttataaatggtgtctcacgattagttagtaatatgttttaaaaattatttttttatgagacccgatacttaattatactaattatactgtgacaccgagaagaatattaaacaccaatagtatcttttatcaattttctaatttaatatatctagctagataaggccataacacaacacacaacaatccaattaaaacttcatattattaaatgatgtaattactgttcttttgccaataaaacgccccaaaattcagctaacttgatcaacatacacaatataaattactttatttaacatataatactagtaaaaatgcctacaatccaacattccacatcttctaaatcaaactcatcatcttcaaaatttgatgagcaaagatgggtaacccaaattagtagaacactccaagaagagcttgaagatgatgctgatattgctgtgtctgttttcaatgtccccaaaattttaatggcaagtgacccagaatcctacacaccacaagaagtagctattggcccataccattattggagaacagagctttatgaaatggaaaggtacaaactttcctcagcaaaaagagcccaaaaaaatctccaatgtggtcgaaaatttcaagatcttgttcaacacttgatcaatcaagaacacaagattagagcttgttaccacaagtacttggattttagtggtgaaactctggcttggatgatggccattgatgcctcttttttacttgagtttcttcaagtttatgctatcaaagaaggatttaataagggattctcttcttcatcgagaatgtcacatttggttgactttacagggagaaagtcagcgcacaatgctatactaagagacataattatgttagaaaatcaaatcccattattccttttgagaaagattttggagtttcaattcgaatcttgtgatgaaatgttgttagccatgttggtgggattttcaaaagaggtttcacctttcaaaatgatggaacaagaagcgatcattaaagtctccgaatgtgctcacttgttggatttcttatacgacataatcacaccacaacaaattgaaaaccaagatgaagttattgaaattagtgaccatgatgatgagaatcaagaccaacaaaaacagagcttttttggcaattcaaactctgttaaaaaactaatctttctattttggaagatgatttcaaagctaaacagaagttcaatacgttttctcaaaagggtatttttttcaagaccagttaaggtaattttgaagctcccatggacaatcctatccaatcttcctggattcagactcttaaaagctccaattgagtacttgtttttcaatgaagaagacaaagaagaagaagaagccaaaccagaagcagagaattcttcaagtatttccaagccaccattaatggaagaaatctctattccatcagtgactgaattattcaaatccggttttcgtttcatcccaacaaacggtaacatctcaaccgttagttttgacgtcaatacagttacactttaccttcctgccgttagtttagacgttaatgcagagaccataatgagaaatttagtggcttacgaagcatcaaacgcatcagggccgttgatttttacacgttacactgaattaatgaatgggattattgatactgaagaagatgttaaggtacttagagaaagaggtataattatgaatcgtttaaagagtgatgaagaagtggctaagttatggaatgggatgagtaaatctattagattgacgagagtgccctttttggataaggttattgaagatgtgaataagtatcataatggaagatggaaggttaaatttggaaaatttatgaagctttatgtgtttggttcttggcagtttcttactttgttggctgccgttttgatgttgatgttcatggctttgcaagcgttttgttctgtttacacttgtgctcgtgttcttaatatcgacactactactaccactcgtaattaattaagctcaaattactgttaaatttgtgttttgtgttaaattatatgaacaaaattataagttcattttattgtccattttattattttggttggttagtgtaatcttgatgaataactacctctgtgtgtgttattattgattcgttttgagatgtatgagtgtgatgatatatttgatactttactgttttggtattgggtgacaactaaaaatattgttggtattaaagtttgcattagaattaaattatttgagatgagactaaatgaattcggtataatttaatgaattcggtatcaataatttaattaatttagatcatttataatattctgttcgatcacgattttaaaattctagcacgtagttcaaataaaatcaaaccaaattaaatggcttaatttttttattttttttttatataaacttaatcaattttttttttattaaaaattgatatctaacaataattttaggcataatattaatagtaatttaatattgttttaaaaatatttatttttattattatttatgtattataagctttaacaagtacaaaagctagttaaaaaaattagaacatttacaaattattaaccatgatttcaacattaattgaattggtttggtttgagtatggtatccgaaccaaaataattagagaatgcaacctttctatttttaatttatataaatatatgaccctaatgttgagaattatctcaatcaatttaagtgttgaatattatatttaaaaacgatttcgaattaaaatgatttaaatgtccaaaacataaagtaaaataaaataaatagatggatacacgtatttgaagcaatttataaacattgtaggagagaaatttctgtcttcatccgtatggttgtacatgcttaagtttatattccaaagttgtataatattacaatttgtatttctttcaataattaattgttttgcaagttgaatcttttcatatacattagtggcaaagcacatcaaagatgtgctgtcatttttttttttaattttagtttttttcttgctaatatgttttggattaaaattaagccatataattcaagacattttattatttaaaattaattatgtacttatctttaaatttatactaaaatatatatgtatctattactaaaataaataaaataaataaattagtatatatatttaaattt

SEQ ID NO: 14114 - DNA, 7372 bp, Cannabis sativa
  modified_base (6701)..(6705): a, c, t, g, unknown or other
taattggattggatcggatgatgatttttcaaatctaattactaattggattggattggatgaggaaaaaaatgttggattggatcggatgcccacccctaattggtagcatgggatgtggtgtgtaagcccatcaaggtggcttgggaattggcaagctaaatgggaagttatgaagttgttgtggagattctctgtagagaacatgtccctttggcacaaagttataagtcattagggagctattaagactcattgggataccaaaaagggagaaaggttgtcatgtagattagaggaccatggaaaggcatagttgcatagtatgatgaatatctagatttgtcccactttaaaattgggaagggaaatggaatcaaattttgggaaggcaactatgcaactaactttttaatcaatcaattaatctatttcttcatctagccgtatccttatcaaataattaattgattaaaaaattaatagggtgggattgaaggaatacctaaatatgggactcaatggaatcttaatttcagaaggagcctaaaggatagagaggtttcaagcttgatagatatattgcaaattatagaactttcaactttttctttgttggatgacaggcaggtgtggaaggcagacttgagtggttttttcacttgtaagttagctcttgaaggcttagttaccatcatttgcttgctgtggaaaagtgggcaaaaaccatgtcgaaaagtagttgtgttccatctaaagtaaaagtatttagctggttattatcaataaagtggatgaatatttatgaaaatgataagcaccacacaatcccactggcctcttcagtatttaaaggaaacatggctctatactaatttgataaacaccacgcaatcaatgactaaaattcctctataacaattgtattaaaactaggaatagaactctagcattcgagagctacgaatctccccaagatccaatgctcaattacaattttcaaggcaaaaaccattacccactaacctcctcatttcttaaagggaaccaacaatcctcccaatcccaatgcaaacatcccttgttgaaaagaacattacatggaaataagagaaatacaaggaaatagaataaggaactagaatatctacatggcattgcgcctagtgtaggtgaaacgattggaggtttgtcaaaaaaactacaacaaaagcagtcatatcaattattgactccaaggtgatgagtttgttgtataaaaactatcaatcatttgtttatggagtgtaacttcattccactattatgggccaaactgctcaaagagtaaggcatttagtgatgtatgccccattcatgcaaccagaggttgggtgtgaaaaataaaaaggggtaggaagatttctacagtttggatagtagacgcactcgttatgttatgggatgtttggtttgaaagcaagcagaatatttgatgataaaaaagtagtagcagaggatttgtgggaaaatattaaattttgggtcgcaacttggatctataaatcaaaggcttctagggtagagttaatcatttcaaaatgtcagcagagagaggggattttttgtattaaaagtttttagcgagtgtttaaagattgtgttgttttattttactttgtataaagctttactgagctagctctaagatcattccttgtattctttatcatattaatacaaataagttccttttcaaagaaagaagaacctaaactaaaatcaaagttgtccaatttaaagcaaaatccctgcctcatcttgaacaagagggagatcatcctacttcatttatcagtattgtcctttaaatctatttgtctatttattttcttttgcatgcacgagaggatttagggagggggaggggcagattatgctaacttcatgatgacagatcctacatagcacagattcaaccagcgtgagctttgttccccattttcaatcagtctaactttttctttcataaggaacctacaccacaataagtgattgaacttatagtctcattctcctatatttgagtttgagataactgtcaacagaattaactggaaaaggacgagaaagagacaaagaattggagttctataaaacgataaggtttgtacaaccatccctcatagcaaaaaggaacaagaaaatttgatacttcaaattggctatgttagtaaagtagaccaagaaattttagtccttctagcttgaagtaacatgctaacgagataaaaattcctactgagaacatgtggatagatgatgccaatgacattgctatagttacttacactctttgcacaatcatataattgagccaagctttctcattcacaggactgcttcttgcatgttcctggtcgtttcacgtttatataatgctctacactaaagtaatacttaagctaaaggcattatacgtttcaagacaaacttcaatcccatcaatcaatttagcacaataaatccttgaatgaggcaagaccacaaaccaatcatcaaatttaatctaccttttctaatttgaattttcaaaaaaaaaaaaatgatccaatacaaagaatcaaatgcaatcacagaatatgatttccagttactagattctgtgtcctcttaactaaaactcgaaatctcttactttcccaaaaatcatacttgttataatagcactaaacgtatcaaagcccccactcgacaccacaaaacgtccctggcaaaaccctaattctaattgaataaaaactaaacacagcaaatcctttaattagaacacaaaattcgttaattatcaaaatataataatgggaagtcgaaataaataccagtaacgaaccgctttgcatcgagcacagcgtgtagtggtggggaaataacaaacgacgcactgattcagagcaaccgtggaaacgacgccgtaaccgtattctgcattcgcctcgagctcagccctagccgcctcctcggaggccaaaaggaccagcctcctgatctcttccttcctggatacagaaagcctccattttcggcggatgacaaagccgatcaccggaacgaaaaaacaaaccaggagaaccaagctttgaaaccctagacccccaacaacaagcatttagccggcacccaacaatacacatccagagaaagcaacaaaaactaggattttaatcccacccaacaccatagattggtcgatttcgtctcagccggcgccggtcccggtggtcacgcatgcaggcaaattataagggagaaaaagatcactcaatttacagccgtcgattaccggttgctcattccaaataaaattttggaaataaaaatatgaaattttcgagagagtgagagaaacgaaattctgttgaaatgcagagttttttttttttttaagtgtgaactcgatgacctttttcttcagttttgagcttcgtgtggattcggacaatgagaataagaaaagaaaagtaaatatatttctattaattaattttccgcattccttttactatataaattaataaatcggtaaataataccctacatttattatactgtacttttctttttcagaatttgtaaaggtattacccgtgttaatattgttattagtctaattaagtattgagttgtatataatttttagaaaatataactaactaattgtgagccgctatttataaaaagtactaagtactaccgatgctcaattacaatactcctttttaaaaaaaatatatagaatattattaatgacaatcaactaaaataatagtttgcaatctaattagatttttttcgttgaagacacaatcaggattagaattaaaaaaacgagataaataatcagtcgtctaattctcaaatcgtttgataaaaactatagtaaaatcaaataaaaaagattacagtatcacaattaacttttagaacacctatatgatatttcatccacagctgagaatatacaatagtgaaaactgttgcagtagtttcattcaaacttgtagcttgagcactaaactatttgtgtaaggtatgtaattgcactactaataacctttttagtcagagagaacttgttattaccaactgctaataatgatttaagggtgagtcatcgatgaaaaaagaaaaaccaacaacgaaacaaaacaaaatcatatttaaaacactcaaaattatgtcacaaagataagactaaaacactcaaaacaatatcataaagacaagactaattgtaaaagcaaaattcaaattgtagtagcaaaacacaactcttaccaatttatattaaagtaaaaaattatagtctagcaattagcaatttagcattcaagagaataagaaaaaatagcaatttagtatttgttataccttatatttaagttttagagattaaagaaaaaccatgttcttgtttttttttcagaaaataataataattatatgatttggtcgagtgaggatcaggaatcgaggcaaggaattttatttgattttatattattatattattaattattattataaatataagacgggtattcgaaagcgtgaatgagtgaatccatcttcgatcaaattttttgtaccgattggagagattagatatagtttaggactaagcttgttatttaatcattttaatgacgatgtttgttttttgtggaagaaaaagaaaggcactaaattggacggttgcctggtgacgcatgtgatttgatagacggcaaagattggatgggttcgggctctgacggtggagattgagtgtagaagtttgattctctatagtaatggcttctttgtgattgtccatatgtagtacaaagctctgcgcaggattcttcatttggaattaaccattccacaagacaacttatgttcttttcttttcttttcttttttgtggtattaaatttattaacatcaacttcaaaatgtattattttttttcttgaaagagaacttcaaaataaaatttaaaagattgtttttttttttttatgatttctcttaatcaaattaatttatactatttttattaatttcataaatcagtgctactaatgggggtagcgtaaatgtaagacaagttgtaagaatatatataaaaaaaataataaaaaataaataaataaaattagagtttgtggaatagatgttagcgttccaaaagagataactatgagaatgtcttatttcatatgggaagagttcagctgaatttttataattgatgattattttaatatttagtatgtataatcaccctattattgtcatttgttactctaactcgcatgagacaatacataatcaaattaaagtattagttaatatgtgaagttacttgatgattagtgggttgaaactataaagaacagttctctcaagatctatatattttatagcttttgataatattgagaagtcatttacttggtataagataccaacaaaggaaagaactatattgggcccccacataaagttttacagaatttaattaaaaaaattcaaaatatactcatacacttatcgaaaataccagttgaccttcgtctcctttacaataataaacttttgccgtctttgctggcctatggtagtaaaacaataataataataatactaataaatatttatgtattttatttattaaattttgataggtcatttgttatgtatatttggtgtgtcgtgtggtttttgatcaaaggatgagtaagcttagaatcagcattgcctaaagtaggaatagatttatgacagagcgtgcagtttagtcaaagtttgatgcagataatccttgtcttttatgagactcatgtgtagcttttgacatagttttttttttctaataaaaataaaacgtaaaataataatagtaataaaatggaaaattcagagcagccaacaaattatttttccttcgcctcttttctacaattttacttttctaagttatagcgtaagttgaaaaattatgattgtcaaaaaggaaattctaaagatacaaatttcttgttatctaccatgaaagtgctctctttattcttgaatgcaaataatatgagcttgaaaagaaatagatttttttattagtgtttttatttttttttattatttatttatttattttggtgagaataacgaaaagaaaaaattaaatagtaaaatagatttgataaaatgaaggaaaaaaaaaaaacaaatatatctatatgaataacttcagcatatgtatataatcacacgtacaaaatttaaatggctaaaattaatgatatattatagggacaatatgtaaaatggtcttaaatctaacaattaagttaataaatatccttttttataaaaaaaaaattaacaaaatgtccatttggttaaaagtttgatgatgaaattacaattataaccttgaataattaagtgtttggtatagttattttgcacaatagtacattgtttttatgtgcaatattatattaaaaaaaactgaaaggtagttattagtttaaaattgtggtatattattttaatgtgttatggtatataatgaacccaagacggaaattaaaaaatgtgaaatattagtttaagtttgagatatagttatattcactaggaaatattatttttatgttcattagtatatcatnnnnnaaagaaaaagaaaaaaaaaatatgtggaatattaaattaagtttttggtatatatatattttttccactatactggtggtacattaatttttcactatagtatttatattgtatatcgtggaaaaaaaaaactatttaatagtatattagtttaagtttatggtatattcgtattggtctaaggtatgtcgtgaaggaaagaaagaaaaaaaaaactattaaatattaattgaaatttttagtattttttattttgtacggtatatctttattatgggctattatatataaataaataaaaataaataaatagagtggtatattatttttatttgctatggtatattatgaaagaaagagaaaaaaaaacttgtggaagtttatttaagttttttatatatatttatttgactataaaattgttgtggtacgttcatattactctaaagtataatatttgtatgttatattatatatcataaaagaaagaaataaaaataaataaaaaaaatacttatcagtaaaagtaaaaaaggacataatactcatattactcatattactttaaggtatattatttgtactagaagaaaattacgtgcaaggcacgtatatttagttttatgttaggtattctataatttaattgagaaagattcaataaata

SEQ ID NO: 14115 - DNA, 5843 bp, Cannabis sativa
tattataattattataatagatatatattttaccaatttttttttatttttttaataattaatttacggtactaaaatcaaatatcaaacacactgtattaatttcacaatattattggaaaaaacattggggtataatttgtaagcatgcaaataactttttcaactttattttttatataatatgacttatctttatatataacattaattagtatgatgatttttttattatataactataatataaaatatcatatataaatgtataaacaaaaattacaacttattcaaaggttgaataccgaatccaaaaaatattagtatatatatattttggttattacctttgcatttttatgtcttgactatatacctagctagtacaaatatattattgttttagattccagacatccgagaaaaacggaatcaaaattaaaactttcaaaatacagatcgatataagtatatatatattatgcttcacataggattgaggatatagatatatataatatacataaaggtaaagaacacattaattaataaaatataaaaccaatactgtttttatgctcactttttcttttaattttctttcgttaggtgccatatacctaactataagactgtttgtccatgtggaaaggtatacaagcttagttgtattcacagccaattaagctaactagatcatcttatcaaattacgagcaactaataattagttagcattaattatatatagaaatttaaataacagtactttatgatgacatatttatatatataagaaagatataattaattatatatctatatatatattcatggggtgtcctgtaattatttctgttggatgagttaatgcataatgtatatatggtggagggtctctcttgctatccgatagctcctcttacctgcgagatctttaggtcaaagattatcttttgaatgagagaaagagagagaaagagagtatgcattttgttaagtctaatagacatttcaaatcaaaatctttgcttcataaacctgaagatatttttgtctatgtcagagatatagaaaattaaaaaaggtacaaatctgactagagaatctctagaagagcgagcaaactctatctaaacatacattttaatatgaacaactagttaatttataattaatatggtttcattctcttcaagataataataataaaatgtgtttgttgaaacgtacaattattattattatgagtattgaacttgaataattaaagatttaaaatgtacgtagtactagagtacaacattaccattatttaggatgaccaaaaaaattaattcttgtgatttattccatttgtatgaaacgcaatatattgttttcttcctatatttttatgagtgcatgcttgattgttttatatgtaatcaattgagagagattccttaatataaaaaattgaaattacatctcttatatatataataatacaaaagatcatgatcggtttgcaagaccatgcattattatttagccaaagtaaattgttaatgagataatgtcagagagagaggcacaaaaaagtctatacttaatacttattaagcaattcaatttgtaaaagtagaaatatttaattttaataatataaaccacataaatagttggaaaaacccttttttttttgggtatctttgtagtgggaaacatcctaattaatgaacccattaaaaaaatcaagatcaaatcaagatctacccaatcttgggacaacatatgggctggattggatgactagctagtctccaatttgactttttaccaatcacatgtacccatataggcatgccacacacacacacaaacaaagtcttctatatactatataaatatgtatgtatatatgtggctgatgtttcccatgtctccaaatatgtcaagaactaataatccatacaataatacaatataacttgagaatgaagttcatagcttgcttccttggaattcctccgaaacccgcatagaaaaattattgaggctcttttcgattattacctaaatttgaccactgtccatcaatgaaagagaaaacacgaaagagaatatagttattagttatttaaatattttgattccataaaagaaaaatcttatatacatttttaactaaaaacaaaatcaattgggtaaatgcaacttgaccaaacttgactcatcttgacaacatgatcgtgatccaacggtttatatttggttaggtttggtacacagagtgtgggtcccaaagagatgaaagaaaaacaaaaatagaagctctctatgtgtggccccttaattttcagtgggtacccagctcgtatggtttcgaatcttgatggtcatgatgatgcatacacaaatacaaacaagacgcgtaacaaagttaataatataagagagcaatcatattttcattaatatatacacattatgcatatatatttttttcttaattacactaaatacaatatttacttaagtatgaaaattctaatattaaagtttaataccgggtgaatataaattcaaaaaatttataataattagtattgagtattttaaagtatctaatatattataaaagatgagatcttatgagtatgtagtttttatatgtatacattatttattaacttaacatttgtattaataaaaaaataataataatgacacatcacatttgttgtgtaatattttggtataatttttgagttatttagcattttaagatttctaatactatatgtaatattttataattagttagaagttttttatattatttattaaatgagattggatattaaaatgtagcaataaagtactcctcagttatcattactcttgtattaaattggattaagaccctgcttgcacgagtaattcatgaagttggaaagagaagaaaacaacaaaaactaattaaaagaagaagaaaaaatgaaatccaagatgtcctttgcgtatctttggaaacaaaaatatattgttaggccaaggtgtcgttactctaaattactatattatattatatatttactattacttttcttgttccatgcaaaagcttctaaattcttatatacatacccttacaattaatcttatataaaccacccatcccagccattctttacagccaacaaacaccatacccccaaaaactccctattatttcttctctctctctctctgctagttaatattaaaaatggctgcagagaatgttttgatccaaacatatgccatgttcgtttttcttatcagccgtctgatcttcagctttggaaataaatccaagccgtggattagtactaccacgacaactaataataaaggcccaacaaccactccgctttttccgaataataacaaggaaaatgggtataaccttcgtaatgactcagaagccttagaaatggcttcgagtgattacggaaacatggttagagaaatcccagcagccgttttagacccatcttccataaacgacatagccaatttaattaaatcctcaaacaattcctctacccctttccgcatagcccccagaggacaaggccactccattcgcggtcaagccatggccaaaaacggcgtcgttatcaacatgaccgccttgaaaggtcaccgcaacggtaccggtattgtcgtctccggcaaccgtactgcttccggttccggttactactactacgccgatgtcggtggagaacagctttggatcgatgtcttgcacgccacgcttgagcatggactttcgccggtttcgtggaccgattacctttacctcaccgtcggtgggactctttccaatgcgggcattagtggtacggctttccggtacggtcctcagatcagcaatgtgtacgaacttgatgttatcactggtatgaattaattacatcacttaaacttaattagttaattatgtacttaattaataagcatgaaaataattatttattttgacccaacccaacacagctatatatgtaattattaattataggaagagaagacaagatagtatctgtcgaaacttggatacagtcttttttcgacatctttacttcatgttggaatgtgcccctgttatttggtcccacgcgttaagaaattttaggacactactagttcacacactggtctttaattatatataatataaatataaataatatatataggagatatgtatgtacgtatatatatgtttgtgtatatatctattattttttaaacgaaagataatattgtatataattgtgtacttatgttttcccagctatttattataataattaattattgttagtactgcacttactctctagtagtacatatatattattaaataactattattttgtgtggggctataataatctgcgagatttgcatgcaatgcgcgcagttatattttactttttgagtttttgcttttcttttttaactttgtcacaatttatatgttttggcagggaaaggtgaatttgtgacttgctcggcacacaaaaactctgagctatttcatgcggttcttgggggtttgggtcagtttggagttattgtcagagcaagaatcgtccttgagccagctcctaagagggtatatattaatttgcaaagtagtaataaattatataatatatttattatgaatatttagtacaaatggtaattaaaataataagattttgaaatattggatgtgtggtgggtttatcaggtgaaatgggtacgaatgttatacacaaacttctcagaattcgctgaagaccaagaacgattaatcaaaatgaatgacaggaaagacaagaacgcacttgattatttagaaggttcactactcatgaatcagggcactcctgataattggagatcctcattttttccaccctctgatcatccaagaataatctctaaagtcactcaaaacaaaatcatttactgtctagaaatagctaaattttacgacgatcgctcttctcaatccatacacaaggtacatatatatatatatatatatacctacatattatacatgtgtacaaatatatagttatattaactaactgttttttttaattaattaatattaataggtggttaagggattgaccgaaggtttgaggtacgaggctggatttatgttcgagaaagatgtgtcgtatgtggattttctagatagagtacgaagtggtgagctcaagcttcaatcacaaggactttgggaagttccacatccatggcttaaccttttcatcccaaagtcaagaattgaggaatttaacgctgctgtctttaaggatattgttctaaaacgtaacattacaaccggacctgtcctcctttaccccatgaaccgtaacaagtaataatttttttaaaaaaaaatttgttatttgaaattaaatttatggtgtaattattagtactaataataattaattataaattttgattacaggtgggatgaaagaatgtcagccgttataccagaagatgaagatgtgttctacaccgtgggatttttgcattcgagtggtttcgatgattgggattcgtttgatgagcagaacaaagagattttgaagttttgtgaagatgctggtattgaggttaagcagtatcttgcttaccatgaaacgcaggaagattggattaaacattttggttcaaagtggactactttcaatcaaaggaaacttatgtttgatcctaacaaaattctttcaccgggacagaaaatttttactacttcagtaaaattaattagctgaatatatatatatatat

SEQ ID NO: 14116 - DNA, 3265 bp, Cannabis sativa
agtttaatggtggcaagtagtagacgaatattttagagtttgtttgagttgagattatagtggcaagtttaatatagttttgttgaatgagcttagtctatgccgagataactcacttctcaagccgtatcttgtttgttttggaaacacgtctgttggtagttttggatgaacttgtttgcaaatttggcactctttaatattttgatgtaagctgaagctctgtgggttttgatattttggttggggttggggttggggttgggaatgggttttttttttcttgttacattggaatatgattctaatacttaaatttgcaaccaaacaaaagaatggaatgaaaattgttttcattccatttcattacatccaaccaaacgccaccttatttaaagattaatccatcttaaccgtttccgttaaccatatatgaaaaatagactactcaaatcccagggagaattttttgacattttgtttttgagtgttgacaactgttgtaaattatcgttttatgatttttttctaaatcgtaggattttggttgaggaatgctttaagatttaaagtctaaatccaatgagcaaatacaaaaatgtaatcagtaaactagaatgcgcgtaatctgtctcatttatcatcccctccaactcataggtgggtaaggatttgtggtttggtatgacgtgctatgaagtgttgtgtagaccatggcttagtgggctattcacaagctactagaaaaactacttcataataagtttcgaaaggaaagcctcaattcatgttaatcctattgtgctaatggccagagttttacattcgaacttgttgctacagctggagacaagcttgttttgaggaaaatgatactcatgtaaccccaaatcttaagagcaagatccggctgagttcagtttaccaaggaatgtgattttttgaggtgatagaggcttcatctagtttacgcacacaagaagggtgcttattgggttgagacgaatacatcattagacatctcaccatgaaaacacaactcgagaataacccatcattgagaaatgctcgagtgaaaagtactacaggttttacattgaggccctagtagtgttgtgtagtcttttgcaacctaacactataatgatagtggcacccaagagttgtagttttgagaaccttcaccatgagatgaaacaattttctaaggatgcttaatgacttgcttgttgtacttgtgtggctcaatatccagtcctacaacgacacaaaaaggtttaggtttatacattccaactttagaatgtgatcattggataatcattagtgtgagttgggagaatggatttttgatgttggatgggtaagcctaccaaaggaacgactgaagtggaagaagtttaaggagtcaggaatggaggagactagtgagggagaggaaaaatgggtaggagatgaggtaggaggaggagatgaaacagaggtttaaacaagacgaaaagttgatgtaggaagagtgcaaaatgattagtgaagttaggaagaggagatggtaggcactagattggaaatgaaattcggtcttattgaataactagtcaatatagcgttgatcttaaattgtaaaataaataaaattttaattaatatttttatgaaattaatgacatataattttatgttgaaaatatttgattttgatttaatttatttttattttgtaagaactaaaaattattgtggctttttgaaaaagaaaaaaaaaagtaaataaataaataaaaatgatgaacaagagtagagattgatagttttagaagaggagcaacctaaaagatcccgtgcgcttatgttcttgtgcaagtcagctaccattccttctcatctcttcatacgtgcaccacatgacactttgttattcgttagtcattttttagttcattgggttcccaagaagttttactttatttttctttttcaaagtgccacaataatttttaatttctacaaaatgaaaataaattaaatttaaatcaaatattttcaaataaaaatatatctcattaattttatgaaaatattaattaaaatttaatttattttacactttaagattggcgacgttgtcgatgagataatttttcaaaagcttagtgaaatctacaatcaagatgttagtaactttcttgtcttttattttcatgtgaatattattcttatgttgtgtcaaatatttggtaaaaaaaaatttatcaagaaattcaaagtatgctcaatgttgcagttttacccgatctttcttatcagaattaatttttttaaaaaacttatatttcgtgtatttccttttagtttatttttttttttcactttaattagtttttttttttttgtttgtttatattgtcttttagttttttttttttttggtcagtattctatttgtcttttccttagtactcttaggatttaggttactcctttttttttaaaaaaaaaaagttctaagattttattcataaaacgtttatggcagtttaatatacagtcttcaaaatcagaataaatcaatagagaaatgtagtggaataaatgagacataatcgaaatcaatatttgtaatatgttgtttactaatttttttttttttgaaaatagaataatagtgatttatcatgtttactttatcaagaaacgtaatcgaaatgcttaaattgactaaattaccattttgagttaaactatagtatatgataattattttgtaagacatattttaaaggaaaaaattatcattatatatttaatattaaaaagtaaaataaaaataaataaaatccattactcttaatggcattccttacaaaattagtgggagaagtattccctttcttttatcccatctttaatcaagctcttcctttcttaattttaatcatgtaagtaaacaaatgtaagggaatgattaccttaccattaatttccattatttgttagtaaacatgccattaatatttggtacaatggtgtaacattgtacatgacacaaactaagattgtcctgtctagaaagattgggttttaaataaattttgtgttagtgtacctgtaaaggctgcttaattttaatatgagaatgagcagattattagagtttaatttagaattagactttttagttatgatttatgaatttatgaagatatatttgaattttaagtgtgttatttatgttatatacgaaatttcatgttttttatatttt

SEQ ID NO: 14117 - DNA, 10210 bp, Cannabis sativa
  modified_base (268)..(277): a, c, t, g, unknown or other
  modified_base (5228)..(5241): a, c, t, g, unknown or other
taggggaattaaatttttaacaaacttacaatttttttttgggagaagttaggcaaattggttttacttttatatgtatttatatatattttctttttttttttgtggaatttttttgaaaaaattaggcttacgatatggttttgtttttatatatatatttttttttattttttttagggagtcaacggcagagttaaaatgagttatccatgtttgttagagaaatatgtgggtatgataatttttttaatttaaaaagagattnnnnnnnnnnaaaagattgtttaattttttggggttaattattgggttttttgttaacgggagataaaacctattaacatcgttaaatttaacagaatattcttttattttaagtatattctgttaaaccaaaaattgccgttagataagcacttttaatatataaagatactagtttcagttcttaggggtttcgaggaggaagatgaggatgaagatgaagttcttactcaactagtttggttgagtggaaaagataaagtttgggggtaattatggttttgaatttttttttcctttttaagtgttttactatttttttaaagaaaataaaaaaataaaatataatttttttataatttatttctatttatttttataatttttaaattatattttataatatttaaataattaatattatgtggaccattaaaaatttgttatgagtacatttgtgtacacgtgggcagtacattgtgatatttaactgagatttttagacaaaaaaaaataaagttcatatgattttaccgttaatctcttaaaactataatatacacatattttagtatttagctcattaattgtaataaaaatataaaaatatggagtacgaatccgagcacgcaacgaaactattaccggacttacgagtcatgatgggcctagtctataaaattgttgcacgacacgacacgacccatagttttttatggcatagcacgacatgacttatattttttttggtccggcacgacacgacccgtattttagaaagcccaaaaaatatggatcgggctagcacaacacgagcgtatttacaactatggcaataagttcattcaactttgtagcttgagcactcaattattgtgcaatatacgtaactacacgactaataatttcttcaatcgcaaaaaacttgttattcccaaccactaatagtgatttgatggccagccattgaagaataaagaaggaccaataaggaaacaaatcaaacaaaatcatatcacatacaaaactgaaataccaaaaaccatgtcacagaaataagattaaaacactccaaccatgtccaatgaagaccgacggacaatatattttttttactattaaattttatatagttaaagttgaaagttaatgcaataaggtagacaccaaactaagacatcctttcggacaagaaatttgaatcttattattaaatagtttattacatattaaaaatactagtgaaatttaatgtgttacaaaaccgagtagttattatatgaattacatacattgtattacattaaatttactcttaatattgcagtaatttttaaaaaacctttcaaaaacttaaagcttaaataagtcaatatatattttttttattttaaaaaatataacgtatgtatttatattttatgcaatagatataattctcttttacatttagtttctaagttagttattttttttcttgtataagttaaaaatttataattttgtgtgtttaaactttctatgttattcctatctcataatttttattttacattaaatatatatctctaattgtattagttttttttttttttttttatttttcttccaaatcatctttttaaaaaatatacctatcaaacataaataaattatattatatattttatacaaaaaaaattaaaaatatatatgtgaaatttgattagaaaaaaaatatacataatttttaaaaatatatgaaaaaaaattaatataagtactgaaaaaaaatattaaaattaattttttaaacattatattaagtttattttttaaaaaaaaatattaggatatacttattattttgtggactgcaaatagaacttccttatctcatatcgagggcgaagctagaaataaaactgaggtgggaagattacatatttttatatcttgtccagactgtaaaatttcaataagaattatagaattagatataataaaatgtaattaattatgttaaagtgacttttatagaatgacattttatattttcatcttacacaatttttatgtagttcaaatcctaataatgatattttagttctttttcaaaaaaataaaaataaaaaaattaagatgtggagtgttgaatttgtgacctcttaacttttaaaaaaatcttcaccactacaccaaacaaccttacttaatattatacgatcagaaaaatatttgtataaaggcctaaaaaaatttatttaaccctaagctccaaatagcttaagaccggtcctaatattttcatctgatgtgaccgccccacctaatctacacctagcttcgcccttatctcacataactccacttccatttcttaatgtaaaatttttagtatcatctttctattttagtagaattttttcttttctttctaaaaatattacctcaaaaaaaataataaataaaataatgaacttattttttaattaacgtatatatattatatatatatataattatttttgtaatttcatacataatttcattattttaacaaatttgtacttatttttattagtattagtattattattattatcattatatatatatattttaattggattgtaataaaatttgatatgtaagattgtttatttaatataatatattttgtgtcaaaaactttaatatatattattagtaaattataataataattattaaatattaaaattacaaattcatttttaagtttacttggtttttgatttcaatcacttaaaagtaatttgtttgttactatatgtatcatctaaaagggcagggccggcactgaaacaaagtgggccataaggaaaaaaaaaaattggacccttatgttagaaaaaatgtggtatttttcaaaatcagtaaaaaaaattgtataattttaaaagagaaaaaaaaatgtgggccccttggctgggtgggccctaagcacaggcctagcccgcctatgcccagggccgggcctgtaaaagagtatgtgtgtaattcaatgaaaagattattgtcacttttatttaggttataaattatggacatttatatatatagtattatgacaattattaataaaatacttttgaataattataacaaaacatacaatatgtaataaataaaaatcttatttacatactataaattgtcttgttatggcaatatcggcctttcttttgaatccaagtaggtggcgttgtattttagtcaattgggggaagtgaaacttttacgatagcccttgtcttgcttctagcaaaacatctactttgcttctctcgcgcttgcttgcgcaaaggactatttgtttgtaagtgaggtacttgtttcggtttgaataaggagtagccttgaagtagtcgcgacaaatgatgtgactcgaaataaatggatttagtggcacatttaataatcttatcatgtttgcgttcgacacatttaatatacgcgttgcatttatgtttactttaatcgtgtcatgtcgacacaataacataaattaattgctataagtttcatatgtatatattgatatatatttttaaattagtgtgtgtctagataatcgtgtcacatttgtattatcgtactatatcgtatgacatgctaattaattgtactgtttttgtatttgagtttgagttatctacatcgtgtcatttgtgtcaataaattgtcaaccttgacacttaattacattattatataaatatgatactcaataagaaaaaattaacactaaaataacctttcaggactacttgaggctcaagtggctatagaaggtatgctcgggtgcatgtgggtcctgagatcaaatcttaaattatgtaatctaatgtatatatatagacgttttaataaaataaataaaataaataacgtcataagagtttcaaaactacgttaatatataagaaaagcttatgagtagtgaatgactccttatagagttcacatgttgtatatttttttttatgaacaaatttgtaaaagtattagtttcgagtcgattatccacgaaatttccagatttatggtttttaagtcacttttctacttaatatccatccattgatttttttaatcgaaatttcttggaaaaattggcaataattacattgtaaaaagataatagactcaaaaaatttataggaccgaaaatttatgatattttccatcttagtatatacttcatgcaaaagtgatgtatcaatatagaactctcccaaaatacataacttcaatcagcttgttgtgtgcaaaatacatattattcaaacacataaattacacacacaaacacatatttatgcatgtgtgaaagcaacaattttaattttgaattttattttcagtatgataaattattcaaaaaattttaaatatttacaggagattcattatagctaccacaataaacacaatcataaaataaattcaaaatgcccacacgtatcattttaggaacgtgttgtatcgatacattaattttgcgtaacaacgtagacttcctatatttttataatactataatttgtcctaagtttatattttaatctacatatctattcgttcttatttgaacaaatacctatcgtttttttttttttggtttgacgccactgttgattaagaatttgtcattgaaatatttacacaaaatatgtgtatacttcgagtaggtcaatgtcgtgtcatttttcagttaagtgaccaacttaaaaataacatgtttaagcgggtcaatttgttttatcctgttgtattcatgatatatgtttcgatttcacttaatgagtatgcaacctctaacctaaatatggaatgaaattagctgtgattttttaaatgaatggaaagatatctgcattgggaaatcaaagtccaaaacaaactttggactaaagctagcttagtggtgagggagnnnnnnnnnnnnnngagaggtcatgggttcgaacccagaacctttaagctattaagctaatatatgattgtaaaataccattacgctacactcaaaaaacaaagtccaaaacaaactttattgtgacaatactcttcgaatgcattcggtagagattaagaaggcgcaaatagtatgaaatgacacaaatggaaccactttccattgaaaatggctcacgtacaaaaattattatgtcatataagacttacaattatttattcgttttacttactatttctttagaaaaaaactaaaataaaattacataatgttaagatacacaatttggccgtgaagtttcatcacatcaaattttgaaaatcgaaaactcttttataagctaatttcagtgttgctttgaaggttgaggtaaggtgtagaggatgagacccaagacaagaataaaactgccaaagagaaagaaagggcccaaagttgaagtcaccggtagatatggcaatggaacggaaagtatataaattgaaactggcactgcaaaaccgatacaaagtaggtgtcagattcataagataagagcttaattagaagatgtcaagcatgtttgctaatcatattttttacgcagagggagagagaacctgataacatcacggcaagagatgaaacaactgcagatgaagtctttactagattgagcactgatatgttaaacataagattggtagctatgtaaagcaatggaagcaatggagaaccttcacagcctgatataagagcaatgagaaaaactatagtgagtaaaaatcagtatgttcttatagtatatcctattgtaacttttatcttatcaatactttgttacagaggccttgaaattattatgcacttccaaccaacaagtacatctacatatagattgtaataaaaaaaaagatagtagagaatcacagtaagctgaatatttgtactttagtctattaggatatatattttacgagttatcatatgaagtactggttcagttgtaaagtatgcataccatatgaatgtcaagatttgatatccatgaattatgaacattagaagctaaatatatttatgtacttatataaagggcataagagtttgcctgatgtactcgctccaatgttcagaaagcaaccgacgccacttttaaaatacgatggaagttgtgcaaatggtatgcctttcatgcttgacaagaaaggtagaaagagtagtacaaaaagagcctacagaaaattaaaaacatagagattaaaatccaattggaaaaaaatgagaatcaacacacacagtggtgaaatctacaagttgccgtcacataattctacacattaaactttcttcttctagatgttctaaaagaaagtctatcaaagtaattagaatcaagtagtttgtttatgtgcgctcattagattgagattggcacatatcttaactgcttatattgtagaaaccatttagaacatattatcactatattataaataatcaaaagaagccatgaagatcacctgaaatccagacccaaatgaattgacaacaaatatgtcaagcgtcttgccctgcatgtgaaacagtttagaagatcctcaaagtccaattttacaacaaaagtgtattgtgttaagaacgaattaaattatcatgttcaccaattaaactaaaagtccatgagaggttttggacttgtggtaccttaaggcgagctgctgagtcaataaatacaaattcctgttcaaacagaaaaaaaaaaggcaataaggtattttattctgcttataacagggtagcattagactggatttaaaatgttatcttgaccttgataatggatgcaccagcttgaaaagcacttgaagcaatcattaaaactggccacacaagctcaactccatataacatttgattagcattagaaccgctgcaattaaggcccgcaaattgtggaggccaaatttcacatatagcaatattaaactcactatttaaacatctcatgtgtgataactgaaacactcccaggaagcatcgttacaataaacgggacaatccactgtggaagaaccatacataaggaggttctgctcctcgttgaagcagaaggaaaccccaattccgggaacactcagaaccttctttcataatgaaaataacaactcattttcttgattatgtagaccaatcatggtaagtcatttcttactcaggaatattaatagcaaggtattttgagggctttattggagtgtttagaattaacatacattttgttagtttgttgagaaaattctcgctcacttgagcatcgaggacccttttccaaggtatgcaccgtaggtttcattgaaaattccatatagtcattagtcattcaacctatgaatactcaagagcatatcaattttaattgctttccttatccatccataactgtcagctgtataatggttgtatttagctatctagttacccttattctagtcccccacttgtatagtttccaaagatttctagttttgtatctatatatgagatgaaaataatgatattcaacttataacaattaagttgaatatcattattttcatctcacataacaataacagttatggaaagcagttaatttaattctcgacttcttgaatttaacacataataatgacatcactaaagtggttgaattatgagaactagttgaataaggggaaagtggcagagattgttatgtccaatcctggccttcatacatttttagacagtttctagcttccttaaacaacttttttttttgtcatattaagtttcaggatggaattgattagttaagctattgaagaataggttgagataccttgtgacagcaacggctaccccaatggctacgagtaagcagccagctatctgactgattgtgtatgttcttcgcaaaataaagacagacaaaatcagctgccataccaaaaacgtctgcaatgtaaagaggatatgagattttcatgaggagttgtacagtatactatttccactcttgcttacacacacacacagaaacatatagattagacaaacaggaaatacctgactcaaaatgggaatggctggtccaggcaacatggctgttgaagatgcacaaagttaaacataaaactcaatcaatcttccttatgcaaacagttctgtagtggctactttttttttttacatcatcttagtcacgaacaaacaacaaaccaaagcattgtacacaaatcctgaattcaaatcttaaaattcctattaaaacatgacagcttttctttaaagcctatcaactgaattcaaatcttaaaaattcatattatcatacacaaaaacacccaatgcaatgcaatgcaaggacccaaataaactttgtaagggtacctgcagaagccattcccaaaacaactcctagagcttccaaaacgccaatagccacaaaaagtgattttggctgagccatcatttcatctgtaacaaggccgccattgtatctcatgtataatataacgaagtatacaattacatacctaaatcaaaagacaaaagggagattttatttattaatcatcatcattgagtccgaaatttttattttttattttctttataaattaatgaacactacttactcacccaaaagtggccaactgagctaaaaagaaaggatattctttcatgggaacgagagctagcttataaagaacgcggttggcaacggcgaatgcgatggtcaacgctgagctgataatgacctgttgagtaatggaggaagaaggaggaggagaaggagaaggagggattgagtccgggctagaagagcgagctgtgaaatgtcgaccgttggatgaggctgctttacgacgaatgaggatgtgggtgttattatgatcggaatggagggaggatggttgtagtggaaattgagcaagaggacaggaatggtgaaaagcgattggagcattcttccggataggaatgggagtaattggaggagccggaatcggaatgggatatgaaggtgccaaacccaaacaacggaatttcatgttagtgattttctcttgttttttttttttttttttctttaaaacttggattgtaggactttaatagttagccacaaaatcactcacatcgaaaatcagactgattgcttgattgattgattgtgatcaattatttgttgtctcttgttcggtgccactgacaagtcactcaacttctaaatatctcattaaattttcacttttttgtttgcataaattttggtctggctaatatttgtgtttttcttaaaaaaaaaaaattaattataaaaaataaaaatgtgttttataattatttttatttttttagtttttaaaatagaaaataaatgtatattctataatttttattttttaattttatttaaatcgggtcaaaattcaagtttagagttgggatcgtgatccgtgtctgaaactggagtcagtgggttccaaggtccaagttaggataagattccaaaatattgattaaaaaaaattatttaataaaattttgaaagtgattcttttttattttcaaattttattttttttttcaattaaaaaattaaaaagtgaaaataattttattaaacatatttttgaaaaatatttttacttttctaattaaaaaaatagaaagttgattaaaaatgtattaccaaatacacacataattttaacaattttctaaatcacacccacattgcataaacttcaaaaccacacaactgcaccacacaaatatagtagggtatgctacagtacgatatcgacagtttgaaataatcgataactaatggaaaaaaaatagaaaaatacaaaaaaaaaattacaaaaatactatgggtcggcccattaaacatttatacaatccacatacaaatatttacaaaaatac

SEQ ID NO: 14118 - DNA, 5530 bp, Cannabis sativa
ctgacaattggaatgatgcaccggatataaaatcattatgcattttggaccgttcctttgtttttcctggtaactggttcttgactctcccattttctttaagatatatgttaaaatgaataaacttctaattgttttgcccaactcaggcgagcaagttcatatactggcatgcttatcagcatgtaagaaggatacagaaattattactccatttaaagttgctgcagtaatgagtaaaaatggcatgggaaagagcccagagaaacaaaatggaaacctggaagatgaaaaaaatgaaaatcttccaggcagtcaagatgtaggtcctcagaatggtgaaaatttgtcaaaggaaaagcaagattctaagaaagatgtttctactagtgaatcacttcttagattggaagaccacaagagaagaactgaattgttactacaaagatttgagaaatcccattattttgttagaattgcagagtcaggcgaaccactttggtcaaaaaagagtgctttggacaaatcttcagaatcctcggagacagactctcaaaggttgaacaatgaagctgtttctcgccttagtgcagttattgataaaggaaattttaatcctacagcctctggaggggtagcaagaaataccgtgaagtgttgctctctttctaatggcgacctagtggtatgagccattaaacttaaaactagtagtaatatacttttgtggaatattgatgaaaattgtatagtaatatattttatgtcatcatgtttatatagcagtaaccagaagactatgttgtaacttgtatgcataaacattcaaaattgttttctaacagtacagacagtacttaggtatatgctttcttgtcactttcgatgggtatgtgggattccatattttgaacatatcccatttggggccccgtaatgcctgtagttgtctgagaacatcactattttctcctaatatccttttcaaaccccccagttgattttatgtcgtagtaatagtatgatgttttaagttgaattgcaaggaatttctgtccagtgaattttttttttattaacgagaaattttgaggttgaagtgtttatatgcatgcgtagtgtttctgttcagcatattgttctgacaactgattctcatttgattttcttgtttggaaggatgcaggtgcttttacaggttaatgttggtgttgaatttttgaaaaatcctgtccttgaaattcttcaatttgagaaatataatgacaaagatttgatttctgagaaccagacgaatgcagcatctgtggaccaggacccatgtggagacctgttaaaatggttacttcctttagataacactcttccaccaccagctcgtccactttctcctcccataagttccaatacaggatttggaagtacagctcaaaaatccaatctcacttcttcgtccggttcacaacttttctcttttggcaactttagaagctactccatgtcatccctgccccaaaatagtaccccacctcctgcatctgtcaaatcttctggttctaaaccaagctttaatcctgaagattgggatcagtattcatctcaaaagcttcggaagagtcaaaagactgatgctgaagagcttttatctttccgtggtgtgtcattggagcgagaaagattttctgttcgctgtggactggaaggcatctatatgccaggaagaagatggaccaggaaactagaaattatacaacctgtagaaattcattcttttgctgctgactgcaatactgatgacttgctctgtgtccagataaaggtgcgaacatgttttgaactgagtcacattgtttcataagcagatgtatacatgttctgaaatgcagcagctaccatatctctttgtttgtttgatgtgactgtcagtctaagccttcaaatttcaatcaagtttttgcgttgttatgcagaatgttactccagcacatgcaccagatattgtggtttatatagatgctattacaattgtttttgaagaggcttcaaaaggtggacaaccactatcacttccaattacgtgtattgaagcaggaactgatcacagcttgccaaatctagccctcaggtatcaggttgttgttaactgtaggtattctattactttttaattcgcaccaccctgcaatctgctgaggcaaatagtagagaagactctcaacactttctccagtgtgatgaacactgagagttatcagtttgctagagtggtgttgattttgaagcttcttttgtgagaactacctcaattaggtgtctgatatgctcagagtacctgtgagtaaattacagcaaccaaaatatttcagtagagtagaaaaatgggagaaaaccagagaaattgagctattattgaagaaaaggaaaagacaagttccacaggtgttttagagacctggggctctcctagatgcagtgaatttcactcaattcatgcttagctcattctctcacacaaaggcctctaaaaccactcacatagccaaatcagcagttacaaaattaccctctccccacgctggcttcactgaccaactacccttgggcatttggcctcttacctctcctagcataaatgaagcgtacctcaagccttacagtgtctccattcttctttcctcttgttaaaagcaaggatggattacggattgttttggaagaaaatgtaacctatcgatgtgctttcagtagatgattagttttttgttcggattaatagtataagaaacactatgaagaagttgattggacaactggataagaattgcttagtgattatatcatttgttaattcatatatattttcttcgatttcgaagtgattttctatcattattcagacaaagagttcatttggtttcctgaaatcactatgttcatctattggaaatattgtacaggaggggtgaagagcattcttttatcctcaaacccgcgacatctttgtggagaagcattaaggcaaatggtgaaaaaagtactcaatcatcacagttacctactggaattacatcaagtttacatctttctcagactgttgaaggaaagagaaaggtttttactgcagatcaatatgctattatggtctcatgtcggtgcaactattctggtaatgtaaaccaattagctcactttacaaatgaaaattattattcactgtctcttggcttattgtttttgtgcttgctctagaatcaagaatgtttttcaagcagcccacaagttggcgaccacgtatctccagggatcttatgatcactgttgcatctgaaatgtctggtcaacaccggcctaacggaggatcttatcagcttcctgttcaagttaaaatatgttttacattgtatatgttggtgtttgcattttccccctaagcttgtgtaattcatctcatgtataattggtacaatttttcaggtgttaacgcttcaggcttcaaacttgacatcagaagatctaactttgacagttcttgccccagcttcatttacttcaccaccctcagtggtctcattgaattcttcacccacttcacctagaagtccctttatcagttttcctgagaatacaagttcaaatggggataaacgtttctctacagtgcagaggttgagctcagcacccgcttcatctggaaatcagaaactggatgatcatagtggagctcgatctgcttcattcaatgagttggcttctcccagatccgacatcattcctagtagcagtgtaggttgtacacacctgtggttacaaagtagagtaccgttggggtaatttactaatactttactctcatttcttgtatgtaattattgtctgttaaataatttttccatggttccttcagatgcgtaccctctcattctactgcaaccatcaagcttgagcttcttccgctgaccgatggcatcattactctggacaccttacagattgatgtcaaggaaaaaggtaatctctttctgcttatgtcttgctctgctttttttacagccccaccattgaaacaccaactccattattgcattccccaactgacctttatactaatgtataataaagctgctatcttctttataagtttagtttgggtatgtacatctgatactgatattactgggcttgttaatttattttccaaaatcctcattcagaaaagttttagcatatttgctgatgtttgtgatttcacataacaggtctaacctatgtccctgagtactcattaaagataaacgcaacttcgagcatttcaactgggatttgctaagatgggattgctttaacatctgtaccttgaaacatttatctcaagtatggatcttttttcatttgcttctgatgaatgatatttacattgatattctataaagtatcagattttgtatggcaaatttgatgtataacttcaatactagaaactgtaatctttgtagatgtacctcaggtgtgtgaatatacttatttgatactactcatgagaaaatcagaaataaggcatgttaatcagaaataaggcatgttaatcagaaataaggcatgttaatctatggatgttaagagcatctctaatggtaatatttttggagaatgcttgatgatgtggaaaacttaagtggcaaaatatagagatgttatactattggagataaaagaatactatttttgaaatttgaatttatgcacgcaatgacattgatgctatgtttttttatacaataaaaaattaaaggtgcaatatatatatataatagtttaataaagaaaaaaaattatatatatatataataatgtgtgagatcataattatagtaattttaaaaggtattgtattattggagtgtttttagaagtaaaggtgtcatgtgaaagaaaagtaaaataaaataatatatatttggataatgcgtagatatatactatatagtattttcaaaaaattttactgttctaataaattaatgtttttgaagaaaaaaaaatatgtatagttacactaaatgtatttctgcagccggatgtaccacaaccatcagatttctacgtagaaattacattatccaatgttatttaatatatggatcactaaatttattaattaggtaagtaaatgtctttttctaaaaaaagttaaataaaatggtaaatataataaattagttaaaaagaatcataaaatacttttattacaccaattttattttttaaaaaattatataatcataagatttaagttatataaatttgcttctttaaaaattatataaatttgttagtattcacattaatatgtgaaactatattaaaatggttgtaataaaagtatataatttattagtttataatttaatgatctaaattcaatcaaaacaatgagaaatgttgagcaactatgtgttatatggtgatatctggttatgggagaatctatgagaaaggaggagaacagctttgtgtgagtgaaagttttatt

SEQ ID NO: 14119 - DNA, 8338 bp, Cannabis sativa
aaaataatatttaccctaacaatatacacaattatataagaaaattcttactgtacaatttttgtgaagcttttcaaatggaatgatccacactggcacacttttattgatactcttatttatatatattgcctatagctatagatattgattaacttgcaactgtagctcaattatacacttttctattttatcttgacatgatcatcaggattccgaaccaaagatacgcaaaacgacaacagcatttatagacatcaatattgtttaaggagaattattggatatcttaccaacaaacacatatatcttccatcttactttttatgacactaaatgagaattaatatttctttttttatattaaaatctgcttgcacaacgacgacgttaccaacaatagtagtggatctgtattatatatacatatataagatatatatatattatatggtccctcagtcaattattgcattgtaaagacagtatgagtggaagtaggcttggatgtgtactgtgtacgtttactagtattattatatatggaaaagattttgttcactttcacgaaaacgaaatgtattctgtagtacattaaatgagttttagggtacattagataagtgtcaggctaagttattattttttaaccctaattactcctaaatcaatctcaaccctcagatcaaataactccttcatctaacggctaccgtacatcacgaaatacattccgtaaaaatacagtcataagacaaaatcatgtacctatataaatatatatatccttgtcaaacagaggcaagaggcaactttaaaagagtacgtaccaaattagtaagagagagagagagagatggcaagcggtgaacaagtgtttatgatcaacggtggaggagaagatgagaacaactttcagagtaattccacgttacaggtccctagtcatcacaattttctcaatttatattatgtacactctttatagccttgtattatttatgaactgcaaatgcatgaatttattttatttgtggatttaattaataggtgaaaaataaggttattttaaattataaagactctaacttcgatgatgtatagcaaaaaaatggagtagacgcgcagaatttgttcatcaaggaaggaattctagacaagttagacgtagacaaactcattgcttcacaaactactccaaagacattcaccatagctgatttgggatgccctgtcgaaatagacacattcgccgctgttcaaaatgtcatcgacactgtcaaacacaaactcaaactccaatctaatactgctcatcaatatgaacatctctcccataacctcgagttccaagtcttgataaacggtccaacctctagagacttcaacgctcttttcaggtctataccgatgaacaagccttcctactatgtagctggagttccaggcaccttctacagccgcctgttcccaaaatcaagccttcattttgcatattcatcctactctctccattggctctccaaggttccggacggcgtaggagatgaaaggtctccggcatacaacaagggtaagatctactgtatgagttcaccaaagatagtagcggatgcttatgaagcccaattcactagagatattgaggcttttctcaaagccagagaattggaggttgtccagggtggacttgtagctttctctatcgttactgtgccaactgattctaagtgccttacgcctactttctttgagattttgggatctgttctcttagacatggctgctaaggtatatacactatctactatatctctcacagttcaatatagtcctgtcaattgtagtagacatggattcgagattaaaagctttattgtcactagattgtgatatttcaccaacttttttttttattcttattattataaatatacatgtagggtattacaagcaagaagaaagtaaacacgtttaacttgccaatatatctgccaaccccacaactgttagagggtttgattaagagaaatgagaatttcagtattgagagaatggaacaactatgtcgtccaagggaatcgttttacgaggcagactttcctgaaaagctcaccttacactaccgagctgttatggaaagccttttcaacgatcactttggaactgaggtagtcaaccttatgtttgacaagttcaagaacaaagtcacagaaacagctgtgtttatggacttgacccacaagcaagcgctcgagtccttcgttcttctcaagcgcaaaccatagaaatacaagaaatctgtaatgaactattatttgctaatgcaatgttacttgaatttgaataaggacaagcaaacttcaagattttataattaaagtcgaattcatttataacttgatccaaaaatgtaagaataggtttaaacaaatcatagaaaaaccgctattttacgtgacagcttctaaccgttattatggtcagcattttttacattcacataatggtacttatcataaaacttgacatgtcaacatattaattattgattcaaacctacactattgattgacagcatctatatacaaaagaatcatagtttgttcaactcagtaagtacagctgcaaaagagaccaatgtatccaaagccatagaaaaataacaaacagagatttcctcttctaatctcaatactttttcttgaaattagacaaaattgctttaggctgtttataactataaatcctacgagtaaacttaaaatatgagagtttgaacctactaaagagtatgtgcacaggaagaaagtgtctacttacagatgtttgttatacaatgagtaactctagtatcatctgatattttcttcaacctcgaaatttctaagagtcgtgaattatcttattgtttcattttcttaggagcagtgcctaatacatcaatgaaaattcttggataaacttaagcacccccaccattttattcatttttctcaacagcaccaaaaacattacttccattggcatcacctctttaccagagtctcttcagtatagaatttgcttcagcattgatccattcagcactgcactagcagaaactagttccattatctacacaaccattaaagatcattcgtcctcatggtagctgagatatattgacatccgttttaacaatactcgatgtgtataaccatcaaactactaaatgcagtcaatcatgataaacataagaagcgatgttttctttactttcatctagcttcaaagaagtctgtcagatgatcagtactttaactcactcatgctttcaatatcttatccactttatgtacatcaaaagttggaccaattccatccccttgtgatgcaacaggcatagttataattgatgaacaagctcttaaagatagggaatcagcatccttagagttagaagtaacattgggcttgacgtcattctgatgctctaccgtgcattgctctacaaactccatggttgatgaaggcatatccatggcaattgactccatatccatcgcactttcttgactgcctctctcgaatacatgatctgtagaaccgatagtaacagcagcatcttcagaagaaagctgttcagtttctgggttagacaatagtttcaccgtgttctcaaaatcgataccattagaaacaacgtcatcgacagagtgtaaaccgggtggagaaatacaaatgtaagatgggtcaatatccatctcagcacatgtactttcttcaccaatattttcaccatacatagtatcttctccaaaactctcaccgcacgtaccattttcactgagatcattcaagtcagcacctgcatctcttgtaatcctgtcaatggcctcatgtctgtccaaagaacgattctccttgtaagccaatatgtcatcacttctctcatttacaaactcttgaccttcatccaaagaaattggctgaacctcactaatattgctgctttcagtaacaagtgcatcaatctgcttctgtacaaagactgctaatgaaacagcatgatcccgaataagagaatcattgggtgggcagtgtagcatattctttagaactttatgatactgcagcatgctgatggatggcacagcagacttttttcggcggcagatatcaatcacttttagcatatgctcacacatgttgcctatttcagcccaacggcaatcacagataccaaactgtgagccaggattccatacaacatgaaccctatcccgatcaagctgatcagtaactttagcacttcgaccttccagaacaacatcagaatctgaaatcttcaaagctttacgccaatatgttaacccactcacccactcctctttcctgtatcgggcaaacgcatccttcccagagtactcatcaagccaaaaataggaatgcactttcgtattcaatttatcgaccaaccaatccgttctttgataaacagcagaattcttctcattcaacaacctaaccttcaattggttgtggtaaaactctatcgctgcagtggtctcttggctagagacaggaagagtttgtagtgcaatgatccacttccctgtgtagaaaagaaagctctcacattagtaacttctgtggaattataatctagcacactatgtgaactcggagtaagttttatctttcactaaataaaataaaatcactaaactatttgcaaaaaaacaattatattaacagaatagatagtctacttgaaataattaatacgaacctaatctaggataccaagttgcccttaaataatccataaaatctgcctcatcaacaaaatcttccatcaaatcctcgaacaagcccatggttccttgtccttggcagataacatccactatctgcccaagtcgtctccatatctcaacccgaatatcattttccgtacatttctgcattaagtttttatgccatgcatgacgaactcgccaaaagcttatcagcacagtgcattgaaaaacatccctgaatttaaacaagcattaatattataacaatactcatgagaaaatatacactaaatatatatatatatatatatatatggatgcactcttttttaataagtattagagaaaaatttgaattctatgcttaattttgcatctagtaaaaaaaatatcatcatttacattatataagctgagattgttacattgactaaaaaaagataaaaaaaaaatgaatttgagttagatatttttaatataaacatattttttgatatattgtaaaaatagagatttttattaattaagtaactaaattaagtatggaaactcaaatcaaatttcttttctattattggtgattggatcaaaatctaatggtttaatatttctaaaattgatatctatagttattttttttagtaactatgaagaagagttccatatttataaatatataaatatatatatttatagatatgagtcacctgaatcactttattaagttcccgtttaagttcattaataaaatacaaagaactttataaagtaggaacaagaatcactccctattaaggagcaaaaccttggaagcatagatgccccgtatccttgtaggactcactatccagctcattacttgagcaaaagctactgagattacaaaattcattttgaagtttgaaagaatgagtaaagcaaccaaccttatagcatggacatcagccagaggatcatcaataataaacccagccaacttccatgtaggatctttcgtttgaactctattatgtagggctcgcaaccacttatctgtgtcggaacttgcaaatcttggtgatattatccatgcgactgggatggccttgttgtcagggttgaatacaagaagactgtgaactggatactagacagattgcaaataataaacatcacaaacaaacttaccaaaaatgaaactttctcttctacaattctcaaaataaaagaaaaacaaacagaaagtttacaaatatgaagaaaaaaagcaccttcaatttgtttgttccaaactttgaatcagatactaaaaggctgcgattgccaaagcgaatcatttgttgcaactgccactctgtttggatgcccagagtgaaagggtcagaatcagagaaatcttcaaaaaagaaaacattaccctggtgaccttccacccacatgctaatgctgacagaatcatcaatgtccaattcatacgtagaccgtcggatgcttctctcctgtctacgaacataccgatgagttaaaaggtcatcgcgattacatggaccaccctgcttttccactgattcattgtgtctctgcattatggtttccacagagacccccacatgtagcagagataacacacgaagtcgaagatcttctgagatgtaaggagcaaaaacagcccgtgttccagcagccttcttatcctgcggaccatgacatggtattcctttcttatcaacatgcttatcctcattatatatgatgagtgctactgaaggttcagcaattaaccgtttcacaataaagtggcaggtgcatcctcttttggtatttggccgaccagcattttttttcttggggacatatgtgttccgactaggtcttacaatgccaccctttcgatggtcgtcaggaccaaatgaacaccaatatctacacatgaacaaggtggcctaagataacaggaacataaataacatttaaaaacaactagaggcacaacgatggaacttacaaaatatattcaagaactccatcaacctttggtttataaggtgttgttgggcgtcgtcttcgccttgcctcaacatgaaatcttgttgggcaatcactgtttgaggattcaccccttacaaaatcatccactctggcaaaggggattagagccactctatctatattatcacgccatccctccacctttgaccacacgatatcattagcagaaaactccaaggtcggaggattctgtacagggagtgatagaatctcatcccatctagccatttgcaatgaactacctgatttcaaaaataatcatttcaaatagaattagaaatgacaagaaagaaagcagtgaaatatggaagtagcagaatttagaatcttaaaccccaaccaagatgcaacttcctctagccttaattcataatctagttcttgaaatccaattaatacaatttaactaattgaattcttcaagcaaataaaaaaaaaactaattggaattcagttgggtagaaaaattagggttccacagcggacaggttaagcggttttgttatttggcattttttaaaaactgcaacccatacctgcccagcaagtgtctaggttgggaggttttttaaagggcggctgtatgcaattttttgggcaggttgggttgctaaaaaaatcaaaatttagtatattgtcaaaagaaaaaaattcaaacaaaaagtttgtaacatatttgctcatcatacataaactcacaagttaacaataataagtaaaagtcacataaaaagttcataacaattcataaagtccatgacaatccatagtagtccataaaatgttcataacaatccatgtccgcaaaaatttcataacaatccttaagaaacacacatcatattagtgatgttcatcccgatccaatctgcacttttttggtcaaacaacatccaatccgcactaagttcagatcctaaattttggattcaatccaatctgcatgacaatttaaatccatccggatcgattgttttggatctttttttttaatgttaaattatttaatatttcattaaattgcagaaaaaaaaaatacacacacaacaatagtagcacaaccagaatttaacaaacactagaaacaaaattaagaaaaaaaaactattgtttcttaatcttcaactccaacaacacattacactaacagtaaaaaaaacaagcatctttcatattccaaatccaacaactgaacaacccacaataaaaaacaaaaacagtaagaataagaactaactaaaaacatgttattattatccccccaaaaaaaatacatgttccaaatccatttcaaaaagataaatgttccaaatccaatacccgatgtttcaaatccaatgcttcatagattttctcgcatataaacaaattaggattacacgccctttttgcctatattaacttatttgacacatataacaacaaagttgacacaaaacttgaaacaatctagtgtccagaacaaacaagctacgggttgagaaaggagattaaagttagaaaagcattgaatggggaatatagtc

SEQ ID NO: 14120 - DNA, 6008 bp, Cannabis sativa
  modified_base (2236)..(2237): a, c, t, g, unknown or other
  modified_base (3232)..(3234): a, c, t, g, unknown or other
acatctacttctgatgactttttcagtaactttttctggcaacagtgacttttccgatgacgatgactttttcggcgacttttccgacactgatagtttttcccgcgacttctccggcgccggtgacttttccagcgactttttcggcaaaacttattattgtttacaaatatgagatttccatatttttatatttttttacaaaaatatggcataaaaaaatttataaatgtaaaaaacaaaaaaacccatatccccttagctttatttatttgttagcttttctttcacataattttgtgttaatttaaatatatattttttaaaattttagttgcatatatatataaatatatatttttattttttattttttttttgtcttattttaatatttatttttaatatatttttttttagaatttgagaaaagaagattcattattttctaaaaaaataagtataatttaaacatataaaatttatacaaaataaaaataaaatcggatgcttttataatttttttgaggtttaaattctccttcttgtaaataataataataaaaataattctgcccaagtgtgccccttctttaaatctccacacaaaacctacccaaagcacagtgttctttgggtcctcaagttatagtggaacaaataaagtaaataaagaaagcagcaaaaactgaaaatgaaacccatagttttggcaaattgttcagtgttctttaattaaattagaaatttagagctagcctatatttttatgattaaaattatttccagaactgagtgagacaattgttatgggatagcatcatagcatgtgattcgaaattatggtgaccataactaaggagcaaaatgcatcacaaatacattaccaaaaaagagaaaaggtaaaaaagaaagaaagaaagggagaaaaatcaaaggtggttttggttgatgtgtcacaactcacagcctacacccctgctggaacccatatgcattatatatatatgatgtccctactacacctatctctttatttattttactttgtttctttgtttgtattcctctctatcattctttctactcccaaaaagtagaattgctaagtctataactctgaaagcaaaacctgaaaaataaaatataaaacaagtgtccagtctagtctcaaatgtaaaagagtatagtcactatacacccaagcaaaattcaactctacatgcgtatatggaccctagctatatcatgccaatacatatattttccttttgagtaatatatttgcacagtaagagttaccacttccaatagcccttttataatagaaatttgaagaagtggctccttctacacatgatgtaaactcttttttttattattattttaaaatatctgtattgtctttaaatgaaattctacatgtagagaaatattatctcttatttaaatatgttttaataatatttaaattttattttattcttttttattaatatgcatttatggtaaaatatattatttaaatgatttggagaagttattggaaaaagaaaataaagaagttgtggatgacattctgtaaaaatttcatgtaaaatagagaattgagatttcggtgatgtggaatttctataaaattggcatttaaagacggttatttcaactgaatagtaaaaatagagtagctaaaatgtattttattagttttgagttcccgctcgctgaaaattgacatttaaaagcgattattttataaaaactgtaactatagagtcccccaatatttgagctaacagttttttatttttcgatgtgagctttagatgggatgcgacccaataaccaaaacaggcaattaataagcataacaaaagaacatattccttttcatttttttagaaaattcggaagcataacaggtgtattttggataaacccaaaaatcataacctgcataaatatttgtacaaaaatatatttggaactcagtgccccagaacaatccagaaaaatatgcagattaagttttcaatttttcaaacaatttacaaatcataaaaattaagaatatgtctaatgttatacaacacttataaaagtcaagtccaataatcaagttgagtccctacctctcccaagtcgttaaactttgtccaaaagatgatcttaagctctcaagtcccgagctccaattatttagtcaaatcttagatattactctcacctataccannaaatggttaaataattatcatcatcatattctacatccaaaactgagtccaacgacatataacatgactatatttaatatttggagtttcgaagcctcacctaagcagtgtacattaacaatcagtgtttgtaaaaatcgttgtaccgaaaatgtcactaaaaataggggtagtgtatatcaaaatgaccacctcgatgagtagatcacacccacgccaaccgtttgtcaaaacaatgcacgatgccatcgaaaaggggtagagctacaaaaatatcactacattctaaatctaaaccaatacaaatttattatcaaaccatcaattaatccttaattaagtactactaatgaagtaataattaaatgactatttatgtaactagttatttaattaactaatgaattgaaatgttataattttttaaacagagcatacgattatatagggacatcaaatgcgtatcttaggtcgtggccaggaattttactagcaacttgtccaagacaacctaaaaataaagaatgtggtttttatgttttgaaatacataactaacatcgtcgcacgtgcaaactccaaccgttatatacaaataaaaaaacaataagttttaattattaattagtatttattataataacaaataataatatatatatatatatataaactaatttaaatttttacttttttttttcagtttggaaacaagcaggaatacaatccaaaaactgatttattaccagtacaacgacagtagatagaatagctaatagcggtgattcacaaagacttggacgatttatgctaaaaggcctaagagcttttctttcctagattattttttaggttaacttgtagttagatttattaacttgttaatacttggattaattttacaatatttgtgtaatatttaattgtaatttatttaattatttctatgaaatgaaattaggtatattggtcaatcataaaattaatttaaataannnttaatttaccttttaaaaaataaatatctaatttaaatttaatttaaataatataatatgtaaattaataaatatataattaaattaaattaaattaaataaactgaaaaaaaagaggtaatcattagatatttgtcgtcggttgttatgggtgtatatgacgtcagttatttgctaggaactaatgctatatatgtacccttatggcgtcggttcctagcaaataaccgatgccatatgtaatcctatggcgtaggttattttagaccttacagtgttacctagatcagcatcgctagtaaattttaccaaaaaccgacactgaaaggtcttaaaaatcgcctctaaaaggtgtttttatagtagtaaatgttttagggtatagcttaagtgcacatactcaaataattaattaattatgtatatatagtcgtcaatactagctaactttgttaagaaacttgtacaatattagaatttgtaaataataggaaggagagagtaagatggatgaagagcttagagaggatggggagtaagagggatggagagaataatttatctcatttgtgatatttgttatgaggtatggtgttgattgggagaaaaaattaattggtaaaattacgaaattgtctcttaaaatataagtattaatttattgttttttaattatcttatttagcaaatttgattttgttttaaaaaatgaaaattaattttgtctaatttctaaaatcctcccaaattggaagagtgttttgtaaaaataatctttatgaaaatttttattagtaaaataactttgtatggttgtaaaagcaaccataaattacattgtgcgaccataaaaaactattatggtcgcaaaacgatcataaatttacaccatccgaccattatatggtcacgtagagtaaattaagttaggttattatataaattttaatatttcacactcttaatttgacaaattttcacaaattggaagaattatatttttatctccccccctccccttgacaaagagaagtttctctccttccctccctctccatccacccatctctccctccatacctaccaaacatagtctaagataaacatatacctacatacaattctctatcttcatcaatagtcacatattgaattttgtgctctctcgtgacctagtacggatcactagtgacaaatatccaacaaaggtaaaaaaacctcaatcacatatatatctctgtctatgattcaaatttcacacaaaacacaagcatacaaaaacaaaatacacaacttggctgcaataatatatgatcatatccttttctacgtatactctagctatctcttccactcaatcaaatccatcaacaagaacctcacaattcctctttaaaaacaaccccaccctcctcccaatagggcacaatgcatctatacatcacaaaataatacaattaattatatatagtatagctagagaatatatctttcatatatttttctctatatatctctctttctccttatagccaaaacaataataataaaataatatagctagtcaatatggcttcttctggtaacaaggtttttgcagccattgtaataatgtccatccttaatttgcacacttgctacgcttgtcacaataccaataagtgcaagccaccaacaccggcgtcagctccgcccgcggaatattgcccaaaagacacgttgaagctaggagtgtgtgtggacgtgctgggattggtgaatatagtggttggtagccctccaactaccaaatgctgtgctctcctccaaggcttggcagatttagaggcagccttgtgtctctgcacagctcttaaggccaatgtacttggtatcaacatcaacataccagttgctcttagtgtcctcctaagtgcttgccaaaaaacacttccaccaggcttcacatgccaataaattaagatgaccaccctaccctttacgtacgtatacgtactaattaaaaagaaaaaaaatcgtggtggtacgtgtcttgcatgtttttgtttttaattgtgattttcttctccaatattaatttgttggagagggagatcgagtacgtacttaattagttaatgtgttttattatattttaattcgttttcgataataaagtaggcacatctctttgcctatgtgtattgtgtaagatctggttttaatggaatgaataatacgtacgtaatatttgttattgccttcgaaatctgcatgacaatgcacaataaatatgtaatattacataaatatatatatatatataaaattcgaaaatcgagaaatataactttaacagtagaattaataacttgcacttttggtttccgtcaaagaaatgtcacttgtgttaatgtgctggcaaaagttagtattgcgctggtaaaatagaatttacttgtgttgtgttggcagaaggacggtattagaacttttgccagcataaaatgaaaagcgctggcaaagatgacttttcccagcacgtaaatatgctggtaaaagttagattttagccactgtaaatgtacgctggtaaaactttgacctctttaccagtgcagtttacaaaatgcgctgataaaagttacatttactaccgcagtaacgaactgtgctagtaaaagtgacaagtttctcaatcctaaatgtgaaatactgtggtgtcaatcacaatatacaatgttgtatactggtatacaattaaatataaattaaatttcatatacttaatttat

SEQ ID NO: 14121 - DNA, 6054 bp, Cannabis sativa
  modified_base (1999)..(2023): a, c, t, g, unknown or other
cattataattatgtgttattacattatggtttgatgtgactaaaccacttgcattcctcatcatttttcctttcgcctttgtattttcacttggtttttactttttttttcctttgctataaatagatactaattatccatatatgagatgtgatattttccactaaccaaaagtagtacatattcaacatcaatcaaattaatacttatcatttaagatcaggaagtagtagggatatagctacctagctagcttaattaattggctggttaattaataataagaacttttagaccagacctataattacctcatacaactttcggttacctttaaaaagggcccttaaaacctatataaggagatatccttaattttggttgctagaaaggaagctattccattagagttaatttatatattatattaattcataaggactaattcatattatattctcttatcagttcaaataaaataagtataagataatacttggatttaagttgtgacttgaaacatcactgaaaaatgaatggatatatatattttgaatactcgataacgcaaaaaaagaggcatgaaaaatgtgtagagaatataaagttcaaaagaatcttttgaagggggggtacaattatgaactgttcacagcgcagatggtagctaaaactagtgaaagagacttgtaataaaaggggtactattaataatgggcttaattattaaattatatatatttgtgaaggtcaaatacatacacgagtaatgaatatgagtgagctatgatattaatattttaaatcgtaactctctcgttttaaaattgatacatttagtacatatttgttgtgcacatacaattactcaatatttttgtgataacgcgtttttctattggcttctgattattgtttctgcatgcacattgctgtaagatggtcccaaaagaacgacaatgagcccacaagatcttaatgctttctatgtgctagttcatatggtatggaccatttcttttaatattaatttgttggtttactactttttttcttatatctatatatatattataattttcattcttaatttatctcattcctttatacctgcatgggcgtttgtttgtgtgcctaggtttctttcaactcattcagaagaatcttaatgagtttcttacactaaataatcatgtgtttaattaaattaacattaccactaccaggttagttattacaaaggggtaaaatcatatatatttgaatgaagtgatctgtcataaaagtcatattttgaaaataaaaatctggaagaatcgatctacaacgaatgattggaatgaaacatatatatctcgatgcttctgcatttaatgcattcgattgcacaccaccactgaaagtgacccatctatctagtacttataatttagtttatttattaattgaatatatatactaatattcaacatttattgaaagttacccttttattggatatttgttcggaaactggtcagaaaggagttggcatgtacgttttcttttagttattatttattattattgtttttctgagtcagttggcaattggcatagtgattaaatcaaaccaacttctccttaaagtgaaaaaattagcatatatcaaagactgaaatttttaataactataatgtaaatagactttgagacacaattgagagctatttttgttataaacaaagaagtttacataaaatccttttcaacaaaatgaaaacccaagtgtaagagtgagaaagaagagtcgtttatcctttacatgaaatagtagtaaaagggcaaaataggaagaacaaagacaaaccaagaaagggaggaaaaagaaaacataaaaagtattccatctatagccaaatatgattagacagaacatataattctgtttcaaacataatatttttcttttttttctttcttcctaataagtgcgaaatattattattattattattannnnnnnnnnnnnnnnnnnnnnnnntattattattattattatatttttcttttgttggtttcattggagagacataacttatgaggctgcaattttctcaaagtgtccaagcctgttatcagacaatctggaattgaaagcagattttttgtactcaaaccatgtgaactctttatacaaactttcttcacctttcatgagacaaggcaatggagctattttctcacacaaaggtggtcccccaaaatagatcattgaaactctagactgtaacccgtttgccagaactctgtgcttcacactctggaatctactgttagtcatcacctgcagtattcctaaacttttttagtttactcaaaaaaaaaaaaaaaaacacccataataaccaataataaacccatcaacaaaattaataaaatataatatctttgaacagtgcacattatcttccaagttttctattttgaccaaaacaaaaaacagaggattaagttcatctcaatacttgggaaaccaaagcagccttttactttcttcctttccttccattttgactatataatattaaggtggaagttgaaaacggtcaaaagtaaaaccctttttcagtttacacacacaaaatcttattcacaatcttatccatttgaaacatgatttgaactttagaccttaaagttgggtcccaacttttattttttaaaatataaatatatatttttttcgtttgaataatcttttaataaaaaagaatgattattttgttgtaagtttgtaattttatgtatatatttccatggtataggtatatatatatataatatagtgagtgagtttattacctgtagagagtcgccgacattgataaaaaatgagtcttgatcaggtgggactgaaatccaactgtcatccctcaaagaaatttggaggccagaagtgttgttggatctcagaactgaaatgatttgtgggtctgtgtgctcaccaaacccaatcacattcccaccttcaacctctggacatggcggatagtgattcagtctgaaaacagagtcactctgttcatccattaacagcttactcagcacattcctcggctgaatcttcagcccttctgccatcagttcaagaatctcacacgccattttcttcactgccagtatatagtcatccaaagcaaaactgcaaagaaaaaaaaactatcagaaaatgaaagagaaaaaaagagtgtttttttaattggttctgtttaaagaattgtattgtaccgtagcttctgtgggtcttcgccaaaaactgatttaaacctttcagaattaatgaattcagagttggttgttaagagaaggtattcaacccaacccatatcgccatgtcgaccaatcttcttgtttccgtagccaaaagggttgggaggccctgctttctctttctcggaaagtggcaggggaaagaatttgactgcttcagattccaacgtcctgataaaatccattggtacgccatggttgatgactttgaagaatccaaaatcttcacatgccttcactatgagttgctttgaatcaggttgagaaaggtctattaagggaataccaccgtatagtaagttattattagtgcctatacaatttctaaggtaagggaaatgttcatgttgggataacaccaccattgtagttgtagttgtagtagtttgagttttctctattatctaattcgtatgtgtttaaacaaatcaaaacttttgtgggaatgaaaaaaaggcaaaaaaactttggattgatgaaagaggagaattctaagacgggttttggttgaagtgatgaaatgagtttgagttttttgtggggtttgaagagtgagtggttttagactcatttagttggctatttatacgaaatcgggagaggaaaaattgtgtgtgggcggcgtgtttgtgtgtacgtgtggtgtcctatgagtgcgtgtgtatttatgacatgaatcatcatcatcatcaactaatcacatacatttatatacgttaattctagtaggatcgaataaattaagttgcattaacataattatagttttctttttttaaccataatttgttgagaaaattaaacaatgtaattgatggttattgtataattaggattctttgatgttgcaatgaatttataccatgttttaatcattattgaattgggtttactgtggttttactcggaatgatgtgatgataggtgtgtgaatgaaaaaaggagtcaaatctagtcatcaagtcgttgagggagatggataaaccactactatactacttctacttcttcctcaccatcgaacacaacaccacagacaccacccaagttttctattgggaatggtcacatccacaacattctttcttttccatagttatccaatgatttattcatcttactcttaagtaagatactactgctactttttattttaaaaatataaactttctttttcttttttacaagaatgatttagaattttggatggtactcgtgttgtaacaaaaaatttaaagttgatttgtgatttttattgaaatcattataatgtaagataaagaaagtcaatagtatcactgccactcaaaatcgattattgagatttgactcatagataggctcaaactttctttcaattttaaaatatttatttcacgtgtcttggagtggtataagggcatctccaatgctaataatattgataggactcatttttttttttttaaaaaaaaaaagtagttctaattatattcttttattataattttttagacaatctcaaatacaatatgtaaaatttgtactaaatttaataaaaaaaattgaatttgtgttatatttatgctcactatttataattatactccaatataaatatgtaaaaaatataattctaatcaaaattaactcatgcttttttttttctaaacatacttctaataatatcatataacaattaatcacataataagcaaataatacttactattccatgactggagcttatcttctgagcaaatgtacttattcagtcaatttttaaaacctttaaaatcgtgactgctctgatactataatgtaacgtcctaacttatatggacgttaaatgtgtgcatttataaactagtttataataataaactatcaatttaagtaaaaatggtgaattaaattaaattattacaaactaatttgaaatataaaatgtcatggcataatctcttttaagaatggggattccctttataaaatattacaaaaaaaaaaaaatgacatcacattattttaacaaaatacagattatagtctctaacattggaaaatatgaatcccgataactcagttccacttgtcgaataagttgatatgtatatttttgtagaaaattcttgactcatggttgaccaaatattttccactccttacctatatcacataacacccgtgagttacaaagacttaacaaaaaaagtaataatacaacatcatgaatcagtacacaggtatcatcagttatagtcaaataatcgcatattaatcatataagcaaattcacaaattcaaattaacacagatactcatcagttcaagtaatcacaagtatataaacatccaataatactcaagtacttgtctaataagacaagttgcatctgttactttataaaataaccacactcatagttgtctaataacacaaccctgacacctaacctaacattcaaatatttatgtctttatctaataagacattcctgatacctattccggtatccaaaatgtcactatcgttacttaatgataatatatataagtgacaagtaaaaatcttacaacagttttagtttagagtcatgaataatcatcattgtctaataacaaaatatcttcatcattttgtcgtgatgaattcaacatgtaagtatacatatcgttttaacaagtaatactcaggtaagtgagatcgttcccacgaggactgtaattaagtaccaattaattaaattcttgtttctattt

SEQ ID NO: 14122 - DNA, 6865 bp, Cannabis sativa
caaaaatattgtgtaaattttataatgtgtattgtgttaagtttttactattgttctacgattattttttagttattttactgttgtttttagttcgtctgttttgtgttctaatcttgaaaagaaatatttttataatataatataatgtaatataatataatataagaaatttgagtgaggcgaggtggcagtaacgaagtgggcatgagaattaggctcgcacaagaaagaaagaactccttccttggttggtggtcttaactgaaagcgaaacttttgaattgaaatttcgataccaaaacaaaaaacaacgttgttcttttggattcattcacttctcacttcacttgtccctttccttcattccattttccacataccccaattccaattcatccttaatcgcaatcattacgttccattctttcatgtaacctcccaaaccaaaaacttccattcagatcggattcttctcatttcctccatcttcaaataggtatatgtgtttacataaatgtaacattaagtatatttcttcagcttttctttattgtttttttcactattgatggctctttatgctttgagacgattcttatggatttgtacaaaattgtgatttgtaattaagctgtataaattgtttttatcagtttctttcttcagatgggtattctttcttttgggtttagtttaatggtgctgtgttttttggttgaggaactgaaaagtgaacaaataaaaacaaaagaaaaagaaaagaaaggaaaaagaaagtttctttttcttttggaggtggtggtgacgacaaatcgaaatggaagcgtttgaattagcctttatttcgtcagttactgcgtgcgaatttctggttagaaaaattaacacaaatactataatagtgtctttcctatttattaaaaagaagaaaagtggaaaaagaagacaattgggtttttcttttgccctgcctgggaatttttaaggaaaaagggtactagactttatgacaagtttagaaataattaggatgaacatagttttggctcttgaaagcacttattaatgatttttataaagttataaataaataaactgatgggttgtagtcattgatttttgcatagcagcataagaaggtttgtggggtagtgaatgcttagtgaatggggattcagacaatggcatctcaaggtagtggtcagcagtctcattttcaaccatcctcattgacaaggcagaattcatggtacaacctgactctagatgaagttaataaccagctgggagacatgggcaaaccacttggaagtatgaatctccatgaccttcttcaaaccatatatactactgaagctaaggaatccagtacagttgatttggagaatacttcttcatcatcatcgcttcaacgacaagctagtctaacattggctacagccttgagtagcaagacagtcgatgatgtgtggaaagagatccaacaagggcagaagcggaggtaccatgagcacatgattgaccaagatagacagcctacacttggtgaaacaactctagaagactttctggtacaagcagggctttttgctgaagcttctcctagtcctgcggtaggattgcaccctattgatgcagtgacaccacccacaggaattgaaatgcatcccattgatgcagtgacaccttccattggattgtatcccattgatgcagtgacacctcccataggattgcatcccattgatgcagtgacaccacagagttatccttataagtttggtttgtcatcgccatccccattacttggtgcattatcagacccaacaattcctgggagaaaaggggattcatcggatgcatatgagaagagcatggaaaggaggcttaagagaaaaatcaaaaacagggagtcagctgcccgatcacgagcaagaaagcaggtatatatttttaagtgcagatgtgcttttctatgtgtcaaaaaaatacttttgcctattatttttgttgatttattcattgtggatatattcaggcttaccacaatgaattggtgagcaaggtttcacgtttaaaaggacagaactcgtggctcaagaaagagaaggtgataattttcatgtctgattttttaatttctagtatttggttgctaaggctttcctcgagtgttataaactttacgagggaagcacccaagacattaacactgcaaatgatttgacattgtatagataatttaagtatcattcatagtacccaagagggctagctctagtggcctagcatgtggtttgctccaacaaggtctgaggtttgactccctcttggattcctccacaggaattgccattatttcctggtcctcaaatattgtatcgttagacgggtcctagtttttgtcttttttaataaaaagagaaatccttagtttggatgtgtttgccattttagtatgtacctcagatatttgataggtaagtgcagataagtaaagctttacatccaatagcattatgagagagatgcactgggagttgaagtatagaatttttgctgtgttctgtgctggtttatatgcatgaaggtgtactgtgactactattaaaattaaatgatcatggagaattgtactctaatatagaaatcaatgctgtagacatttccaagaattcggacttaggtaaccgaatgatgaaataaagaagtctagcattttggatctaggttgaagtttacagagacttgaattgaaaaacaaagaaatcattcaaatggaatacaacaaaccatcctcaagctttataatcagttattttgtttgacattatttcagtattttgtgcttaaagcctttttctgtctacagactcaacatatatgacagaaagttatatttgttatgtaattagtgaaggtgaaatacaatgttaaactgttcagatgcgtaaaataaaatgtgtgatccctatgtggaggtttctattaaccgatcgtcttgctcatttccccctgtttaggaagttgagattatgctcgaagataattcctctcctgatccaaaataccagcttcgaagaacaaggtcagctacgttctgactcataacatgcaccaacgccattaacaaaattcagaattatttggaccgccagtactccatgtctttgcatcgaagctgttttaggattgcatcaccagatttcttgttcagtattctctgcaaatatggttctacttctacccatccattagtagagtttggttgtgtatacatgtttggttaactaggaatatataaaaatatataatacatatacatacagaacagcaaaagtgccatgttgataagttctggtcctgttttgctggtgcacactcgatagaattgagtgcatggtgtgtgtgtgtgtatgtgttggtgctcaatcttaacattctaatacatattaggttagccatggtagtttgatgatctttgttttctagatattacctacccaaattaacaaaaaaaaaaagactcttgttcgttcaactttatagtataattaataaggcttacactagttacaaaataatattgaggttttatttaaatagaagtagagaacgttttaattttgcttgagcttcaactttcatgtaatgaggggattaatcagttagggaaaaaaagggaattaatcactggcggagggagggagaaagtaaagattggggggcaaagtgtaagaaaactaatttagagggggtggcaaataagaaagaattctattaatacatttacatattttattcatactttcaagcagctactgtatttattctttataatattgtctaacaatatttaccataaaaaaattcagagaatatttcaatacttcatatcaaaacattgactatcactaaccaaacacctctatcttgtatactttcattctaatgctcttccttaatgaggtttaaagccataatacaaaatcaaacacttctaagaaaatggtgtagaatagatatgcccattacttagtgagtaatgggcatggctagtttaattctatagttccctaaagaagggaatgagaaaaaattctctatttacatgagctacttaatccgtgtgatgttattgtacaacaaatcaaccaaatccaaagagcgagctgcaatttttgttgttggatttcaaactgcgagccaaataggattttgactctctataatattataggtgcttttttcatacagcaaaggaacattttcgattttagtttgcggttgttctgtgatgatgatttgaatgcctgatgccttgatgatccggcctagactgtctggtggtcgaaacatctttagatgtatgaatctgttccaatttggctagaacatcgatcatcagtggcctatgttttggatctgtgtggaggcactgcacggaaagtgcagcagctgcttgagctgctttcttggagtattgaccacctaaccttgtgtccatgattcttaaaactcgtctattatcgcacaagaatggcttcgcccactctaccaatgtttcttccgcaccaccatttttatcatcgtccattgctcgtcttcctgagagcaattctaacaagactacaccaaagctgtacacatcattctttggagtcaagtgccctgcaattattgaagcagttttgagttaaaaaaaaatctgcctttaatacataataggaaggagcataaaaaaattaaccattaatgggaaaggagcataaaaaaaaaatccctgcaacattagaaaatcatattagtagtaaagaccattaatgggcaagcaaggaggaaagaagaccagactcagcatgaaaaaggagcacaaccaatgtgcttacagtagtaagttgaagtttgtatgatgtataaaatacacaaacaaaaatgaagagcctatatgaagattgaagataatgagtaagcagttttgataggagaatacaatagtttccgaagaactggcgtgaaacaattctctctagagtttcttaaagaggtcattggtctacatagttgcaaagcagtttactttttttttttacttcattcctagttcctagtttaaaatgtcctcttttttattctttcaaaacaaataaacagggatttgaataggttacacttaccagtagctacatattctggggcagcatagcctcgagttcccattactctggttgaaacgtgagtattatctccagtagggccatctcttgctaagccaaaatcagaaagcttagcattgaaatcctacataaaagtaaacagttttatcagacttgaaattcatatgcaacaacagcaaggaagtagcattagtttcattaatatataccgaatcaagtagaatgttggaagcctttaaatcacgatagatgacattagcatctaaactatgcaagaaagacaacccccgtgcaacgtcaatagcaatgctcatgcgtgtagcccaagaaattggctgtaccccttctgcaagaagaaaagaaatatggttacataatgcaaaacttgtttaagctatgcataataatcttaattcttctttcgggacaattccatgcttttgttatagaaaacctcaatcttctctaatatatgtttatcaaatcaacctagaaagccttgtgttattattttatcagcagaggatgaaaatgcaacaataataatagtttacacttaaacatgtttgatcaaattcgacaaagttctacccaatggaagttatttgaggtaaactatatggttgtcgcatttcgaacgcaaattatttgaggtaacgaagagtgtgttgggtttaattcaaagatggttagaaatacatatcaagtactggaaggagatacttgaacaaagaaaaggaattattgtagagttttttcaaggaatctctttatgttaattgatctataattcaacatctaatgactttaaaactattgcaatttatgtcaaaggagaaagaaaaaactggctttgttagctatatactgttggctgtccctactgttgcaatttatttactgttgttagcttttcatatggtcaataaaagaaaaaagagaaaaagggaaatatactaatactcactcctaaataaatggttttccaaacttccttttggcagaaactcatacacaagaagtctattgtcagactctgagcaatagcctatgagtttcacaagatttttgtggcgaagctggcctaaataattcacttctgcctgcaagttgaacaaagagtcaagtacttgagattcaagcaatcaagaaaaaactaaagaaaagttgggacctgatttacacatacaagccattctttgtgtccttgaaagctctctcgcttgagtctcttgacagccaccactgtcccagtacctggtttagcaggagcgaatgtgtttggatcaatccaacctttgaagacccacccaaatcctccctccccaagtaggctgtctgatcggaagttcttcgtggcattcttaagatcaatgaagctaaaggacttaactgtgtcgaaaacagttatatcaactttggcaggtgcagcatctcctaatgctgggtcctgtgatgatgatgatgctgagacaatcttggcattgctacctggatttgtcccatctgaaagggtaggcagaaattagactcacctttatcatcatagattaccaataaaaatggaaagactcaacaaaatgaataatgttaaatcaattttaaagacaacactcacgattttaaagcattatttgacttggtattgttcttttcaattgtaatttggctaattaggatttttg

SEQ ID NO: 14123 - DNA, 3211 bp, Cannabis sativa
  modified_base (3130)..(3142): a, c, t, g, unknown or other
ttttgctttgattttcttgtttcgaaagatgggttttcgaattacttgggtttgatcctaccgaggcaatgttcttagttttgacagctcttttcgagtaagaacataaactaaaaaaggccattgttgaggtacttcatgaattttatgtcactttcctaagtttttgagtaattagctatttcaatcatcctctacatttagctaaatacatttcaaccaaatacacaaatttttatgaatagaattggagaataatatcttagataatcaattgcttaaaggtggattatggtatagggagtaaatgaagttgaaaagaacaaattatcactaaatgatgaaacctacaattacaatcttccataccactggataaaagtagttctttctttacaatggaaaaaaagaaaataaaaatcatgaacaaaaaaaattatacaatagttttgagaagagaaattaaccagtgtcccatattgatcaatatacaacttgttaactacaacctctacatgaacattattgcttttccaaattttcagcttattcccaactctgaatcatcctcagtttcttcatcttcggattcttcaccactttcctgcaagaatttatgatttaaattagagcatgaagaaaaacgaaacgataaaaaatgtgtttcgatactgatatatggcaatctttacctttttactgatatattccgccatggcactatcaaacgctgctcgtttctctgtggctatgtcgtaatattgaaccttttcctggaacagacacagcaacaatcccttgtagtttttcagtcacaaatcgtcgaactctcttattcggtaatctagctttgtttagtacttaaaggccaagagaaatcaaattcatatacagatgtagaacaaacctcatatgtcattgttttccacttcactccacatgcttttccaatctgagaagaaaattaatgagtgaatccattaataaaccaaataagaatccaaaatcagtaatatcaaactacctagtaaaaaatcaataaagtaatatgacactggttatcgtacatctcgcattgatttgacatctgggttttgctcttgaaacaccttccgaaagtcctcccttgaaagaacaagaatacaaatggtcaataaagaaattatgtaacaaactagtctgcataatctcaggaaatgaaaccaaataggaacagaaaagagctccaacactaagactttcaatcgatcgggtacaaaagtacaacattttcgatgtgaatgaccataagatataaaagaacaaaatgtaatggggtgtaagtttgttacttataaatttcagaagaaacaaatgcaatcaagtatgcagcttcaaggaccatgaaacctgcaaacttgacttgattagacccgtattctcgtctgtcatggattgtatgattaacacatcaatctagttactttactagaaaagtttaaagctctattaggggaggcagagtttctacatggagactttgttaaaagtcattgctcctttttgtattcaaaagaatttcgaaaaatattaactcatcaaaggaagattgaacgatagatgccaccgtatatcaagtattcttctcagccatttcagctcactactggcaaagaatgaagataaccaacatatttaaccacctataacttacattttatctcattattcgatcgaaaatgtcaagtcaaatacaatttcagtctcaattattacaaaaaagaaagaaaaataaaactacaatacaccaagaaaactataaaaacacacacacacactaacatattactttcaacatgtaaacattcccattagtatgatgacattgctaatcagaacggcgaacacttgaggaaaatgaacagccctattctctctaaatatcaccagtgaacacacacaatctatgcaatgcaggccataagtacataaccacatctaatgtccaaaatgacaaagtttgcccagtaaatactgaagaacagaagggaataaaagaaagaacttacaagaagaagaagaaagctgttggtggcttcttgggtttcttggcatcaattttgttactaatcttcttattctttggttttgacttctgtactgactttaccacctttctctcttggttcataccactcaatcttgctgacctctttgtcccctcagttgttttgattctcaaaaccattttcctaaaaacaatcaagaagaacagatatgaggggcagtttcccaaaatgagaatgtttaatgaaatgagcacaacaacaacaacaacccctcatgaatttgtatgatttttttcaatataaaagatagtaagtaatgagctttaacaaaaaagtatgtttggttgagaggaatgaaaaaagaattagtaaatcttttcccgaaacgatcttttcttctatttcaaaatagaataatcattccacgaaaatggtataaaaatacaaccaaacaaaggaatgaaatgaaaattttcattccatttcattacacctagcaaacacaacctaaatgtggagagttcttcatttcctcctcaaaacccaaaagcagcataaaccataaataaaccccacaaataaattctctctctttttcttctgttttgtttttgggttcttttcattcataatcttaaaagcttaataatatattaactcattgtggaaatgggttttccatttcaagacacccagaagagaaaaaccataatattgtgaattttctcaggaaccaaacaaacaaagtagtttcagggagaaattaacaaacaaattagtgaatttttaagtatgaaagaaaattaaaaaagtagaaataagtgaggaagtcgagaatggtgtttacttagtggaaggtgttccggtgatttgggtagaatcagaagctgaggctgaggatgatgagcgagatttttgagaggttttagctcctttcgccatggttgatgatgattctctctctctctcgattcgtggcaatagccaaacttcatttgtaatatattatatgcctctctacgcggttaaacggtgtcgttttgcttgcttgaaaattggagtgttcgcggtgcgggtggtgnnnnnnnnnnnnnttttttcaaaccaacccgcacgtacggtttttcaatttcccaaaccgtactcgcaccgcgaaactaaaa

SEQ ID NO: 14124 - DNA, 8840 bp, Cannabis sativa
  modified_base (6395)..(6395): a, c, t, g, unknown or other
tggcctccgcctagcccttacgtgattgggtactatttttagttgaagtcagggaaaaagtagagcagaactgactatttttcattcaaccagcttgcttaccaatggctagaaaacacaattgcgcagccatgtcaaacgttggcaggtatgccaaaaaatattttattgcaaaaggtcttcgtggaattgtataccacaaatttcaatttgtgtcgctcttctgaagttccatctatactttggaaataaaggatagagtgaatcacatcctttttttttttagctgaatagagaaacataatctagttgactagtgtggacaacttcttgatctatggcttgtccccctgctcctggggttgcgagagtgccggatgtggatgtcgcctgccctagagatggggaaggccctgatttggatgacgaagaagtacctttgtcatgtatttcacagaatctggagaggagagagagagctctccatgggcgtgtggtctgtgggggtctagtaagtgatgcttcctttcatatcggacctagaggcctagtttttgatagacctacatggtctgtgcctacatctaagggaaagggtaaagctatagttgtgagctctgatagctcctcttctgacgatgatggtatttgatagtttctaataccatgattatattcttgtgttgaatatttgcattctgactttgctactttctttttgtatatatgtcttccaagctgagaggtcttgcaggtaggccattggatgagcctaccagacgagtgagggccaaggtggccataacctctgtcggtgtacatgccagtggaccatcgccgcttcctcctctacaaaggcctgcaccagtcggatagcctacggtttggcctgcctgctaaggtacacggaggcccattagagttacagggttatttgttggttagaaagttgctgagtcagccacttagcacatagagacggctatccctttcttaaatgaggcgttgaaggagctgggtgacagcgtgcctcacaggcaatactctgacagactttggacctttccctggtgagttatgctttcaactttgttcatcttcttgtgtgtggctagccagccttagacaattatataggggtcttgctggcggtagaaatccaatgaggggaatggccaaccagagctacaatgtttgacattgatgttgttttgctttgttttcatgccctaatgaaactgagcacgatttacgatttctctaggaggtctttagacgctttttaggagcgtgggaaggtcttggaggcttcccttgctgcaaaagacaaagccgattccgagttggaggtccttctgatagagaggtagagaatggtctatagattcaaggtcatgcttagttccaggaacaccaagaacaccaaccttgttgctctcatctctaggttgcaaaatgatcttgaggatcataagataaagttgcaagaggctcttgatggcagcaggccattaaggaaaattacatcaacctgtcctccgtacttacctatgagttttgtttgcacgaccctcaagctgaattgtcatacatgggcactccgacctttgtggagagaacattagcccttgggaaggcactgtttgaaaactggatggagacagactaaattgctacttatcgagaggggtcatcatcgggtacccgtggctaggtgttcgtcgacccaccagtggaggaggtggccaaccagcatggtaatgatggggctggcccaaactctctggatcttgacctggcagctctagattcagctcctgctgcccctgcacacatgtagatgaaatttttattagtattcagcatcatgtttgtattatatagactatgttttcatattcagcgttgcttgtggccatttatggcctgtggagttttaacttagcaacattactcacttttgcattctatgtggcctatggcctggagcctttttagaacattattatcatgtcctatgtggcctgatgactttttagaatattactttattttcagcactagggccttcatgttcgtatctttggccataagccctctattttttaacactactagtatttatcccgttgcttttttatcatggattctgtgaccaaccagacgtctttaattctggctatcttcttatggccttgacatgtaagggtccttatttactttgccaagccaaagtatgattagacgacttagaggcaggtttagtatcttatactaagcgttaaaatttctctacataagttctttgtgctagttcgatgcattgtacagtgggtgccccctatgtgaccatgcagacaagtctcttggtcacttgctattcactaagtttcacagactttgcctgggtagtatcttgcgagggtaccatagtatgcatgtgaaaggaagagaatacctttgaaaagttaatatgtgagcaagtgattcatagacacaataaacagaatataaatattgcaattatttattaattggtctttgttactgtgcaacttacataaattgaatctacaagcctatattacacaaacttagcttctagatgtcaagtggctacccctgctcgcccagtgaagcagatgccactattaaagaatagtgggagaccacgcctaaaaagggtcgtgggtgctagcactttttgtattttaatgttgagtagatagaaccactacttcgaagtagatttttataagttggttattgctagtatttgtgaaggttctctccattcctgtatcttggtaggacaatgggctccatgttctctttgtaccttcccaacttgtaaactcccttactagtttttctgtagcttgataagggaattcccggttaggtccaaacactcatgctattgagtatttagtgtccaggaacactcttcagagcaccatgtctccaatgaagaattttctacttttgacgtgtttgttgaagtgccttagtgcctttagttggaaggcttggaactttaggttggcatgttttcttctctcttctactttgtgaagggactctgcgagcagggtattatttgtctattggcgataggttgttcttctatgagacggtggcactagctctacaggcaacatcgcctcgtagccataagctagagcaaatggagttttcctagtggccatcttctcaattatcctgtgcgaccataggacctctgggaatagttcaagccaattgcccttggcttcctcaaattgcttcttcagggtgtccttgagggttttgttgacagcttctagctactcatttgattgaggttgggccatggtagagaagctcttgatgatgccatgtctgttgcagaaatcagttaacatgtaattatccaactctttgtcattgtctgacacaatcttctagggaaggttcaacagacatatgacgttcttgactacgaagtcaaggtcatttttggaggtgattatcgccaagggttcaacttttgtccatttgctgaagtagtttacagtgacgactacaaactctagccctccttttcccttttagagttgaccaattaggtttatcccccacactgtgaagggtcaaggagactgcatcatcgtaagctcattaggttgagctcttggtatcgtcaaaaatctctagcacttgtcacattttttgacattgtccatcgagtcttggatcatcattgggaaaaagtacccctgttcagagtatttttttgacaagatttgcccccggtatgattgccgtagaagccttcatgcatttctatcataagtcattcaacttcggctttggtgacgcacctcaggagaggaatataagaactttgcctgtatattgtcccatctaggatcaggtacctagcaccttttcttcttagtttgctagccttgtttttgtcttctagcaaggttccggtttggaggtaagctgcgataggtgtcatccatgttggagtgtcatccaacaggtcgacttcctctaggacaattatgctgggttcttctaggaactagatgggcaccaggttagctttgtcagctatggtaccgcttgctaggcgggcaagtgcatctgttgtggcattccgttctctggggatctgcttgatcgtgtggcctttgggctgacttggcaaatctttgattttcccaagtatgcccccattctatcacctagagttgtgtattcaccaaggacataattcataactaattaagaatcgttgaatatgtgcaagtagtcagcccgtacttcatgcgaaagcttgaggctagctatcaaggcgtggtattcagcctaatcgtttaaggctttgaagccaaatttgattgctctgggcaaatgttgccccaaggtgttgtaagggcaatgcctgcacatgacaattagtcagtgtagcttccgttaacatggagtttccatgttagatctttgagattttgttgctgctcttgctctcacttcttttgttgctatttttgtactcttgagtcttgaggggtctcaagagttgagttgtgcactcatccatgaagtctggaagggcttgaccctttatgactgttcttaattggtatgtgatcttgaattgaccaagctctattgcccatttgagtagtcggcctgatgcttcaattttctacaaaacctatcgtagtggttgatcagtgtacacctttatggggtgtgcctagaagtagggcctaagctttcaagaagctaagagaatgttgtagaacagcttctccatgagtgggtatggactttctccatcgactagccttttgctaatgtagtatacaaggtgttgtacaccgtctttttctcttgtgaggacagcactcacagcgtgctctatgactgctaggcacttgcctaggtcttcattgtctaggggtttagacaacattggttgttgggccaattgcttctttagctattggaatgcattttcacattcccctatcaactcaaattttttgttggctctgagaacgttaaagaagggtatgcatttgtctgtagacttaggcacaaatctgtttagtgcaacaatacgtccaaataggctttgtagttccttgacagttgcgggcgacttcatgtcaaaaagggcgtggatcttgtttagatttgcttccattcccttggtgttgactatgaagccaaagaattttctcgagcttacaccaaaagagaatttgagggggttgaacttcatgttgtagctgcgaaggattttgaagcactcgcctaggtcctcaacatgcctcaaacctttttggacttggcgagcatgtcatccacatacacctccatattgtattcgataagatatgtgagcatcatgttcaccaacctttgataagtggcccatgcgtttttcagctcaaagggcatgactttgtagcagtataggcctaggtctatcatgaagctagtgtgctcctaatcaggtggatacatctttatctgattgtaacctaaatatgagtccataaaactcaagacttcatggccagctgtggcatccactagctggtcaattctgggcagcgggaagcagccctttggacatgttttgtttaggttggtgaagtcgatacaaactctccaattcctattgcatttaggcaccaacacttgttttgatacccactgaagctagaatgcttctgttatgaagttttcgccctcaatcattcgacttcatctttgagcgcctgggcatgctccttgtatagcaatcgcctcttttgttgaataggtcagatgttgggttcaatgttgagtgcatgggttattatggatggttcgattccagctatatctccatgtgaccatgcgaataggtccaggtttgcccttagaaattctgttgagattggcctaatttcaggagccaaacctttaccaatctttagtcttctcgttgggtgagtgggatcaacttccacttcttccaactcttctatagactcgaagcttcctgcaggatccccaaagtaaggatctgtgtttgtatccctgccatggactagactttattgccccttgcagggttcatcttctagacttctagcgggcttctactcctttttggccttggatggaaaaactgtaacagtgacaagtagattgttggtctcctctcacgcatgccagtccatgcctttttaggaatgtaacgcataagtggtagataggcgtcgtcaccgccttcaggtcattgagggtcggtcagccaataatggcattaaaagttgagggaacatcgatcacgataacttgcgcattaatgttcttttggttggattttctccaactgtganggtaatctgatatacccgacaggtgcgatgcattggccaaaaaaatccatacatcactttgttacaaggcgccaggttagtgagttggagccccatcttttcatatgttgatttgaaaagaatgttggaggaggctccatcatccaccatacatctagccacagtcaaattcctgatttacacagtaatgaccagaggatcattatgtgggaactgactgttattgcatcttttttggtaaaggatatcgtgggttccataggcttctgttgcttaaagctccaatcttcgacaactaggactttgcctctaggctcgtgatggagtgtccgagtgtagcactccctagctttgctagttttgcttgtaatgtgtggtatgcctatggtgaccactagatgtcctgccacgggtggtggcattggatctccatcttggcctccttctgcctgagtctggtcttcttacacataatgacataggtggggattgttacgccatactaggtaccaaatctccctcttcaaattttaacactcattagtgttgtggccaaagtcattgtgatatctacagaacttcaacatgtccctcttacccatctcccttctgattggaaagggcttttggtatgggaccgttccttgagtggccatgaagatgtccgtagtcttttttgttaggtgggtgaagaaagtatacttctcctgcttgttcttctatggtgtgggataagtgttaaacttcccctttttgtcagtgttcatcccagaaatgttagtgttgcttatttcaagtgttttaccactagaagtttgcagctgttgtttgcctatgcagatggtgggtcatgaggctgctggggtgcctcgtgactgcctgctattgacatgtcctgcgtgggcctatcgtatgacttcttcaagtttgataaagtcatctgttatatcaagggacttcttcaagttgttggtgcatatcctctagatatctttttagaagttgcttagtgggagaatgccccccagtatggttgtatatcagccttcttcagtaaagccttttactttggtagcctcgaccataaatctctaaatataatccttcaaaggttccccttgtcattgtttttgactttgaaaaggtcttccagctttgatggtacaagccttgaagacgagaattgtgtgtagaattctcgtgacaactcagcccaggatttgaatctccccgtggtgagtttaaagtcaccgatagagtggctggaaatatgcaacaacgcacatcactagtgaccttttggaggtcgagctgtatgttgaagtatttgatgtgagctagcaggtcctctcgtccgatatacatcttccatactagcatcttaaactttggtaggggtgaggcatttatatatgccgagaatggtgatccccttaaccaatcaatttcaaggtctgaaggctttgggccagctatgccatggatcatgcccttaagtttttctaattgtggttgcacagaaggatctcttgctgtggggaattgattgactggccttccttagggaggctgtagattctgagaaagatagggactggttggccataccctaagagagtgtatggtaaagatcagccatgccctatagaccctggctggccattcccaagtacacgagttggcctaggccgatcaggtttacacctaattattatgcttggccgaacaaaccttcattgggcagggtctggctacccagtactcctccatggccagccacacgtgcaaagggcaaggcctgaccgcccgtgacgcttccttggccagccagacctacgttggcagggtctggttttccatgactccacagccgaccggtgttggctgtgtgttaattgggggtagatcataccaattgcttgagtttggtggatctagacgcctgaagtgatcaacttcatttcttgaattgccattttgggtgtttccaccctcgctcggtcctccttagtcaaagttctatctctgtgcatctcgctccccttatgtaagaagtaatgtaccctagctagccaggggtaatcctgttgatggtttatcggcaagcggctgcagaatgggggttgttgttgagctagagatccctgaccgaccccccaaggcgctggttgtcaggttctgtctaatgttgtcatttgtcaattgaagaaaggtttgtcctccctctggcaggggaagatctgtcctagtccccgaggaactaggcagtagttgcggtgatcaaattctgcttggtgagatcgaaggatgttctcttgatcatccatccatcttaggaatttacatcactactgagcataaacatcgcaattagcagtgtgtggttcttcagttaggcctgcacgacctacagcttccttgagtttggccaactcaaggtcttct

SEQ ID NO: 14125 - DNA, 7863 bp, Cannabis sativa
ccgcttttgcgaatcctatctgggaatttccgaaatcaaacacggtatgatacgctcccaagaacagatttccaagaaccctgcaattgtacatactaatcctgtaatttccatctataaaacaacaataatgtaaaccgaatcgagctacatttatcagtttcgatgaattctacatgacttaccagagggggccttgtggaggaggaatgtccaaggaaacaaatccactaatgcaaaaagtagagcaaccttcttcaactcttagtatatactgaaatgaaaaacatgtaaatacattttcaatagaaatcaacattgattcgagtgtgtgtactcatatattggtactttgtattttcaataatacttatctatctggtaccctgtattctcgtaaatacagggtatcaaataagtttaaagtcctaacaactattatgagtgtaagaaaaggaggcgaacgaatcacacctgttccgaggaaagggaaaaggttttgtttccaatggtgaatgttacatctggaaggactccaatcttatcacaatcgataaatggctttcctaaaggattagggagcctttcacataactttaagatcatgaaattgagagagaagattcttaattagttatagtatttacaattgaaaaatcagctccaacctttatgtcaaaacttacctcatttgcaaatttgaatactttgtcctttgccttttgttgtttaagttgaacttgaaaccaaaacacaatcatctcacagaaagtacataagggagtctcattaaccgatcccgatcgagttccattatgaactaatactgtctcaatgttttttctgcataagaagaaatcttgttcttgtcatgaacatcaaaataaagatttacaagaaagtagagaagggaaagttgataacaacctcacatattttgatccattatatggacacagtccaatatctacacatgctaactcaggcctcaactgcaataagcatttgaaaattatatgaaagcaatttattcattactttgaataataagaaattataagcaagaaacatacatacccctgatactaagtattcccatatgaaatttccatagtttgaaactacatttttacattccaagctcacaattccttcagctccaatagcaaggttaatttgagcaacaattgcctggaaatgaaacaagagctattaaattaaggatttaaagaagagtaattaaacaagaggtattaagtttgaggcatgatttgttacagttggaccggcaaggaaggcggtgcccgagtcaagaatggcgccgcatccagctgcacactggcctgaaatttcatacatattatacaacaaattgggttgtttacggattgatttggtccagattttcatttcttccaaaccaaatcatttattacgattttcaaaaaattcaaaaccaaaccaaagcaaacttggttagaaaccatgttttgaattttgtgatttttctaatttttttttatataattgttcctttttttaactaaattgtctttacttttcaaagtttataacacataaataacaataaaaatattctcaagaataatgttaacgcaatatcaatattccattcaagattgtcccaaatatcaatatttcataataaaaaaaacatataaagtacatataaagaattatgcggtttggtttagtttaaaccgctagcgaaaattcttaaaccatgaccgaataagagaatcataagttatctagattgaccaaaccattaacaccagattcatttgatcctgtctcaaacagtttcgtctgaattggttgagatttaggaactagcgcttgcagattgtatgaacaaccctaacaacaaataggaagacaaatatgaaagtttagagagtcaatgtaacctgtggactggccagcaacaagcacatctcccacctcaatctggaaacaagaacataactaattaaactgtttagtaactgggaagtactaataaagagagaacaaaaccttcattacaaaaagtacctgccagtaaccctttcgagtaatcggaaagtaagtatgttcaccagtaaaccgcctccaatcaatacctccgaagacaatctcgcctcccacctttgacattggatctctatttatccagaaagagaaaactttctggaccatatggccttgaattaccatgttatacctacataccgaaatcaacaagtctctttgtgtttgtgttcactacaaaatcttatgacacaatctataaccgaaactatacatattacataccagactggcgtggcttgatcaacggcaatattctgaaatccaagtccaagaacaccatcatactttgcacctaacaatgctaaaagtccttcttttgtgatctcaacaaattcctaaaaggagataccaaaacatacataacattaattaaatgaaagatgaaacaattatatacaagaaaaatactaagatggatcattaagaaaaaaaactcacttgatctttaacaacaacatctccaacttttacattatcctggctgaagaacccggaaatggatccagaaccataaggaattttacaaggtattcctaaataaaaattgaaaaccaacaatttaataataaataggagtcttatactattgacttgattacaccatcaaataaaataaatatgataatatttgacacacacttataagaaaatattaatatgtaaagcatgagaagattaccaattttggtataggtagaggagagccttgctttgaacttagaatgaagatagcaagcaatctgcatagaaaacatttacaaaagttgtcaaaacacttgacttgactagacaaagcataattcaataatcatgagaacagagaacactcacagaaaaaatgcatcttgaagatgggacccaaagatttgagcttccagtatcaaacacaacagtcaaaggttgtggaggtgaaccaataccaatctctgcataatattgaatatctagataatttttcaaatatataacagcttgcatgttattttcagtggaaggatattgattatgactgattcttgcagctttcaatcttttaaggcttaaaggccacttcttgaggcttattctcagaaacccattatcggaatcggcgaaaaccaaagaggaggataacatagagagtgcaagaagaaaacttttgatcctcatggtcacagtcatacagttaatctatctggtatgaagtcaaaaaccttgcttttgaaacataacattcatataatcatacataagtatgaagataattttgccttaaaaactagaaagaatttaagagttcttagttggttaaactttaaacgttatatggattagacatataaggaaagaagcaggtaacttcgtggagaatgaatacaatagtactctactaaaacaagtatgtaactaaacaaaagtactatgattaacgtttctcgttctgatttctaacactaacaaggtcagctcaatctttatcccattctttctttcattctttgtggccttattttaacaattcatggtgatactatagatacaactttgcattttgtacaattttctttgcgtgtgggaactgaataattgttatgcagttaaaactgtttgatttggatttttcgcatggcagaaaaaggcctgcgttaattatctggtcactgttgaagactgcaatagtagtgatcaagttgcatagataacaaatacagttatccattaatgtatatacatacacatatagtgattaaatggtaattagaactttgtattttagcagtccatttcaacaaacaacattctgtacatgagcatggattttttttccagatatcccaaatggcccaaatcttctccctataattttgaggtaaatgttctttgccggttaaaataatagtgatgtgcaccttacactacaaccttttacctcaactcattatattattttcactaatttattcaaaacacttctaaacaacaagatagaatcaaatgaatgagaaaacagaacaaacttatacaaaagcacaagatcaaacaatgtttctatggatcatgagcactcacattttgccaattcataattgataaactttccttattttttaactatgcttagtaaatgaatgactatatgaaagacataccggaaaaaggggggggcaaatataggatgatgaattgtctactcgcttccggttacaaaccaaggcatggttgtcttatgcagacataagaaaataaaacttataacttgaaaagcttccttaaaatttgaaggaacttgtcaatatgcatgacctaaaataatgttcaactcatagtatcaacaactttctaaacttatttcattcacccagtttcaatgaaaggttagccacattcaaaattttctgaggatgaatccactcaaaacataagaagattacgttccctctagccaccttccacattgctctcacaacaaatctgccaaactgtatgtttcactacaaaagcaatgatcacaagctaatcaagctgaccaacctgactctacttcttcagggtgtttttaacacttggatccagattaatctgccaccatgaatggatctacttccccaagatcagcaaccagaggttccaattctgctgtctcctcgtcttcggcggggaagtatgttgggaatggaagctgcgatatgtcaggtttcttataaacagcatcttttataaatacaaagtttccttcagcacccgggacctgtcgaacataccaaaatacaaagcggtttcagtgtctgtaaccacacaaacatcttcaatgaattgcttattatacagtttatgttttccattgtgattatcagatataaatagggaagattttcattctgtaaatgcacaagaaaatatacctggcctctcaaccacatcaaattccttgcaggatcaattttgtaaacccaaacatttttaacagttctttgctgcccacccattcgcccaggcatctttttgcctttaaacacctgttcataatatccaaagagaggaaacaaaaagcaggtaactgttttagtttgtgttgatatatttaacgatactgaatctgaaatgaggctttaaaatatgaacttgtgaaaacctttccaggagcatccctctgaccggttgaaccaggacttcgatgagataatgatgcaccatgagaagctgggcctcctttaaatccatattttttcatcacacccttttaagacacaaaaaaacacccattaagaaaggttgatcttcacaacaacaacaacaacaacaaagtatagaaaagcataaaacttttgataacagatccaaacccagaattaatattagtattattacaaaatggttatggtaaatcaacctggaaacctttcccttttgtgattcctgttacatccacatattgacctggaacaaaatgacgaacacccaatgaagtacccactggaagaagtgcatcttctgttacaggaaattccctcaattttcttaacatgggaacaccttgagctctgaaatgacccacttcagctttggtcaaatgcttttctttcttctgtccacaaccgatctaactaccgaaacaagcttcattagaataagaaaaataaaaatgactttttatttttatttttctttttcctttcaattttccattggtaacaatagtaataattaagaagaagaagaaaacctgtaaggaaatgatgccttctttttcaggagtcttgacctgagagacgatattatcatcgacccagagaactgaaattggaaccctagcaccccatttgtcccaaagcgccgtcataccacatttgatggcgatgagaccaggtcgccttgaatttggggtcatgacgccgggcttggcttcgataatacgagtggcttcatgggcatctaccaatgaatcagagctacagaatcttctactactagtacaggacgttgtagccggagtgagtgagagatatcggaaacgggaaatgataccacctctggacaaagccgacatagtgtaccgcccaccaccaccagcaacccccgctactgagtactgatacagaagaagaagaacgaaagagccgaaggaatggaaggagtacagttgggcagtggagtagggttttgaatggggtttgtgttaaacgacttgccgttttatgtaggctaattacgattttttcccgaactttgaaatgtaccaaattatgtcccctaaatttctttggtcgtcaaaaattctctctaaacttttatccatgttagaatttttttagccttttatatataattggttgatggttcatgaatatgatttaatgattataacttaagtattattaccgtcaaaaattaaatttaggtaaatactattttaggcttgtattttgcaaaagttattaatttgacctttattttattaaaagacaaaatagatactatatttttcaaaattgtacaaataggtatctaaactatttttttgtcaaaataaaacttaataataatatgatctagagatgttatgacaaaactggttatattttctactttcgtattagaaattgtcttaaagttgattatattaaaatataaaattttaaaaaattaagtttagagtcttatttttactattgtggaaaatatattgttcatttttttatttaacaaaacataacattcaatttcaattgataacttttgcaaaatacaaagtctaaatgatatttatcatgttgcgccacaccacttggcaatgatgtatagtcatccttcatttgaacattcttctattgttcaagatacaacatttttgagtcatcacatcattcacatacaaattcattttgagctggccaaataatccaatttatcattgctaccatattttgtttttctttacgcacccgagctcccacctgttggaaccatatagaaaaattgtccccaattacatcgattaaaccaacacccgtattaaaattaatgcttgctagctaaacattggattgtgaaagggtgagaccatgaacaatagtctcatcaccatgcaaataaagagaacaatgtcactgaactggtacatgcttcaaactaagcagatacatcattgggagacaccaaactgataagcagtcttcatcgaatagaaacttgaaaccctccttactctaataaaaacaatcatccatgctctcctcactcaaaaggatactcaaaatgagaggcaaatccatctcctcgaacaaatcactaaaaaagattgcaattttatactacatcatcattatggtatatttcttatttgtttcaaagtattgaaaaactacttaatctaattttttattatgatcgtttactttttgtagttatttaatattattaaaaaatttcaaaattttataatagttaatattttgttaattttggccagttgtatatcacattaactaactatactcatgtataaatacaatatacagattcatatttcatacactctcattctctctctgaatctaacataaatgatccatgaataaaataaaatggcaaaatgtcattacatatttctcattccatttctacaaacgacattctgtatatatttatggcttttgtttttttccttttcaaatactcaaatggcaggcacctcattttcattattcaaaagacactgaacttgtaataaatatcaaggcttgagaggaaaaatcacacaacaagaccctgaaacactcttaatca

SEQ ID NO: 14126 - DNA, 5632 bp, Cannabis sativa
ttgtaaataaaattataaaaattacaaaaatatttaaaattctgcacaaccgtatttttataattttttcttattatttttaagtatttatgaaataatccatttttaaaaactaggtcaaacacttttattataacacagcttttttataaataaacttttaacttttctaaaaactataccaaataagcgccttgtataaaattttcatttcaagcataataaaatgaaatttgtagtttttttgtcgagatttatgattagagttcgagtgtaagtgtgtaactggtataaatgatcaatttttcttttattttatttttaattttatttacatctactttctcttatcatgcatccaaatttgctctcagttgctaaatttacaaagattttttttaaaataccttttgcataaagtgctaaagatttaccactttatagaattttcattaattttttaaaaaaacaaaaatccacatctgtactttatcactcattagatttgtattaatattatatatattttcacctacaacaataataataagccatcttcactttgttgcccaaccaaatttgttcatgacattaaaatgagattacaaaagctcaaaagtaaaccccttcaaatattatgctgagaaacaacaatgagactgacctattaaattatcaagctctaatcttgctgcctgggttgctcttaggtatcccaaaaaataaaatggtaaaaaatccattatagtttcaaaatttctcgttctaggctctcgacattactgcacagaaatcccagaagaaatgcgaagcttcgagtccactcctccactaacaacagcatcacctttccaccaatcggcacaaagtacctgaatttgtttcaattgataaaaacaattataataacttcaaatgcattgtgaaataacgaaatgagtgtagtttttttgctgtcttttatttttaccttgtcttgatgtgaattaatgacagatagaggccactgtaatataaaacagcaatttagtaattagcatctctaggagagaaagaagagaatgagaactgaatagtacacatatattcacacttagcaaacatgaggaaggaacattaccgcagttcttagatcccatagcataatttttccatcataggatgaagatagcacattaaaccaagatttattatgccacttgcaagccgatatccatgaagtgtgagatgaaaattgaaacacaggagcagaagttcctattgataaaaatagttttcatttcacataaaaaatgtgttaatggaaataaacatggtacatgtatgatacatgtttgttagagtacatgcgtattttctgtgctagttttaagcaatacatatatggtatgtgcaattgaaaatagactatatgcttggctcgttgaacagacctggcttacgaggatcccatatcctaagaataggatcagaaccaccagcagcaatcatcatagaaccttcaccaccaatatcgaggcagttaagggatttcccacaatactgtcaatgtggacattgtcatcatcaaagatatttcataactgaacagaaaacaaatatggaaaaagtctcttctttttctttaaacaaaatgatgttttggaataaaattggacaccaaccaaattcctacatagctcaaaaaaaaaaagagagaagaaaaggaccccagcaagcatgctaaaagaagaatatatcttacgatgttcaacaaatctttgcctgtctccacatcccaccgtctaattgaatggtcccatgatgcagaaaagattgtatcacgctgtgaccaatttactgaagatacacattgtgtatggccaactaatgtagaaacagcctctccctgagtttaataagagattaatattaataattgttaaacttgtgaggaaaacaaatcatgctgacatcttaaggccaaatatgacctttcttttcttctcatcaaaatgcaagtgaaaaagaaaaaccaaacttgagaaaaaaaaatgtacataatacctgcaattgagattcctcagcttgatcgttcttctttttcttcttaattgacacaaggtcaccttctgtattgatctcattagtttgccacaaattaattgtgctatcccaaccacctgaacatatctatgtgcattcaaaggaggaaagaggtggatgaacatcagaatctaaatttcaagggtcaatttgcaatataatatcatacaagcaactgacatttaggatatataaaccttaccatatccccagatgtctgagaagatacactttgaacggatgctttatgcccacgcaaaattttgaatggccttatcttcaaatgactgttagttggctcttctgcattgaactacgataagaaagaataagaagagaggaaaaaaaataggcgatgatattagtcaaggcaacaatcaactgtgacaaagtaaaatatctgattccaattaccttccatagccttagagtctgatctttcgaagctgtggcaacagtaacactttcttcatctgcacaaacagcaaagcttttaaaagagaaccaagaactccagtaaggataacagggtatcgaaaacccacgacccaaatatgcttggcgacagaaatcatacaagtacagaagtataaacttgcattaattaagtctcctttcaaaattactagaactcaacactaactctttaagaaaaaatgaagatgcttttacataacctgaatgtcaaatatcaaaagaccagtcacattgttaggtagccaacgtatctttttacataagttctttgtaagaattatgacttaattctttcttattagtctagactccagataaaaccaccaggatttgtccaactcttaaacctactttaagccaataaccatctaatagtaggagtgagaacaagctagttaactgacactagaaccttcatatatacaaatatatatcattttcctttatgataaagtcttgtaaacttcgttaataactataatccagaaattcttaatgattttagtcctaattgcaccttcagagttgatgattctggcagaagtaattgcaccagtatgtccttccagtatatgtgtacacactccagcagacttccacaccctagagaataataaattgtaaacaataataaaaaagaatatatgttaagctccttattttgtgtaattataaatataaaatagacaaaaaaaattctaataagtgtgaaaatttaccttgctaaaccatcataacaacctgtcaaaatgaacctgccaaatgtaaaaattgatgaaatcttagtaactatagtgctaagtttttacttttagtccaaccaaatatgtgaaaacagtagcattcgttttgccattttagaaaggcacttttgtactaaaaatactaacttttgttgtttcccacaatcacatacagtaagtctttcaagaatttaagggcagataacaatcgacgccgaattttcatgtagaggcttacccaggactagagccgtcaacagcgctaacccagtcatcatgtaaagaaggttcttcttctttacgtgggacaactgcctttatgtactcaatttctaatgtcctctcctgtaataaggcaaaaaaacatagtgagtatcaaaatgacaaccaataagcattgcctctcttcgttcatccattcaccctcctttgtttatgtcaaatgtcaataaagaaaaatggcaacttcccatccctaataatggtcttccctaatttcaatctctaatgaaaatgttgtaattttggagaagtaaatggaaactttgttttctatcaacctacttagttttgtcccaaaaataatacttcccgcatgataaataactcaaacagaaaatgacagaaactaaattgggaagggaacacagtaccgccgatatgcccttggcgagaagaaactgctcaagtgacatcctaacgaattccccatcgatgagaaaatcaaagggttcatggctccactcaggatttcctggtaattaagcaaaagcaaaattaagcttaagagagtactatcgacggaaagtaatatgcaaacccaacaaatgaaataagcaatgaaaagggcaaccagaaaccgatcaattatatcaagtacctgcttgtagaagattgttgatgatggtggaaaggccaaggcgggtgaggtttgaaggtatagcaatagaagtgggaggaactttgaaaggaggatcgagcttggtcacaaaccgggcctgcaccctcgtcgtgttctcttcttcgtctccatccctgtccatctctctctctctctctcttctctactgatagtagtggtggaaagtatacaggagaggacagcaggaagtgaagctagggttttgcagagggttgagggtttaggaaacgcgcggaactttgtggttttttggggattatttcataaaatataatagaaaatttacatttttaccgatatttttttttttttttacatttgttgtatattttttttttgttttacataaatatatttatagagttttttttttttttaagaaaaatattgttttcacgttgtttttactagaaaataaggtaatttgtttttataagggatatttatggcgaaactccttttaacattcataattgttacatatataatatcgtgataacaagtctattctagtagggtgttacacgaaatgtctttacaatctttttagggcataaaccctaacaataatctaattttccttaaataaaatttaacccatgtctagtaccaccttaaaactccaacatacatagttttataaacgtatcaacaataatagatatacgatgcaaatatattaaacttgatattccttatgaaattgagatgttcgttttttcttatatgattaaaatttaagatagtcaaatgtgatgtcttgtactgtctcataaaattagaattcctaaaatagccttagatgtaaactcttatttaatcacaacattcacgaagctattcagaataaaacaatttgatccattgaatctcagtatcttaagagttgttgcaaaaaaattctcatattgtctctttagaaaatatctaacatggttgtgaatataaaattatatttgtgattatattggtccatataagattctaatatctctcccacttgataaatataatcaacaaacatcatattaatctcaattgtctaatatcagtcaaataaattatgtatgatattatatggatagggtatgtatactacatataatttggtctaggagacattgaaatatataacaaccattaagccaaaatgcatgctgtacaaaaattaagactatatatcagtcttattgtgtacttgtcactcccaaaaacaatacacagaagaagtgattgcatattattatgcatgcatagattaatctcattaagtgtttttcactttaaaactttctaaaatataaaagctttcaaactttgatgaatcaaaattttaagagactatgtttaagacaatcatatgagagagatcttaacaaatgagtaagaatactcgatatctctc

SEQ ID NO: 14127 - DNA, 7046 bp, Cannabis sativa
  modified_base (1466)..(1466): a, c, t, g, unknown or other
ccaaacctatatattgttattgccatcatttaatatggagtattattattggatatcagtattatagtacattttacatgtattctcttgtaattatttaattatttagtaatattttttaaaatttattgcattaaattatataaaatctaatacttaattagattattaatatcttttagtatttccctctctttttatattggatatacatattttaatttaataaataatataaaaaaatattaaccattcttaacacttcacatcagtatgatgttcaataatttataacgcccaatatgctaaaaattaaagcctaaataaaaatcaatggacaatttatattacaaaaggcagttttggtaccttttcaatatatattacagtgtaaatacataagtttaatttttagttgtagataaatatttaaatttaatttttaacagtaataatatttaagttatatttttagatcttttgtaagtacctggtcataatccgtgtgcattttcttctgggaaagttgcaaaaacataacttaattatttgtctgcagcctaaattaaacttatgtatttatgctacatattacgtatttttcttaattgtgcatctacgttatagtttttttaggacaatttataaattttaaaaaatttattgtgccaaaataaatatgcaaacaactttttattatgagtataagaaaaaataatagtgcctataataaaatatttaaacattatttttagtattgtaaattatttatttttttttaaattttaaaaataattctaaatagctataccattatcataaaaaatgactaaacaattcttctaaattctaaagctcatagaaatgcaaatctccatttttattgggtgtacgtgctataaaattacctaaaaataagtaactatttcttttagttttatacataaatatttaatttagtacagactaattcatcaagtgtgaaactaaaaatataacacatattgtgcaaaatgggtttcacgtaaaaccaaatgaaaagctgatcaagaagaaaacagcagtgtaattggtacgtggattgtactgaaataacgtctaattaattagtcacggattcacccttatttacgtagtaaaataagaataataatacaattatacacgtcacaattatacatgtcattttaatcagtttccagcaagtttgaggttcaaatttaattatatatatgatactaggatgtatagagaatttatgtatgataacaggatatatataaagatcaattaatgagtaatatgaccagaccctctagagagagagagagaccatgctggttcacatcaccactgagatatatagctttagtcagtttgatgaaaaagcaaggctctttatggcgttttgttttgctctttcctttttcttttgaggaagaaataaaataaaataaaaaaaaaanaaaagaaaaagaaaagaaagagaataactgctgcaacagggagagagtgaaaacaaacatttcatttcttacttctttttggctggacttaataaaacataaacatgcaaagagttgagagtgttattaataaaagaagtatatccattatgcgccaaaatccaaaaatccacaccttttattcaaaaacttttcttcaagacctctatataatcaataatcaattattatttatcctattttttaatcaataatatgaatgcatcactaactaactgtctaactatttaatatgaacacaacccacgacagaggctaaggcaaaggacagtcagaaatatgacaaatttgcccaacacccacctggcctgcattgcatgctgctactgcacaatacaaatactagtactgacttttttttttttttccagttataaacggtgccgtttagaagaagctgagttggatattgaaatgggtttgggttgagttgagttgggttgggtttactttacctgtattaattgtgaatacagtattggattgttgggttagatccctatagtatagtagtaaaagtaggtccagtaatagtaccagaagctgcctactgttatgaagtgactggagggacagtttgtcctttgcctcgtgaaatctattgaattgaaggccctgaagagagccctcagataccattaaaaaccaaaatacagtccattaatacggggacacccactatactttactttactactgctatatagctatacttgtaatcattttttcaaaaatcaaattaagctaaagttttttcttttacaacccttgtgacaaaatgaattagttctgtggatttagtagtacatatgtatataaatatattttcatttgttgtgtaatattaattaccaaatatcttctctttaatggagtttttaagtggtctaaaaggaaaagggaaaaaggaaaggaggagcgtagggtaaagggggcaacaaagctaaagaagaggtctttctcatacacagatccctatggaatgcgggaacgatgcccagcattgcttgctggaactcattctttttgtttagtttaaagggacttgctttgttcactctctctctttagaaatcttttcagagagagagaaagtgagtaataggagagagagagagagagagaaagaagggcatagcatagcatatagattcagttgcagggagttggatttgcttagatgagaggttagatttggtccaatcagagtacactgaagggaaaacaaaacaaaaaacaaacagaagacccagttatttagtttcaaaaacaaggagagagagaaaaaaaagaaaagaaaagaaaagagtgaaagctctcaaaagaaagatagaaaaatgttttcggtatcattagtgttatttgtaatttgccaatgattgagtttgagagaaacatacttgcctagaatattttcatctgaagtgtagaaaaaaaaggagcaacctttgagagccagatgaagtccatgaataatgatgagaacaacaacaacaacaacagtagtaataataactggttgggtttttcactctctcccaatatgaaaatggaggccccttctaaccctcataaccatcaccacaacaaccaaacacaacaatcttcctcttcctctgctccaacaagctatttccattcctcaccccaacttaactatggactatactacggagttgaaggagaaaataatggtttgtattctcctttatctgttatgccacttaagtctgatggttcactttgtataatggaagctctaaccaggtcccagcctcaaggtttgttcaaaacaaagctcctttttttctttcacacttagaatcacttattctggttttctgactttttttttcttttctgaatgttaagcaacaatggtcacaacttctactccaaaacttgaagacttctttggaagtggaacaatggggtctcatcactatgaaagcaatgacagagaagtaatggctctgagcttagacaacagtatgttctttaatcaaaacccagaacacgaggagcccaacaaccaccaccaccaaaattttctaaaccaactacaacaacaacagcaacaacaacaacaacagcagcagcaacagagctctaggcaccaagatcatcaagcccagcaaattcaagctcagcaacagtattcatactactctggtctgagaagccatgatattgctgctgctgctgcttctgctgactgtaatctccagcttccgacaatggctgataatgggatttctgaaatgaagaactgggtctcaaggaactattcaggtaaccatggattggagcagaagatgattggtggttgcatggctgacaatggaggtgagtctggctctattaatggaatggcttatggtgatttacagtcattgagcttgtccatgagtcctggctcccaatccagttgtgttactggttcacagaagcagcagcaaatatcacctcctgtgaccgattgtgtagccattgatacgaagaaaagagggcctgagaaggtagatcaaaagcaaatcgtccataggaagtccttagatacatttggccagagaacctctcaatacagaggtgtcacaaggttggtcctttttcatttattattattattattatcttttcttgtttagtgaatcttctttaatgggttttggttaataatgaatcaggcatagatggactggtagatatgaagctcatttatgggacaacagttgcaagaaagaagggcaaagcagaaaaggaagacaaggttagagaacactttattagtttaaaagggcatgtccttttattgtctcttgtcataagaggaactgattcttattcttgtttcttcattcttgcttcgacccaatgatgccacttcaattgtttggctacatcagtttatcttggtaaggttctcttttttttattttttatttttttcccttttcatatgttgcttgttgccactttaatagttgccactttaatatatatatatatatatattatatttatttacatgatgctcttatgatgaatatgtctcattgttcatgatgtttttacctcaggaggatatgatatggaagaaaaagctgcaagatcttatgatttagctgcacttaagtattggggtccctctactcatatcaattttccggtgaggattttgtgctctctctcttgacttttcctttttttatttttattttactgatgcaactagtaattttgtgttttgacagttggaaaattatcataaagaacttgaagaaatgaaaaatatgaccagacaggaatatgttgctcatctaagaaggtagctatagctctttctcttatgttattgataatggcactcttctttttctttcttcttaatctttcttttactttttatacttggtcactttactatcaaatctttcttcaccaggaaaagcagtgggttttcaaggggagcttcaatgtatagaggagtaacaaggtatattttgactttgtctaagcttttcaccatttattttatacattatgttagctaaaaacaaattattatatgaccctaaaatctttgtttacagacatcatcagcatggacgttggcaagctcggattgggagagtggctggtaacaaagatctataccttgggacattcagtgagtattttcaaatttcagacttgactcgattgttgcaaaaatctagacttggctaaagaatcatcattttcaaaataattattaacaaattattaaaataataggagagaatttagttagcatcatttcaaactttttgggctcggttatgcttgtgacacttttgaaattgtgtacgggtctgtaataagtcagtcaaaggagcttttgctaaagctgctctttcagacgttatacacactgaaaatataactttgattcttactttggaatgatgtgttacaatcaatttatgattttcgccaaagttaaaaattaaatatcttttacaattatctcttcattaataggtactcaagaggaagcagctgaagcttatgacattgcagccataaagtttagaggattaaatgcagtaactaactttgacataacaaggtatgatgtggatcggattatggctagtaatacccttttagcgggagaactcgctaagcgaaccaaggacgttggaagcgctgccattgaggctgcaaatcaaaattctgcctctagtagcatcaatgaagaagctataaccccaaaaaacaacgaaggcgaatcagattggaaaatggcactataccattcctcctcgacgcagcagcagcagcatcaacttgtccagaaaccacttagcatggacaacagctacaagggcgaatcttattcggttgttgccccagagaatatgattcaccagctcgaggtagaagactctgcaaaaatggggactcacatgtcaaatgcttcatcattggtgacaagtttaagcagctcaagggaaggtagcccggataagagcagcctcccggggctgctgtacggtgtgcctccatctgtgtcaaagttctttactaatccagcaaatgatgtgagttcatggatcccaaccactcaacagagatctgcactatccatgcctcacatgccaatttttgctgcttggacagatacttaagaattgtaatcttcctaattcacacaagggaattttctctttgggtgaacaaaacatggcaaaaagcaagagttacttgtaggtttcagttgtggggtttaatggtaattgtaggtgggaatctctctctcttatggagatgaggtgttaaaaaatcttcaaaattttcacttacccttttaaacctatctcgtccttcaaaaaaaaaaaaagaacagtataattttttttttttttttactatttaagaaatggagggaaaagtataaaagggttgaagattgaagtttatgatatgattattgcaatatggattataggaatggcggtatgcataattagattcagctttttagataggtgctgtttaagtactgagactctactcgggttatgtttttcaatgatgcaaaagcaaacagatttggtctttgcctttttgagcttttgaccactaaaagatctcttacctcatcaccaatagttatctacgtctattccaacatcattactgctttaatatcttaaatatttccttcttcccactatcaatctactttatatttgttacatttgtctaaaataacctcagttatttgttttcttatttattaaaaaaaaatattgaagcaaacttatacttgttgattaactttcaaagaatgaaaaatttggaaatattggtactataaatttataaatatcatagatattttgatatcaacaaaaaattaataataaaacttatagaatattaataaatttgaataaattatgacaattcacacaatttaataataaataaaaaaatttatttaaatattaattataaatttttaatatcgtc

SEQ ID NO: 14128 - DNA, 5543 bp, Cannabis sativa
ttagactgagattttttcatcttttcttattgatttgtattaaactctagttcttgttaataagagtttaatttcaaaaaaaaaaaaaaaatttacaaatataaaagatgataccgtaactttttatatataaataatattggggtgtgtgtgagtgaggaattatgagatcaaatcccaacaaaataagtgtgttagaattagataagcatgtaaagtggaatgaatatcatcctcatcatatcatatatatatataaatataaatatattcatggatattccactttgattcattcagctaattttaacatttattctatacacacatacttaactcaaaatagaaaaatgtggattattatataagagcgtccactctttttttgctctatggcggttttcttctccattatcccttgatcgtgtgtaacctccgattaactgtcaaccccacgttcatcctccactccgactccatgtttctcattctctaccagttttccatcagcatctccacaatgaaaatacactatatatatacatgtcctttttctctccgaatcacccataccctaactttctttttatggagcgaattctcaaagatatgtcctcccaaattaaacttacagaacaagaaaaagttgttcatgaaataggagtgtcaagcacttctaccattcctactatctctaaatggagtgtctttgcctatgttctcacccacaaaaaagttaacccaggtgccttcatctttcagatgtctgaactatggtccaagaggtttgaagttaccattacagatcggaagggctattttctagttcagtttggttgtgctggagatatgcagagaactctctgttatcaaccttggcatttcaataatcaacccattatttttgctgcaatttctaattttaaaattcctattgaatctaactttactcacattcccatttgggttcacgttcatggtctcccattccttaggaaaagtaaaactttggctgagaaaattggctctgatatggatgaatttttgaaggttgatgatgattctttattggaaggctggggtccttttatgcgcatctgagtcgatagtgatgcaactcaaccccttctccgtggcactttcctcaaattcaccaacatttttcatagcctatgggttggtttcaaatatgataaactacccaatttttgccacaaatgtgggagattggaggtagaggataatggtggagatacttctctgccttatggggtctggctaaaaggtgacccgctacctcgacctggctctggccgttctttgcgagaaagcaaagccaataatgtggcatggcctttgctaactctctttgtccgcaacaccatccaccatgccctgcaaccccccactccacaaacaccatccatgcactctcccagcaaactaatataataacaaacaatcccagcctctcaccaaaagtcatcaccaacactgaaccacattctacttcccaccattcaattaaccccccaacatcttgccagaatcaaccttgccaatacactctactcaaagcccacctaatacatcaacttttcccaacacaaccttaaacatcaatgaccctcctactgccacacatacctacaaacgccatgttgtccatactggtgactccttgtgatccatacctaaacgctgtcccctttagactactattgaaagttccacaatataagaccccactcactccatgacggacacaattaactcctcaaatgttttgccttctgaagcttccgaagccattacagccttagtgaatgatcacttatctacacattctgttgacgaagaagaagctagtctggcaggtgttgctgagcaaccccaccactcgccatgattgctataagttggaacactcaggggttaaggaaaccgagcaagttccgtcaattatgcctgcttaattctcaacaggctccccatattttgtttgttatggaaataaaattaccaactaggtctattaataaaattagaactgctttgaactttcctaatggcattgaagttcctacgagaggtcttagggatgggttaatattgttatggaaacataatattgatgtaacattacagaattatttaatgaatcatatttatgttcagtgtgacaatggtcccaaattccatttttcttatttttatggtgctcaagaaacacatttaagacctaatacttggaaactactcaaaagacttgctgatatttcccctatggacccctggttggttatgggggactttaatgaaatattttcacccgatctcaaagtttgtggtgctatcagggaccttacattgattgataactttcatgaagctataaactatggaaacctctcacgtttggaccacacagattgagattttacttggaataatcgtgcccctggctctcttaatatcaaagaatgtctggattatggatttgttaatccttcttggcagaatgtgttccataatacttgtcttcaccacctagattactactcctcgaatcatagggcactcaaaattgaattccacaccagcaatgatcctcctttgaaccgaaaattcacatcacgatttcgctatgaagctctttggcttaatgatcctgaatgcactgaaattgtggattgtcactggaccactttagatcatagctcttaaaaccaggcggctcaaaatattcagactgtctcctcccatctgcaatcatggcacattaataagtatggtaacatgaagagaaaaatatatgatgcacaaaaaaaaactctcagaccttagagcatctgatctctgaagtcatgcatctttctctgatcttcatcaatctgaaaaaatacttcatgatctccttgaacaagaagaaacttattggcaccaacgttctcgtattaattggttgaaagcttgagatgctaatactaagtattttcactcccatgccactggtaggaaagctaataaccacataaaaaaaaaaatcagaccgataatggagattttgttactgatttgcaaggcatctctgaccgttttcatgattatttttccaacctttttgacactgctaatattgactctcctgctattgatcttgtcttggacactatccccactaccattacaccaaatatgaacatcttactccataaaccattcacttgtgatgagattcaagctgctttacatagcatgggaagtgacaaagtccaagccctgacggcatgtctgttatgttttttactaatcattggaacaccattggctcacacatcactgctgctgtcttggatgtactgaacaatcgatctgatctttcatgtatcaacaaaacactaattaccctcattctgaaagttaagcatcctacttcagtcactcaatttggacccatcagcctttgcaacgtcatttacaagctcatctccaaggctattgttctcaaactaaagccatttttgcacttggtaatttctaaatttcaaagcgcctttatctcggactgattaattactgataatgtattggtcgcctttgaattgctccattgtctgcgaaacaaaaccagaggcagaataagttatgctgcaattaaacttgatatgagtaaagcttttgacaaagtggaatggaattttgtggaacgtgtactgttgaaaataggattcggccaaggtcttgtagagcttattatgcgttgtatttcttcatcaagctattcattccttataaacggtcatgttacaggaaagttgtagcctaaacgtggtattagagagggagatccactttctccatatatttttcttctctgttcagaagcattctcccggttgttgcaatttcatgaacaacaaggtatgcttacgggtttaggtgttactagacaggctcctaaagtgtctcacctcctcttagcggatgatagtctcctgttttgtcaaactgatgctcgttctcttggtgcaattaaacacaccttggatttttctagcagagcttcaggccagctcataaactatgacaaattagttatgtccttctctccaaatacttctactgctgatcaaaatgcgtttaatcttctccttggaatgcctatccagtcctgtcatgagcaatatctggggttaccctcctatattggccataataagagtgaagctttcaatgagatcaagagtcgtatttggaaactacttactgcctggcaagaaaaactcttctccattgggggaaaaaaaatcctcctcaaagctgtggtccaatctattccagcctatgtaatgagttgttttaaacttccttcctcattttgtaacagtattaagagtatgatggctcatttctgatggggtttcaaagctaatggtcattctattcattggaaaagatggaattacctatgctgtagcaaacaaatgggaggccttggcttcagatcatttattgacttcaatcaagctctccttactaaagaagcttggcgtttctttgataaatttggttcgcttctttcccgtatactccatcactgttatttcagatgaataggctttctacatactaagttgggtaacaacccctcctatacctggcgaagtattcataggggtaaagagcttcttctggatggtctaatttggaaaattggcccaggttcctctgtttgtatcaatgactcttggcttccgggaaataccaactttaaaccgatccatatcatgaatcctgacaacaatttgcatgtctcggatcttatctcttcgaagtatgatggaatgtcacagcactcaaaaggcactttcttagcatcgacatagatcgtatcctgcagctacctttatgtcagtatgcaccagaagacaaacttatttggcatcactcagcttcaagtatatacacagtgaagagtgggtatcattcgacaacctctctaagggaagctagatctccttcacactctcaatctcaagctggatggtggaatcaattttggaagctgaaactaccccgcaaggtcaagatttttgcctggcgtgctctccacaatgctcttccccttgctaccaaccttcatcacagacatataatagatgacccctcctgctcaagatgttatcacactaatgaaactttcaaccatgctttcttcctgtgtcgggctatgaaaaatctctggtataaactaccctttgccatggattttctagtttatccaactctagtagcagtgattttctccacttgcttttctcctgcactgatgatgatcaattggacaccattctaaatctaatgtggtttatttggtatgattggaataagactatacatcactcccatgctcttccacattcgatctaattagacaaggccatggcttatctttatgaatatcgtcaagctaacactcctacaaagacccatcataactcacaaatcaaagatcaaccatggtagcctccccccccccc

SEQ ID NO: 14129 - DNA, 11989 bp, Cannabis sativa
agtgtaattaagtagctagataaatatgcaaaactattcttttaactatgtgtccaaaatctaattctctcttagcttttcaaacacgcctttagttttaacatatagaaaaaagttttaaatattttttttcattgtagttatttaagattttcaacaaaattttaaaaaatttaaaataattgttcaaacattttattattcttttgttttctttaaaaataaatattttacatgtatataaattaaaatagataggcatacaaaatactgtttgaattttatttttaaagagttaaaatttgctattacctttaaattatataggatatttaaaattataaaaagaattaaactaaaaaattctcctaaatgtaaaaaaaaaaaaaatacaccaatgcactatagaaatttccaatagtatttaagacacgatgagatgaatatgtatgaaagagaaatgctaaaggacacccatagtgcgtaatattcttgtgacgtgtaatatcgctattagtacaatttaatatcgggtcccacatattttactttaataaaaattatagagaaccgttaactaattataaagcgtcacttcataaaggtgctaggcacctcagtgcgaattatcaatgctctttatgaaatagtgtggataggagtgttcatcaaactactcacgccgtgcaaactgctccacaacataaaaaatacaatttgaaattttgtatggtgcggttgtaatttatatttttgccagatggtgcagtgcattacaaaaactgcatttacggtttagttagaagaaaatgttacaacctgcatcactcaaacacctctagttggactgtggaatgggtaaaagaaagttgcaaaacataaaaaataaaaaaggtaaattggcaaagcacatttcttgtcaaaacaaaagatggtgacgcaagcagcgatggaaggaaaatatgatttgaatccacgtcggcatcgacatggctttgtgggtgcgcattgcgcaatcaaataacgttggcttcaagagagagagagagactgagccaaaactagaacagaaagcggaaagagaaacagtctttcttttcttttctctctctactttcttccctctttcatgcaaaatttctcttctcgtaacaacattttctcttctcccaaacagaccctctcgaggtattttccatttctttttatagttttaattatttttttgttttaaaaatagagaatctttgtgatgttgtgtgaggattgatcatgggagacacagagagttgtagtagcagagccgctgatttttcgttgactcaaaatcgacagcacaaacagaaagttcatacttacaatgaagttcttcatcgactcatggacttaaacgtggctgagtcaacgattcctggtttcgaggatgaactctgggctcatttttatcgtctccctgctgggtatatccaaaccctagctcttacgtacatatatacgtatgcgtatgctaaaaatatatagaaatatgtgtatacacgttctgtatatttataatttacaagtacaaaaaagctgaaagattatttgtgtgtttatttattaatttgttacagttcaattcgtggtaacgtacggtatggtgtatcctctgttctcattgattagattctttgaatatttttggccaaatatatttaaataataggatgttgtcattttgaccaggtgtggtattggagaatctttaaatatcgctgtatgtgttttatttatttatttatttcttttattgttgttgttttcttgatgctattcggaatagaattacggtcaccatagcttgtttgatcgcctaaaaaagttcaaattagcattgaccaagtctaattaaaaggcatgaattattaccagagttgtttattatatcttatcttatctgatcatatgaagaaaatgtatatataaaaatatatacattttttatttgatttggcactcttagaatgcaataccaatttattgatgttgtttagctttttaaaggtatgcactggatgtcaatgcggagagggcacaagatgttcttatgcacaaaaaattactccagttggcccatgaccctgctactagacctgcatttgaagtccgtcctgtcctggtatttgatgcacaatactagttttttgaatttgtcgaagtgggaaaaatataacacttgaagattttcttttagctttttgtactattattcttgtatttgtagatcaactgtaaaatccatttgtatatttaagctgttaaaattgacactgagaattggttctggtttggaaaacaatttcataattttcctttttcctatttttatataatgatgtaagttatctcagtttaagtatatcagtattaaaggtttatcaagtagtgataggctaaattggattgcttatatctctcatgcaggttcatttggcttctgatctaggtgcacaaagaatagtggaaacgccatggtcttatgcaagaaaacagaggtattttgctaatgaaaatggtaacatagtgatttattgtgtagaatagaatgtttgatgtttttttgtcatcctcttactcttttttaatatgtcagcattcaacctcaacaagcctttgatttgtcacctgacctaagacttgcttttgaagccaaccaattctccattcaaaagttggatcatactatgaattctcggtaaatagtccttagatgtctattgttattcaggaaacaatcgatttttctacggttattctttttctagtaagttttatttccaactttgtaatctttttgcaggccaatgcatgagattacaatttccacaaatgacaaaccgaaacttttttgtcaggtggctttttatttgttttgtaaggataatgttttggtttacttataatctttgccgtcattgttggtggtgttgacaactcaacatgccttgtaattcatcatattttcctatgtacatttttagttgacatctttactgtctgaagttgggttgaacattcaagaagcacatgccttttcgactatagatggctactctttggatgtttttcttgttgatggttgggcacttgaggtattttcatacttcttaaggacaactctataatggatgctagcttttgtagaaagaatattcaattgtttcaaaaaaaattagtaaatttaaatgaattttaaagcttagtgcttttgagttcttttgattattatgttcctaaatttctgcttcttcttttttggcagtcttaaatagcttaatttttctattttgaacaacttgaattgttttgtaaatgtgtaggaaactgagcagcttaaagttacactagcaaagaaaataccaaggattgaggtaatgcaacttacgggtttgacattgtgacagaaaatacctttgtatttactacttgaaactagaaaaaataatgatctttttttgtcttaatgaactaaaaacaaacaaagggttcgtgttagtccttttactataccatcaatgtggtattagacccataatctaattattcattgaaaatgttaaatcaatctatacgacgcaatgattgggagagaggatgttttcaggaaaatgattttctggggacatagaagagaagaagtggaaggctatctttttttctttcacttaataagttgttttcatcttttttctgaatagcattttaactaacatgataaatagtgttgtagttctggtacgtgtgtttcatgtttctaactttctatagacacaatcagctcaatttatgtgtaaataaaatgacatttcaaaattgtattgctgaagcatcccaggttgaatcagtttatttctcctgctggacagccagagactggaatgaagctgatattcaatcatgccgagatctgtaatgatggatctgaagtcagggatttggatctacgcttgttaaaatttgaaaagaaaattgcaactggatcatatagcgatttgtgagtttcatcaccagattttttttcctccttaaatgaatatgcttgaataatctgatctgatgatcctaggtacaaaggtactttctataatcaagatgtggctataaaagtttttaggactgaacaccttaacgaaactattcagagggaatttgcacaagaagttgatatcatgaggtctgtttttaattctgttactaatgtggtgatgttcatgcaaacacattctattgtaatgtaaatgttgtctgtctggtttgatagcttcaccaagatgctactttgaaaaagtaaaaaagcttccgttattttggcggacttggttcagtgcaatctcttagttatcaagttgacagtgatattccctattagagatggttcatattgaaatgatgcaatttcgtataattttaattgtatttttttattggatgcatttgtgtgatattcttggaaagcattttactctttaaaacatgtaggaaagttcagcacaagaatgtagtcaaatttattggggcgagcaccaaacctccaagcctgtgcatcataactggtacttgaattaccttttctagatacaaagtaatcttttaactttttacttttgtatatttaattggtaatatggttcgtttcttctgtatttaaattttctcaattgtattcttttcattgcagaatttatgtctggtggaagcttatatgactttctgaaacaaagtggtgttttgccacttcagttcttgctcagagtggcaattgatgtttccaatggaatgaattacttgcaccaaaataatataattcacagagacctcaaagctgctaatcttttgatggatgaaaatggagtaaggattttactatttatttttatattttgtcgttataatctagtcagatcttttacttgttggtcttaaattaaaggaagcactcttaaaacaagcatattcttagccttacaattcatgtcattacctcccttagccacaacaacttgcattttttatgttcgctattttttcttgatactaaaggaatgcatatgcatgtgcattccatgtccttgttgataggatcttaaccagattattccaaggctgtacagaggtttagcatgctgctatggatttcaaaatgttaagcctcaaattttttttgacaggttgttaaggtttcagatttcggtgttgctagagtgcaacctgagtctggcgtgatgactgcagaaacaggaacataccgttggatggctcctgaggtatttattcactgagtgcttactcgttgtatcttgttcttaatgagtggaagaaaaaaaaaacacatggagagagaaattcacgagatggattttgatctcgacaaatgtactaaaagcatctacttgcgttgaattttcctttttcaattttatgtataaaagagacactcatatatttgacaagagtctttgatttgacaagagtctttgatggaacttttttttaaaaaaaataaaaataaataaactaaaatgtcctttttgacgactgcataataagttctcggatttaatgtacttgcatcttttacattgcaaattgcatcaaatcagtgcttgataaggtgaacatgccaacttcatttatgcttgtgtgaatgagagttgttcaaaagtttcaagcatcataaaagttcgtaatcatatttggatgatttcactcatcacatcatagcttgatcagtcctcgcgtgccatttggttatgattgtcatttttcattccgtgtcttacatgtaattgtttgctgttgataaattaaaaggtcattgaacatagaccctatgatcagaaagctgatgtttttagctttgggatcatgctatgggagctactaacagggaaggtaatgccatccaactttaatctcatattgacataacattatggtttgctttctcttccctacaaaaagaaaatgctttcttcagttaccaaatacaaatgcctctttatatcttttcctttgaattcatttgttgtggcacagcttccttacgagaacttaaccccattacaagctgcggttggcgtggttcacaaggtatatttctttataactgggtgcaatataatatattttttgttcgggtatccaaatcagtgtaatctattagtttggtaataatcagaaactggtccaaatatttgagaatgcaacaaatattcaatctcaaaacagtgagacgtaaataaccaagaggttcatgaggaaatgaatttgcagggcctaaggcctacaattcacgagcatactgatccaatattagtggaactcatggaaagctgctggcagaaggaaccatctttaagacctccattctcagagattcttgagattttgcagtgcatttccaatagggtactgaaagttcgaaaaccttttttccccaatatattttttctttttttattaaaaaaaagtatgattgttttgaaacagattagtgatccgagggtatgcaagcagaaggagaaggcatcacctataatcccagcttttatgcatggtcgagggccaagtaccaaatgaagtaggtttctgtaattactttcttgtaaaaatttgcctagtaaattagtctatcttctcttgcattaacccatcgggaagttgctactatgtccccaaaattacacaaatgttgaggacacatatggtgttaggcactaataccacatctaatataaagtatttactatgtggtctttgtaacttaagattgatctgtatttgtgtgtggtatctaacaactcacgtcttataaaaatattagttcaagtagctgcctgtgtgagtgtgtggaaagaaaatttctaatccacagttataaaacttcaaaattaacagtagaaccgtagaagacagacagtgtcacacaacccctcagccaggaccacaaaagtgtaggttgtttgatgcatattatcattgtagggagactcaagttcaatcaaatatatcgattagtgttttgagacaaagaggtctcacaaatttaaggccgtttgggagggcttttcaacaagctagaagcgcttctttaaaaagcttttttgctttggctgattttcagctacaattacaccaaactggtgaaatattttcatccccaactcctcagccagatcatagaacatggttgtgtgatgtgtatcatcattgtatggggatgaaagctcattaatatctttattatacatcttcaaaatagttgaaattaaaactcccaacaaaaacaaagatcacaattcaacattctctcacccttaatcgcacctcggatctactagtgtgctctcctgcagttggtgcattcccatgtggtgtactgctcccaccctgttattgcccttggtcttgtggctttactgcaatcattgttactatgacgttggttcttgtagttcctccgacctctttcttgaactccatggaaaactatctgctgttctcctgtggttgcgattcctttgtggcatatggaccagaattctctcgttgcggagagtgggtattcacatatcattccacgcaggtggttgaggtggcagttggttgtttgccaccatctccatgatagcctgcatcaattccagttatcccggtgttctcagaatcatagtttcgttttttgtttcatgttcatcatgattccctccataaaaaaaaaaaacaatcacgaaataatgttaaaagaacccttcttctgtcaccaaatattgttggagaaatttaaacaagacagaattccacgagtattaaaggaaatcaagaacactcaaattaaatagaatgtgtgagtattcattgaaatcacaataataaattaataataaagagattgggccaggtctcaagccagtgtctgtcatataagtttggtcattaattgattagctacatattaatcactggtaaatacattaaaggcttttattgctattataacataaaactcctatgaataggttcagaacacttgcattaaccctcttaaactacatgttgagcgtttatgtgttgattgatctaacctggcagaatatgaaagatcatcgcacaaatggctaggtgcaaaccttaattgtagttgtcacacattatgggggtgtttgcccatgtcgtagattatgaagaccagtctttatacgaatggggccggggcagagccgcttcagaaataaaatgagacaaaggattataataatgggcggacctaaaactaaagttaagggagacatacttttcttttgtaaggaggggcaaaaagtagactaaatattaaaagtaaagatgattttactaggatttgaaccttgacttctataagatgtgtgaaatagcctaatcaacggtaaagttactatgtttagatttatcacatttaattacaaatatatattgtaattaaccaaaatatatatacatttttctcgcttatatgtggatttgcccatgattataatggtttagtcaaaattcagtctgcttagtttacttttggcaatagtttgtgcttaatcttattcaatctagatcacttctttatagagaaagcaagtctccgtttagattagataaccagttatatatgaccgttattacattaattatataaattaataagaaaaacataataaatgaaagaacagttacgaacgttcttgattaatttacttgaatgcatacgacttaataagtcacacattcactatctatattctaaacacgcgagctcgtgaactctttcgtattttacttgtgcatatatgggcattcatgcgtcaacaaggtagaactttcaagattcttatgaattatcgaacatattagtctttcggatcagatgtgtgtaaaaatgcagtcttaattaaattgctactagccttctacttttatgagtggcacggttattaattaaaattgtcgaggcggggtgccgaataaaacctggttcgtacggatcagaggttgacctgttggattaggggcgacctgacccgcgaaaaaagcccaattagccattcctatctgttaatgggttcacgtgcttttatattgcaagactggtactataggataaattttattaacagattttatttgcttttaaatcgtattcggattgccgatttttagtacttaccaatctgcaaaagatattctcgatagaagactagactgagataaagctcaaaaagtgttacataacataatatgctatggttctaaggaatgcaattgtttatctggtcgagaagatgcttagtaattactcctatctcataacttgatttttaaagttttatttatcttggattatacactattctatctattgaaaaaaaaatagtctaattttttttaagcatttagaaagaattttttattctttattaaaaccacttaattttttttattaaataataaaaaaaaaaattgggagtgctcatagttttagtaaaaattagtgttataaatacggttcaggtttttttacatgacacaaaataagcacgggcacgactagtcacgaaagaatacgggctaatttggttggtagagaaataatgagagattggttacattctctaataatgtagaagcatattattcctttttatgacatgcactaacaaaagctaaaagatttgctcaaagtaagaaccacgtaacttgtgaaggaatttccacaaatggtcgaatcttctaacaacgaaaaacacgcttacacttacacccccacccacttaacaagaataattaagaagaaaagttcactctgtcttgctatactcacatagctcaatcagaagaaaatggctgaaacagatagagaatttgctgtcaacattgcaaccatagcaagtggcagcaaagaagcagagaaaaataataatggaggagaggaaagttccagcaaaccagtataccagggctcacaaacaaagaaccaaggtgctcacgaaagctcatggaagccacccttaagcaggaccaagtccaggcttgctgacccacctgaggaaccgtatcagaaatgggagaaagtgatcatcagttctagacgattagtgagaaaagatggtgatcagtcttttgatgatgatgaggatgatgataacatttcagaagaagataagaaatccaataataagttcattatagttacacttgttcagtgggtaagccttgttttgatcttagcatccttgggttgtagtctttgtattccagttcttgaaaaacaaaagctttgggaccttccattatggaaatgggaaattcttgttttggcattaaactgtgggaggttagtctctggttgggtgattcggttgcttgttatctttatagagagaaaatttctttggaggaaaagggttttgtatttcgtttatggattgagaagggcagtccagaattgtctctggttaggcttagtcttacttgtttggaactctgtttttgataagaaggtagaggagaagagcaagtccaagagtaagatcttactttatgtaaccaaaattctggtttgttttttagtgggaaatcttatatggcttctgaaaacacttatggttaaggttctagcattgtcttttcatgtcaacaactactttgatcgaattcaagaagctctgtttaaccaatatgtggttgaaacactctctggtcccccaaagtatcacatgaaagaagatcatttaagggctgttgctgtggttagggagtttcagaaggctaaggcatcaaacaccatggctatgccaagtgatgatgacctcacaacaagtctgcttattccttcaaatgataatgatcatagattttctaggcaagtgcctcctcacaaacatggtggtgccaaattctcaactgaacacttgcataagctaaatcagaagaatatatcagcttggaatatgaggaaaatgatagatactgtaaggaatggttccttggccactctggatgaaaaaatacagaactctaatacggatgatgagtcttccctacagattaaaactgaatgtcaagcaaaagaggcagccaaggagatatttgccaatgtagccaagttcgggtccaagtatgttcatatatatacataaatcatttatgttttgaataaataagattaggtaccctatctatttcggcattttggagaggtttttaattttttttttcatgatcgcatacgttgtacctatttaaaaccacctacaaaatttcaaaaaatttcaactagtttagaatgtcgaaaatacccctaaaattattactactttcaaaccatttcttgaattttgagtaataaactttgaggggcacattttgataattgtaataatagatgggattcacaactctataagtatattctattaaagtttaggaggcatgatgactatctatacagtgaaaatatatgcaatagtactttcatatatatacatgatttcatatgacaatatatatttatatatatatgtttcagatatatttacttagaagatttgatgaagtttatgaataaagaggaagctattagaacaatgcatgtatttggagccacatctgaattaaacgagggaatcaccaagatggttctcaaagaatgggtggtaatactaaaaaaagtctcttctctgtgtcttcttacaaatactcttttatataataatatatactttggtttggaggtttaggtgaatgcattaagggaaagaagagcacttgcattgtctcttaacgatacgaaaacagcagtggatgagcttcacaatatggtgacagtgcttgtaggattcataattgtgataatctcacttcttatacttggagttcccatcatgcattttctcgtcttcataagctcacagcttcttct

SEQ ID NO: 14130 - DNA, 13344 bp, Cannabis sativa
tagttagggtgttacaatatgtgagaaatgtttattgtgtttattgatgggtaaatctgtctgtaatcagccatgagttcgagagcttgatgatggattgtacatgtttgggccacacaagagcaagcgggtggggtctactagtgaaagtattttgtaatctcaaattttgctgcttaggttggctagtaaattaacttgtaatattttgtgaaaagttttgtggaatcccaaaacatgttgtctttttagtttgtttggaaaatttaaaattattgcaagttatattttcattccactgtaattaaagtttaaattttcccgctcttacttttgtagtaatctcggtttagtgagattaggttacattactggttgtcatagcgtggctaatttttaaggcattagacttcctctctcacacacataccctaacatcatctcaaaacttgagttttttcattattgattgataccttgtattcctaagggtgctgtagaaaatcccacctatagtgatctggattgtcttaaccctcggtattaatacaactcaaagaggagtaggtcattacccgctatcacaaaggggcccaaacctctatacaaaatctattgtttatttcttttcattcttatttgttcaaacatgtggaagcatcaaatccatacgaccccgcagtcggttgatcactttttgaggtcaacacatttgactcaagcttctattttatcaaagcctgtggaaggagaagatttgtacttgtacttggcaatgtctgatcattctaattatgcagcacttgtgtgagaggaagaaaaggtctagtacgcgatctactacataagcaaaagattgctgggtgtagaatccaggtatactatgattgagaaattgacattttgcttactaaccacgtctcaaaaattgaggccatccttccaagcccatgccataagattactcacaaatcatccccttcgccaggttcttcagaagctagactcctccgacggattgcaaaaatgggccatgaacatagccaatttgatatccagtaccagcaacctatttccattaaaggtcaggcccttgccaacttcatagtagagtgttcaggattaaatgaccttccgcaagatctagtttcgaaactacctacttggaaggtcttcatagacagagcatccaacaataagggagctggagctagggtcatttttatttcttcgcaagggcacaaactccagagtgctttacattttggattttgtgcctccaacaaaaaagcagaacatgaagctatgatagcaggtctaaaattggctaaggaagtgggagcccaataggttgaagtatacattgattcatagctattggtgaatcaaatttctagtgaatactagacgaagggtgaaaaatggctacatacatcatgatgtcctaagaatagttgcaaggattcaaaagttacaacgtctgtcaagttccaagagaacaaaattcattcgttgacatgctagttgaagttgcaacgaatcttgagatcattcaacacgaaatagtcccaattttccatttcgaaaaaccaagcattgagatcaaggattaaatgccatagttgacaactctcattcttggatggtgcccaattacaacttcttcaatttgggagagctttcaagggacaaggctgcttccagggaagttcattattaggctccccgttatgtgattatggactagaaactttattgatgaggactgtcaatgccatattaaaggtgcatcgctggaacggaaattgccacagtgatccatgagattcatggtggcttttgtggagaccatacttttgggcccagcctctctaagaaaatcctttcccaagggtatttttggcccacaatgatgaaatatttcatagaatatgtaaggaagtgtgaacaatgccagagttatgctaaggttccatatgcaccacccactgaaatcacactcatgagtagctcatggccttttgcggtttggggaatagacctggtaggatccctccccacatgcaaaggaggagtcaaatacgcaatagttacaattggctattttaccaagtgacttgaggcagaagtaatgaacattgttacctccaagaaggccttggactttgtcattaagaatattcagtgatgatacggacttctatacaagattgtctaagataacaggaaatagtttgatagttagcacttcaccgacgactatgcccagcagagaatcgtgaagagtttttagatgtagcccagccacaagccaacgggcaggtggaagccgtgaacaagattctaaaaactatgttgaagaagaaactccaagcctacaaagctcattggctagaagaacttttatgagttctttgggcctatcagaccacagagagaacttcaacgggacacacgccatacgcaatggcttatgggtgtgaagcaataattccacggtcctctctcatcgatgagaaacttacaatccttcctagaaccattccttgctccaggaatcattggatttaatagaaaaactctgggaaaagtcacaagtccaacttatgatgtaccaaggaaagatttctcggcactttaacccttaagtgaaaattcagacatttaatgttagagatctcgtcttagagtactcctagctttgtaggaatcgggagtggaggtacttggccaaaattaggaaggcccttatgaaatacttaagaaagtgggccaagaaacttttcagcttaagagaatggatgaatagagggttcctcatgcctggaatgcagaacagtcgcgtcagtacgaccaataggcagaggtgacaaagccttgatgaaatcccttaagctttttgtaaatatttatgtaatcaccttctttatgtacaaccttcgggtataatgaaagcaatttacatttaaatttatgatttacattttttaagtcacaagctatgttttaaacaagtgaccaagaaattggagatgtctaaacttcctagctcacttggggggtactatgcctagctgtgtatgcccccaacaatgtacaatgcgttatgattagttactttgcttatgcttatgcatgtttttatagcatacaaacaaagttaaaataagatgcgtattcaaccaaattctctgaaaaggaaaaatatgcttgaattccttcttgaggttaagataagtgtaaactctaaaaattagatgtgtttttagctaaaattcccaagaagggaaagactcacctgaatcccttctcaaatttttcagcgcattgctcaaattttaaaatttggttaaaatgtgaaggccacccttgaactcctatgtatttttagccttttcttgctcaaaagatattgtctaaggttcatagtgtgtaaaactggcccccagattagtgagaagccttagtggcattagacttttatggatgaagttcaaataagaaaatacgcttggacattatcacaattttagcccaagtcctacgcaaggaatagcgcctgacatctacaacgtgttcaacaattttttcctaaggcacaatttcacaaaagtaaaagtcatggaacgcttggaacgcagaggcacattcttttgcaagaaaaccatccctgactgagcattcaacgagcatcccagatagacaagtagctattcaaagaatttgaaaagtaccaagactccgtgaccatgtgattgtctgggaacagtctaaaagccaatttgtgctggtgggacatttaaccaacttaggtttgtagactccatgaaaggctgagaccaagacaatcctacctaaaaataggaaacaagtgttttttaaacatttcctagatcagtagaaggtttaagcatcagaaaaaatctaaggcttgaagtagtggccattggaaccacaagcttgaaaacacctaagataacaacccttaaaatgatctaacaagccaatgcatgagaattgaagctagaaattgaaaatgaataaagcataaaagtctacaaactattacaatgcctcgcagaccaggtagataatattctcttcgtagaataaagaagggttgatagtctcgtaaattataaatgaagtgccaagcggatcgggcttataaaaatagctccgtaaatagcaaaataaattttcctaaaaaaataatataaagaaggaaagttatgaatggctcggagatggaatgtctaactgggcagttggatcttaaggaggcacttgaaagatatccttaggcagagaatcatcctattcggagggaatgtccataatttcaaaagtttggttttcaccagcctgtgcattttctaccccttgagcaactattttagttctgtcatcagtagtggttgcaaccccgtcataagtctcaaggtattcatcaatgttgcggttgaggacctcaaccctttttgaaaattcctcagcatccttatctaggttgctgaagattttggggatggtttttttgagacgaggtaacagaatgacatgggcgaggttcatagattaatttaaggctcggtggtgagactcttactctttttagtgctttcccctcttggcatcccgctctttgtgtagagaggagacctccctcaaggcatcatcacggttctactgaaatgagagatcttgtagcccttttttggtgttggactgagccttgaatcgtttggccttctcctcgatgccaccttttagagttgtgacttgatcttttgcaattttccacagcccctcagcagttttaaccttagcctcatgcccctagatgacattagtttctttctagagctaaagggttttggtcattgcctgattcttgatgtcaatttttgccttcaaggcttcgtcatgttctgcagtaaggaaagaattggtagcctctagctcctcgaagtgagtcttgaatttttcttttgtttgagatgtaaaggtcgtcttatactcattgtacttttgtaagtactttttgtcagtcgttctgtctgcctccttgtagtgctactcagcctccttcttaatgccctcaaccttgagttttagagccttctgagccgctaaggagaagtatagttagactgccatcgtttacacctccctgcaggttcacttcgcgaagaaatccatctagaaccaatcgaaagtaatgagctataggaatggaaatttgtattaagaaaaagaaaaattgaagtggaagtaggaaataccccagctgcttattctctcaaagcattggctaggatcacagggtcagaactactgccaatcgcccattttttggtagtcggctctatcaggttgactgcaatgtctttgactactttggtgctgaaaggtcctaactccttgtctaggcaagggaccaattacttgctcacagttgggagatctgttataggagctgaataccccgagttgcagataccttcagtaattttggccctttttactgcagacattggtccatctggaactggactacacttcactcttatgccaagacctcgaccccaatatgagtgggcttcataggaaatatcaatggcaaacgtgggatgttgggtaagtttttttaaagaccctaagctggtttggctagatggctaaaagaagttgaggcagggatggcttgactacctgaagctggtgggagtgttttggattgattgtgcatttgtttggattgaatcttggtgaaagagtttggggtcacgaggaccagatacctgtcattagcattggtgattggtggttggctcgatgaggttgtttattggttttcagcaggaagacttctctctctagtagatttggtatctcaggaagcatagttcttggccctttttcctcccttctgggatggggagcagtatcagcatgcttcaacgctgcgtcaaatatcaagaacaccattccttccacggattcctcttcgtctgaagggatcatgggttccctattttcaaaagcaacattaagtggagccagaatcttagctgctccactacttccccctctaggggttaatctggtcctggtggaatccctaattttgagtgggggtgttagagggtccaacacttggctagattttttagtttgagatttattttatttccccttgctatcagccacaacattaacctccttgatcatgttcatcagatcgctaagcatctttgattcgagcgtatctagaaaaactgaaacaccacaacaaacaaattagtcaaaaaagtagaaagtaacgacgcaaatgacacaacttcaagtaaaagatatcatgggagtgcaaccatagaacgtgttattatatgattcctctcttgtaaataaagtgacttcttcctggtcaatgaagctgtcatattccttgaagtctagaaaaacatagtaaggcaatgaccacgttaacgatgtttggggggaattcttggttgttggagtgcctaactaattggcctaccatattaatgtaatgcttcattagatatctacgaggatccaggcttaggaaagagtggtcaaaacccccttagtctatcagtgaaatttgagataggtaggggtacaaattacgcaaaagggctgattacctcttcccaaagtactctttccagatgtgttcgtatctggtatggtacacggaacctatctttgatttcctcttcttctgtgaggggttcaagattgtgactattccaggaagcgacaaggagttcctcatatttggccgctttggttatcgcaaccaacagttctaagacaattttctctttaaggtgactgggggttgaggttagcccataccattgactctgttaatgcattggaatgtggttatgagactatattggtgcaacaatttaatggtcactagttcctccaccctcaactcttccttgaaaggctcgtagaaggtgatctgttgtcttaactcatctgcgagctttgttctgggaatggattcttcaagaaacaaaccatagttaaatcttgaatagagccacctttcaatccatcagggaaataagaaataaaagggaatgaaagattgtacctggaatcttgaagtccaaggagagtgctggaacacgcctcatggggaagctagttgtgataaactagtactcatgatggtttgggcaatgagaagaagtggtcattggacaccgagcatgtttgtatttaaacccaatctttgaaggatatccatgcatgggttgtagttttaactttaaaaatataatatttcttccgaggttggagcagtttgtccctgggacttgcaaaacacaaaccaccccgcaagtagcatgtatgcaactgacaagagctggaagggagctattccactttgacacaaaatttggaaaagtaggtccgtcctaagcgagaggtgggctccgcaagatatatgggcccaactctaggttccaaagccatccattctttgggatgctgattcaccaagaatggacattcagtgccacatgagtctcgaaatgtcttgtactcgtccatcagtagagtatgctttaaggagaccgtagttctttagctgatttggcctttggtctatctcccagatataatcattcagaattagaggagtcagggacacaacgtaggctttgcctttgcccatactacgtcgcttggattgagtggatttgaaaggtccctcatctagaatggggtcttcgagatcccctttcacaggaagcacttccatgggagatgtcttaggaatcttctcaagattcactaaagctagttcgaaatcgttaccttcaccaaacactaaaaaagtgataggaaagtccatgcagtcaataccctacatccaaatgacaaatatggttcttagggaagcctaccccaagactgctaagagaagtccccaccggactcgtgaccaccaaggtcactaccttgaagtagcctaccatggtagcgaatcgggaacccaacatagaacaacaataaaaaggcccaaattttctatttcatagacaaagcaaaatgagtacacataacgaataaaagaggaagtactcaaagagattactgataactcaaaaacatttagcctaatcctcggaactagaaaatcctaaataacaagcaagcttcttaacccaagcaaaaaggatgatacctctttacagctttagctctaaaggtgtccctcagtgaattaagcaagctaattccaaacataaataaccctaaactcctaaaattaaaccctacgcatgaaaggtggcagattccctcaaagacaaaaactatattttccattaagccttgaagaaaacaatttaaaagctgaggaatacttacttgagatacaggttaagaaatggagatgacggttgtgctacttgaattctgcttcttgcttggcgacggtggctctcctagctccgtcagcagaatggcttaagatgacaatggatgttaaggaaatgaaacaaagaagttggggaagaatgggttacggttggttcagagaggcatgggagggctaaaatttttgggcgaaaggttgtggataaagtaaggaaagaaaatagtttcaattgccaaaaaccccatttatatggatggcagtggttgtaatgattttgaaatgcacggtctagatcaaatagattgggggggtcagtcattcaacggttgggaatacaaaaaagttagcatttaatgcgtctgaaggaagagaataatgtatttatcactcatcattttgtggcagcttctccaatgtacttgaggataggtgtcttttctaaactcaccatcattcgttttccccgagaaacgcgcctaaaatacagagcgtgggtctcacgactccactaccaagcatcatgcttcgacgagtcatcaatgatatcaacaagcatgacaacccttcaggtacctgaggtgctatggaaggtcccttccacctcctgatggttggttcgtaagttagagacatgaaacaaacattcgggagaaggctgcaagctcttgatactcttaagtcttgggagcttgggggtgattgttatccctatttcaagatgagttcagcgtgaaagtcacagcagagtgctacgtcagattaaacactgatatcatgaccttcccctaaacgaggttacaaaagatactacaatacccaaaagaatgcttctccactaaagaccgagatgattcttgagattctcaccttatgcttccgtaatcatgagtaaataagagtcgtgtatgtcccaggatggttgcaaattggtttgtcttggaagaccttagccaaacctccttgaaacttcttaaggccaaatttggagcaaaccctgacggttgcatgtcatctaacatgaaatcagatcttgtcccctatgttagaccatggttgtgcgcatacgtgccactgtagttcttattgtccaatgacttgtgtaggcaattattttaaaggagaaacttttgagcgatacgcgtcaagacctttacaagatatcttgcattgatcaagaaccacatgatgagaaagctacataccaaaccagtggtcagatggtattgttgtgtttttggcctttttgcgtgttgagtaagaaagcttagttgggtaaagggtatgcccttaccctcatgtgtgcctataaatacatctattttaatgtatagaggaggaacattttttacttaaacctctactaaaattcttagagagctatcatctttgagagaaacaagaagaatacagagttaccattgtaaacacttgtaatactcaaatacttgccaaaaaggctaatataactgactcgtggactaggaattattaatgcccgaaccatataaaaaattcatttgtccattatttattattttgaattttcttaagttcttattagtcgattttcgaaaaatctcggtaaacaattatagtttaaattaatgttaaaggatatctaaattgaattaacattaaagtattaaacaacaatttttaaaaaatagaataagaaatatattcatatgtaaattttaaatttcaacttcaatattcaaatacaatcaaaattatcaactataaattctaaatttcaaattaaactctataaaatacaaatattaaatgtaagctagttttattatcaaacgtaatttatatattatattatagataactttagtaaaaaaaaatatgtaaatcagtttattcaatttattcgggttatttgagccggttagaataatattcaacccgcccaatatatattcattggacggtttgaattttttgtaaagttattcgggttgtattttttgtcggtttatttgatttagtttagagagtttattcaggttggacggtttgtaaatttttttgaacaactctttatatccactagatcagcgttaccacaaactccaaaagtaagtaatcttaatgaaaggcccttatgaaaatagagggcaagataggagatcccgtggaaggagaaaaagaccagaacccaataattaagagaaccgaactagaatcctagcaaagcttctttttagaaaacatgttatgttgttattgattactagaggttttgttgtgatgcttaatagtatagttttaataattataacataataatcaaattatggagagtaacattttctttttcatttcttatatatcaatgtatcttttttaaaaaaaaagtgaacgatagagaacaataaacgaaatattattcaaaatttgacaaactaaatcatgtttggtgtttgaaaaacatgagcttataagaatttagtgagataacacttgctaaattttatcaaagactactttttactgatgtagtaaggtttaatttgaggctgagatttaaagagtagagaaaattcattatatccacatcatctacaaaacaatctcaagtgtcactcatttggataaagcaacacgtggcaaaaacccatttgttgtaacatccttggcgataaggaaaaggattatgttacaacacattctacactttaatacttaaaagaaattgactcatattcactagtgcaaaaaaattgagagacaaattaagcataacaagataagagagtctgagttgagacatggcatctatggttatgacagcctcctcattcccatgcggctcagccatgaccatggccaagcaaaccacaacaacaggccgccgtggtgtcatggtggctgccaaggcctcagcagcagcctcagagggtgagaaggtgagcttgcaaatgaagcagaacaaggaagagagcacaagtgggaggagagacttgatgatggctgtggcagcagcagccgcctgctcggttgcaaaggttgccatggcggatgagccacctaggggaacccccgaagccaagaagaagtatgctcctgtttgtgtcacaatgccaacagctcgtatctgccgcaagtgagcaagtattagttttacttgatcaacttataattcaaatgttttgaatattggtggtggacctggttgttgtggtgctgtataatttgtaaaatttgtattgctctcatcatcctttttctttttctttttcttttttttttttaaaaaaaaattgaacaatcaagctctttttctatcgctgcttcatcctctccctttattttttaatctaatcatagctttaattggcgacataaagttgtgtttttttattaaaatacagatgattgttaatcccatatgggggtgttagatgtcgaactgtttgttactgagtgaatagtactttgattctgtagttggactcggctatgatcccgtcccctgacctctgattttatagtgggacggctcacgtcacgtgatcacaactatagatgaggatggttacgaagatctccctaggctctagatagatagtcacttgtttgaagagggtaaccaactaaccaagttcgaatttggccttaggaataaaccatcccataataacaattaggagtaatatgtggtaattcctatatttaacgacctcaattaggggtggacaaaataaggtccaaaccattcaactccgctaactcatttttttttgtagtaaatggttatgttaagaataggtcatgcccattggactgaaaagtgataggccatataattatgggttgattatgagttggacatattttaactctatgtaactcaaaccaactcattttttgaaagatgttctaaattggagacaactttcatacataaagtatattttacattcacaaaatataacaaatatataattatacattttcatacataaataaattatattgtaataacattagaaagtgaattaactagaacacatcactaacacgtagtctatagttaccctactatttatattattaactttactactcacacaatgataccactaccaccttagttatttttaaagtactatattacacacacacatatatatatatatatgtatcatttttttttatgtatgcactaggttaaataattttatcttgtttgtaacataaatattaaagtttaaaatattcatctcaacccaacccaatccaacccacctcctatattattgtactaagtagggttgggttgtataataaagaatatttgaatggtttataacttatccagactgtaataattaggttagcctattaaagcacctctaacccagcaaaccaagttcatgtgcacccatatcctcaattatataactagacagtataactattgttcgcgcagataatttttttttttaatatttataataaactaggtatagtcgctcttcgtgcgactaatttaattttttattattataataaataattacaaaatataattctaatatatagtaaaattataaatatattattttatttcatattattattaataatttatttattaaaagataattgcacaattttgttaattattatttagaattatttactgagaaatttaaaatttattatatgtagtattttaaattgctttgttaaaagaaattatttttatataaaaaaataaggtggcgtaaaaaaaattacggtgtgtcccataatgcattattttcatatctcgatcattcaaaactattgttgttattgtatctcacttatttctatcaccgtatctcacccattgtcatcacttatcgcatcccttgtcattaacgtaattcacttgtagtggtcactattgt

SEQ ID NO: 14131 - DNA, 7346 bp, Cannabis sativa
tttttaaaaatttttaccaaacaatccctattagtttttaaaaactgttttctatttttaaaaattgaaaacaatttttaagttatgaagccaaacagtccctaagtccttctttttggattcctggttgccactcggcttggttatatgaaggttgagttggaattttattgtctatgtaattcttattaatgcacttaataatagggtattgttattaggcaccattagtacttaatattttctcgatatattgcgttacgattgactagcgatactttctaaaaactattatattaaattatatgaaatctgatactagttagactaataacaatactgacgggtgctcacttagcatttttctaagattgatcagtcctaattatgttgttgtagtgttagagatattcttgcttatttcttttcaatactgccataagactgttggtagtgttgcacattttttagcaaaattaactctcacctcgactgatttgatttggcctggtcaccctgatgtatcactgatattctaccagcagactctttgtttgacacttttttttttctttgagatttttctgtttactcttaaattttttaatgagacaattttttctaaaaacaaaagaaaaaaaaaacctattaagtaattaattaagtataattaaaaatataaagtcggacccatagaaagagggaaaaagaaaattgtggcgactcgtcggagcggggaccatcgtaggctttgggttttggcgatagagaaacgaagccaatccagagcctcacaactatggtggtttgatcccattcccaattcccaatttccacccataatatctcacccaccttccacccttgcacggcactaccctcctccatctctaaccctatctcggaccgattcgattcaaatcgacgacgaagacgaaaaccgagaattgagttaattgctctctacttctcgtccaaatccttctggccatgcgacgctggttggctgcttggatcttcctctccaaagagggtttctttgagttcttcgcccaaaactcggactgttctttgcgtattcgttcacaattcgaccatggctgcagacgctcatactcttactcctaagagtgttctgtgcaatgccggggctggtgccgctgctggtacgttgttttgttttcgggaatttattgtttgaatggcgagaaaaccgaggattggaagaaaattagcaactttgtttagtattgatttaccctgtatttagtgctatatcgaacttattaattcaatttaattgtttgatatttgacgaagttaattttgaattttgtgttgtatgactgtcgattaaaagcatacaattgattggatttggcaattgggtgcaggggttattgccgcaacgtttgtgtgccccttagatgttatcaagactaggcttcaagttcatgggttgcagaccatcggtaacggaaatggaaatattaaaggtatgcccttttgctttttcactttgtattttttagttggtaaactgtcatgaagctgcgagtttattttttttcttttcaaatatcgaaagattgttgtcgttgaagatcttataaaggacctaatcttgattcaagctattgatctttgtggaattacaatttgaagttagagttagtaatcgaattaagtcgtggcatatctctactgtagctcctacctcttgagtatttatctactttttcttttaaattcgtgatgggaaaataatttaatcaattataatgttttcctattacatataagttttcattcaattattagaaggaaactttactatttattactaaaaaaatgttcttttcttacaaaataaaaagaaaatcgttataatttgaaatatatatatatatttatattagagatacatagtcctgcaacagaggaatcaatgtgtgtaatttttgggtgcatattttaggtacaaatttcattacacttaacatattgtccactccattcattattgtttttttttttttatatgaataggtggtcttatagttggaagtttggagcaaatttttcaaaaggaggggttacgtggcatgtatcgtggtctttctccaactgtgctggcattacttcctaactgggctgtgagttttgttacttctttgctgtagcatagtttaccatgattgtttgttatcaaagtggtggtggtttctgaattcatacgcttgtaaaagaactaaggtagcgtttggttagaaggaataaaacataagaatgagaataagaataggaatagaatagaatcaaatttaaaatatataaaaatgttgataaaaattttgttaaattttttcttttcttgtattggaatgacttttttttccatttcaaaatggaatggtcattccattggaaggacatttcaatactttaaaatgcaatcaaacaaaagaatgaaatgaaatttgattccatttcattccattccatgctgtagcatagtataccataaaggtttataactttgagaaagatcgtacttttagaagttggcactgcttcatgaatgctaatgacaaatgctgttctttttcactcccatgtttcaggtatattttacaatatacgagcagtttaaaagcgtactctgctctcagggtgagttcctaagtattactgtcaatgatggagaagtctatatattagtcccgctaatacctgttttctgaaatagttgagttccagttttatttacctcttcatatcttttcttgtgtgtaatatttgtctggaccatgctgtatagacggtcatcatcaactttctgttggtgctaatgtattagctgcttctggcgctggagctgcaacaactatttttacaaatcctctctgggttgtgaagacaagacttcaggtgtgtatttgaacttttgcatttttttttgggcggatctgtgtgtgcatgtattatgaccccagtataaatgatctttaatagcaagaactatatgcttatgtaaggactacagattgaagtcactgtttaggagtttttttaatctaaaaccattatcttacattatttctattggatttatcctcttagaaactcatttagattcgattttgtttaacatggctgtcctttttaatgaaatcatattcatatatgatagaatatagataggttgtttagaagctttgagcattcattttctcttttcttctgtagactcaaggaatgagaccgggtgtggtaccataccggagcacattttctgctctgaggagaatagctcacgaggaaggcatccgtgggttgtacaggtttttatcctatctttggaccatattagtattctttgtttgttcatattgcaattttggtttcattgtggccttaattttttgtgatcaccagtggtttagttcctgctttggctggtattagtcatgttgccatccaatttccaacatatgaaagaataaaactctatttggctgaacgaggtaattgtcttgctgttgtgtagcttctatagaactcctcggaaaagtttctaatttgtgtgatgtggttttaacagagaacactaccatggacaaacttggtgcacgtgatgttgccatagcctcgtccatttccaaaatatttgcttccactttgacatacccacatgaggtacagcattaatacctggatcacaattactttgatttgttaaaatagtttgttctgaaaatacacactttgaagttaaagattacaaagttaaagtgttattctgctggcaaactttgatctcaattatttatttgtcatgttcaggtagtgcgctcaaggcttcaagaacaaggtcatcactctgagaagcgatattctggtgtaatcgattgcgtgaaaaaagtatttcatcaagatggcatccctggattttacagaggatgcgcaaccaatcttgtgagaactactccagctgctgtaattacattcactagctttgaaatgattcatcgattccttgtcacattattccctccagaacctcacacattgtgagaatggaagaagaacatgctgacatgatgagatactagcttgtaaagcaactaggaactgcattcgagtcagttgggccagccaagaatcgcccagttgattcttgttacatggtagcttttacaaaaaaattaggttatgttagacttatatattggatagcctcacctcaagaatgtttcagaggaaaaatcatgaccgtatactactagatagcgatgatgacgatcaagagggttaagaattaagatacaatgaattataggggaaagacaattttcaggattgtttgaacaatttatatttgtgaattgtggcaatctctgtaaacattctttattacgccttcatatttttaacatggtccagtcccacaattgtgttaattgaatgttgtcacctttttattgtattattgcagtcttttgtttcattcccatcgtccttttcattccctgctgattatacttgtggtgtccctaacatggattcggcccatgttggcccatataagactttgttgcctgtacaaacgtggttcaggctccatctaaaatacgataagcccctcttggcccacttttaactggcccatctgtaacatatcatacgaaagtgaagtgggcctttcctgatagtgtggatgatcacgatttttaagtttttgcctgttcagttgttataatgcaaatccatttaagggtaaactatgagtctaatcacttgaaaatcattatgtctatattaacattgagagcaaaattatgaaattgaaaaatcataattcccttaaataatagcatataccctacacttaggtttggtttaaagctttaagactataagcattggacttgcttatggatattaataaaagcactctctctctctctccaacctcaacccataatctaaatatgtttgtaaaggtggtagtgatgataaacaaatcgacaactcatatgttatgaaaaaaggtttctttgaactttatcttcacattggaagattagcttaactcaacaagccagccacaaaatcaaataaatagtattcactttttcggttggacaactagatatgatggtctctcttgtgtgtatcaaaaccattgctttagattctttatttagttgtgatccaaggttcattacatcgttcggacaaaagggattgaattgaattaagaaaaagaatatagtttaggtattagatatattctgattatattatggtaatcatatttaagtttctttttcatcttactttcttttgtttcaccacccaacaattgtgtcttatttaactcacattgttaactttctagaaatgaagtacatatgtgaaagtgaaagaaactatgggaatagcctttagacctcgtgaactttaatcaaaacatacaattttgtttttctttattttaacaaactagataaaaattgtatggttcttttttttatttatgaaaaaaattaaataataattcgttacaaagtcaatcttatagtacaacgcaataccctctcatatcgaacaccctataagaaaagattgcacaagagtcgtgaaaagaaaaatctatcttatttaattaaacttttttttttctctgtcttgttcaaaatctaaatatgttagattctaataaacattacaactcaataacaaaagagagagagagagagagaaaagaaaacgttgatcgattataattttctaaaattagtgtattgagtgtgtaataggctagtggggatagaaacatcaatacaaaaatgatgtatgtagtacatgaagaataattaggggaaatgggtgagagaaggaagggaataagatagcaaaagaaaggcccctctttttcactcccctcatcatggtctggtcggttcaaaagtgtaaaacctccaaaagatacacaggagtgcactaatttcatgattttattggaaaatgcttgtttgtccccaccaacaataaaattatcaaaacatacccaccttctttttttatttttttttatttttccccttctattcattacttgcttttttttattaccctttttctaaatttgaagttatttgtggattatcaaattaaactatctaaccaaagccatttgcaaacctatgtaccaactagctaataagtttggtatcttaacaaactaaacttatggtttcttggaagacaaggcttgaaggttgagctgagtactttattggaatttatttgtgttgtgtacagcctattaaagatttcatttttggtattttatttaggaatgtatttgtttaaaaacagattagcttttgtggtggactatatatgatgaacattttccagccaaaaaattataccaataatcattatggcaggctgctttatttaactttctcaattcaactacctgtccctaaatattcttctaactatgctaccatcttttgtaatttgaatgcctaaagttaccctttaattaaaaacacacatatataatatattatatataaataagtactctctaaaaatgggggatgggggtcatactgttcttattagttccactattcttgtaactggcattgtctttttcttagatgaaattgaagacatatatcacttaattctctagcattcttgactgcaagtttattcttcatagattaaattaataaaatacaaaaaagagcaagaaaagagaaaggcaaaaggtataaatgaatgaacaattgctttatatatatttatatatatgtggacagagctttctagtttatatacatcagtagtaatatgattgcttagacgacactgatcctaagaaataaataaaatacttttactcgattttgtcctttagtggtaaattgagaaaatacttttattgttcgttagatttttggtaacttttaaatattgtattaaaaaaattaattatgagttgagaagaatatttctacgtcattcaaatgttaattaatcgtagttcatgaataatttttattgatgagtaatatttttattatttgtgagtacactctcttacaatttagagttccctcttttctttctatttttcgaatccttctttctttttatattctctttgtatttataggctgagagttgggatattcttggacgatagatactagaggtgacaaaacgtgtcatcgtatcgtgtttgtgtcatattttatgtgacatgttttatattttgtgtcaagcgtgtcgacttgttttttgactcatgtctaatt

SEQ ID NO: 14132 - DNA, 3060 bp, Cannabis sativa
  modified_base (443)..(447): a, c, t, g, unknown or other
taagatccaatttattatttaataaaaaaaatcactcaataaattttataaaatacaacatctaaaatattattaaccttatgatatagctaataatttatatattttaaacaccaacttatttatattataattatacaaaataaagtagggctatatattggataaaaacaacctcaattctttcaaaatgccaaaattgactctattagcctagtagtacttctcccatccaaaattttggacactacgaaaggctctaaaggctctattattattatattttggggattttggggataattacataaagacacaattttttggaaaaaaaaataactttttacatttacagaatttttttttacatttttatagttttccataaaaataacaagaaaataacataaaagtaaccaaaaaataacatctaaataacatcnnnnnaacaacaaaaaataacatatagataacaaaaaatcaacaataaattaataaaagtacaacataaaaagaccgtgttttctgtaaataaaatcaaaaacatcgtaaaaatgtttaaaattccgtaaaaccgtatttttgttattttttgttgtttttgtacgtttgtgaaattattcagaaaaaatatgtacttttatatatttacagaagatgagtgctaagaaaagtcttttttatactcttttatattctctataatataatcacaagtgtcaattttagagattaatttatacggagttaataattaagcataatattattatcttgttagaattatgtcattctaataaaaatattctactaattttttcgcgataaaatctattttaaatcacatattttgtaaaattaactaattggactatttattttgttacatgatagattacactctgtatttttcaaaatagtactaaataggatcctaatttgaatttttatcaaaataaatcttagtaaataagtcgacctagaaggtgttatgacaaaactaatgactttttctgcaattattcgtactaaaaattgtcttcaagttggttattaaaaaaaatgtcgaaaattaagcttaagatcctatttgtattattttaaaaaatataaaatctattttatcatttaataaaaacgaaaaatactaaaaggcaccactgatacacttttcgatgtcatactgctattggtgaaattaaatatcgaattccatataacttaataaaataatttttaggaaatattataaccaatcgtaaggagacacttataaaagatgcttgataccaataatgccctataacaatgctgaataaaaatagaaatttcaatataatttttataaaattcaaattagtttaaattacttattttcttttaaagcttaataaatattaaaaagatttatatttgaagattgaacaagttacttaagtaacactctacacttcatttcatttcttcataaaagaaaaaaaaatgatcacaaagacgaaaagcctccaaacgggtatccaactccaaacaaaggtcaccaaaatccctcctttttcttctttgcatacccattttatctatcatcttccaagagcacttcaattccatgtatcatttttctgaaagaaataaaaagggtttttttttcctcatagcttttatataaactccatttgaagttggaataggtttgatttggtttcttggattgaaaaagacactgattcaggaatacccatttcttgtattaaagttttatatattttgctacattttttccctgaaaagatgtgatttttagggtatttacacaagtgttttttttgggtaaaatttttggtgatagaccaaatatcttctaactcctctaccagaattttgaagaagtactcaaaagatttttcctttttgaatcaagtgggtctctttttcatgtttgttgctcatcagatttgtaaagtttccttttttttttctttatattttgtacatatatatatgtgttagtattattttttaaaatttacagtttaggttactaaggtaattttaagtaggttgctatgtggatattacgtaggttgctatgtggattctagttgtgatttaggattttaggttgctcaaatttttgtaaaaatgtaaaaaaaaaaaaaattaaagtgtaaaaataaaaaaaaaaaatccttatataatatactagtaatagtccaagttcttactgtagatttgcctagttaaagttggtgctttgattaggaaatctttgctcagttttgatttcatttgttatgacttaatttgcttcaattggtctattgctatttttcatgtaatatagtaacaacatttcttgtataattaatatgatttattattcctttcactttttcaggaaaaagtttgtgaactatgtggtgataatggtggtaattttaaacatttacttgtaacttgctctgtgtgcaacacaacttgtgaacatgtgtaagattctctctttctctatctcagcatggaagtgactttgtttactttaacttcgattattgtaagaattgtaaaatgcacgagacgaggttcatcttaaaattaattggcaatagagagaaatagttcatccatcttatatatggcattatacttcgatcacaagcagttctgtttgagctaacttttcggatttttggtggcgttttttggcgtaccttttctctgagctactttttgtatatggatcggatgccttttagaagtttttttttttttttttttgctctgatactatgttagaattgtaaggtgcatagagttctatctcaaaaccaattaactaagagaggagtaagtagcttatggactttatatatgatattatttttctacgaactagcaatgtgggactctctaataattattgaattatgtttatgatttgatatatgaagttaatagaaattatttatgtgtgagatggattagatagatgtctatggctgttattgctgtcctctttgtttttgacttgttcaagtatcactaacttatggcttttatatc

SEQ ID NO: 14133 - DNA, 5734 bp, Cannabis sativa
ggataagctcaagaacttgcaaagatgatctcgagtgaggagatgaacattgcaagcctgcgccactatgcttcacttcctgatcatccaattgcaagttatataagtgtttggatgaaatttacctcacttttcagcaagaaacaaggatgtctcattggtactagatcggagtttcaaaaactttttgaagtaccagttcatatcttgtttaatagaaaggctccacacactatgatcttttaggaaaatagaatttttccacttcacctaaaggctatcttgctttctggcaatggcccaaaggaaattggtcatcaaagctttattccactttttaccctcacgaaacccaactcccccatactttttgagggagacataccttctcccaagaagcaaagtgcatctttgtccggttccctgtggttccccataaaaattctctacaactcctatttatggcagcagtaactttacttggaagagtaaagatactcatccgataattccctactccgaggaggaccgagtgaatcaactgaccggttcctatgttcatttttatctgcataacatatcaaatgacatgatcaccattctccatgtaaacagagaattaactttatcaaatggctccaaaacattaccattctatactaagcattcccattatgtagaacattatcttggtccaacgaaagaagccattgactcctataaataaaatatgcctcatcattattttgactgttttatcattttatgttcataattgtctgtatatacagacaattatagtttgttggtaaaattgctgagtaaagaatggcaacgttttatttatacaaacaactatgaaattaagcaattgtatgtaaatgtaatacgtcattgaaaataaggcatattacacttacatacctaaatcactcatcctttaaactacaatgaagataatccagagaaagtaactcattggttgttttgcactaccaatagtccctacaagaacatttccctttactgaaacgatgtaggcgtttcgagtcattaaggtatatctcacacctataagccatggagatatactttgctgtctcatggcaaccttcacacattctcagctttttaactattcttatacattggcccttctttggaaactcaacaagggcaaaagcaattgcaagcttttcactatgtacaccaccaatctcttcactatcttcttcctcgaagcaaagcccatcacaaaaatcagatttgctcaaacttttcggtataccatgtaaccaaggatatagatgaggtttagatttatcaccagcaacaaatgtgtagactctgttgttaagttcaatccaactctgtcccatgttccttatagtagaactctctttctctagctttctcattttggaatcaatctctgattttttcccgattaaagcatcaacctgccctcttaacctctgaatcaagtgattcccaggttccaactcaagcaaatgattcaaggcgtgtacaaagatcctaaagttccgatgaatcctactagcagtaagcaaagcctcccaaattgaggaatctggttctactggcatgtcttcaatgaaatccattgcctctctaatcttacctgatcggccatataagtctaccatagcagaataatgctctagacttggatcaataccatattcttcagtcatactagagaaagctagctctcccttgactgctaatccagaaaggctgtatgcatcgacaacacttacaagagtattgctatccggtttcattcctgatttcttcatgtgatcaaattgataaagtgcaattgttgacaaaccatgcaaaacataaccagtaatgattgaattccaagtgataatatctttagatgacattatatcaaagatattcttagaatatttcataattccagtcttggcataagtgtccaataataaatttgccactgaatttccagactgtaagcttcggcgcagtacgcagccatgtatctctctcacttttcttgcagcaagtacacttgtacatgcagacagaatactaagcatggtatccacattgggaataacaccggaggactgcatttgtcgaaatacttcaagcgccctgccttgatccccacggtgcacgtagccatcaatgagagagttccatgttgcggtgtttcgcttgaatttgttatctttctctattctttgaaagagatccatagcttggtcttcatcaccattttgtatatggactgagatcatgatattccatgtgacaacattaggcagtacatccgattcctgcattttcatgaagagttcacaagccttatcacagtaaccggcttgactataactaccaatcattgagttccatgagtaaagatttttgtctttaatcgtatcaaagacttcttgagctgcttccagttgcccacacttggaatacatgttgacaactgaatttccgactagaacattatctataagacccatcttaattgcaaaagcatggatttcaatccctttattgagtgatcttagagaagcacaaactgaagctgcaattgtaacagtaactgcattcgggttgactcctgccaaaagcatctccctgaaaaaatctaatgcctgatctctgctgttattatgagcaagccctgagatcatagaagtccaagtaaatacatctggagcaatgccaaaactttccatctctttcatcaatcccattgcaacatcaatttctcctaaattactacaactagcaatcaatatgttccaagttaacaaaccaggttcagtcccttcttctctcattttatcaagaagtttagtagcttctttgacctgaccagtatagcaaagcccagatataactgcattccaagtgacaacatcccttttgtccatgttctcgaaaagcctcttagccagatcaagtttaccacattttacgtagacatcaaaaattgaattgttgactcgaatagaaccgctgaagccacatcgaatcaccatcgaatgtaccactttggtcatctcaaaattcttgcaattcccacaagcttccaatatcttaggccaaaggacttggttgggaacaataccatcatctttcatcatcaacaaaaaaagctctaaaacttcctcccacctctttgctctataaaacccaccaatcatagctgaccaagtaaacaggtttctctcacgcatttcatcaaacactctgcgtgcatcatccaagtagcataatttcgcatacatactcaccaatttagtctcaacaaaagcatcaacacactcaagaagacctatccgagcatgaacctccctacccaacttaacggacttcgtatcaatgcaagactgaagtaaattgacataggttctgggtttcaccttgcacccacgtacagcaatggaatccagggccaagatggcctcgctgaggcgtccctttttgcagagcttatccaaatgagagtcggggaataaaggaatggtgctgagcttggtgggttttggagaaaattcaaaagggtagcctggtttggtgggaactataggtatgggaggttttattacctccattgttggaggttagccagaaccagaagaagctgtattttggagttcgtggcgggaaggaaactacacagcaagattggattttggaaaggaatcaacgcggccaatgtcatcattatttattgaataatttgcggcaaaaccccttaagtatcaatttacttaaaaaaaaccatccaacctcatattttgatagaaaaaccctccaaactactgtttcgtttacatgtttaaggtatcgtctgttcagcctcgtaaaatcctaattttacccacgtggcatggcaatcacaagtcattaaaaaattatcctacgtggccatattttacaaaataaaaataaaaaatttaagagtaatttgcgacaaaactcccccaactaccaatttacttgcaaaaaactatccaactttaaagttttttgaatgattttttgcaagtaaattgatagttgaaagaattttgccgcaaattactcttaaagtttttattttaattttgtaaaatatggccacacaggataatttttagtaacatgtcattgccacgtgggcaaaattaaaacttaacgaaactggacagacgacaccttaaaaatgtaaacgaaacagtactttagaagattttcccaccaaaatataaagttggatagttttttgcaagtaaattgatagttgaggggcttttgcagaaaattactcattaatttataagaaaaatctcatatttttaccaacgttcaaaattaagaaataatacttaacatcactaataattcttgggacacggtcttaattgtaacaaagttgaagaaggaaaataacaatattcttctgaaacttttaaaacagtaattttgtgaagttagtaaaacaaatccacaggttaatagtaagtttatgtaattgataagttacaattactagcactgctactttacataaccgtaccttaggaaaaaaaatatatatttatatatataaatagattgcatttattcaaaaatccttttttttttatatggagtggtgactggtgagtgataatattcgttgtagcttagaatagaagaacatttgggtgatgaactgcctaaggaaggaccatattgctgctgctccataattggaaatggtgattagtctgaaaagaattcttgttaatgaaattgaaactcccaagcccaacttatatgagatcttctcttgaggacacaatagaagacttgttacactttaaatggtgattggtgtaccttgactactgcaactgcaaggcttcttttcctgatttttgctttgaactaaaaaatcagaaaactcaccccctttttccacatgaatttgtgtatacagctgaaggcaaattctccaatcccacatgcttggtgtcatggtgaaatttgacatatgtataagaatactgcttcgggacagaaaacccaccaactaaataaatcttggcatggaacaagataaggcctttctgtgttgtctgacttgtctcaaaggaaattcctctcaaatgatgtcgaagaaaacctggaagttaaaccttcacctatgtttcctgggtctaactttacatcttgtcgcccagctaccaagtccttctcacgatcccaaggcttccatggatgttgccccacccactcatccttctcccgttgttgctttgaggatggttgttgctttgtagatttattcttcgttcgaccaaatgctttttcttggtgcttttgcaccaacgattttgatcgtttttctttgttgtatttatccaccaaatctgcttctgcactcttctccacttcgtttgatgccagtgctgcagccttgttatatgcttctaggaaactgccatgggacacaaaatgtggagcaaaatcatgtgttaattcaaaggcaactagcaatgatttactgcaaaaacaatctaattttaaatagtattactactcacttcgtctttgccttttgggctctgtccgtaggggtatctgtccacgcacttgtatcaccacgtccttcctttgcatttctgctaaagctggttgactgcattggcatccccccaggctggaaaaaaacagcatttcattatgaccttgg

SEQ ID NO: 14134 - DNA, 12364 bp, Cannabis sativa
  modified_base (12312)..(12313): a, c, t, g, unknown or other
taccataaattactcacttttatacatttaggtggcgtctggttgagaggaatgaaaatataagaataagaatgaaaatagaaatagaatggaataaaatttaaaatacgtaaaaaaaaattgataaaaaaatcattaaattttttttcttgttacattgaatggtcttcttcatttttaaaatggaatagttattccactaaaatggtggaaagagcattctattggaatatcattctaatattttaagatgcaatcaaacaaaggaatggaatgaaaattatttcctttctattctattttatttcattatctccgaccaaacgctaccttagttctctttatcttttcttttgcaaattaaatcctctagtaaaatattattgttaaattccttaagttgattttttttgcaaattgaatcatctaataaaatattactgttaaatattaatttcaattagtatttaacaataatatttaattaacacaaaatgaatataaattgtttgacaataaaataattttgtaaaaaattaaaacattaaaaaaaactcaataaataaatgaaaatagaatgagaatgaggtctcccattccttttcatcccgcctaaaaattggcgccaaagatgccctccgcacatcccaatactatcaccattcagtattcacttctctctctcacaccccaaattttaatataattatttttttgaaattatacataaatattaattaaattaaatctattaataaaaatatgtatttaaaacagtttttttattaataataattaaaatgatatacacgtaagaaagaagtgggaaacggaaatgggagcatccgttaagttaaccgcctctagttccgtacatgtagcgaagtgatgacacgtggcaaacgataataggttagaaatagtgggacacataataaggtttatccacctgtctctcttctcccatcccaaacccaaaccagaaaagagagagaaagaaagagttgaatctctcgttcaccattttccttttcatttccccaaactcaaaccctaaaccacatccaatccaatcaaatccaatccagatctgtatttcatatccccaatcatctcatcaggtacctttttgcttcttgtaattcaattatgtatgtatatatatatgtatttactggtatgcatgcgtgttctttctttagctgattaatggtggcaaggattcgatcttcaacgaattttgggattctttattattattattgttaggatatatatatatgtatattccttatgaaaaatggaggaagtagatgtagaggaagtggaaactgaacaagattcatcaccaccaccacctccgcctccgccgccaccactgcctcctcctctacctccatcttgtttgcttgcgattacagatgggaacgcccacgaggaccacgtctctaaattggaactgaagcgtcaccgagaatgtcttcttgaagaacaagatcccgaatcggatcaatttccatacaagaaacaagccaaagaggtttccaatgacgatatacgttccgaggtcactaatccaatcatcgcttccaatcattctacgtttcatgatataactagccaaccagctctgttgccagctgataataatgataatgatgctgctcttgctgttgagtgcggcgaaatcacttccacctgttcggggaattccatttctgaggagacattgagcgaagagccttgcgccagcggtggtagccgtagtggcagtggcggcgaaacttgtgggaatgaaaatgatgttgttactacatctcgtattgtattggagattcctgagcatgctgctttgtctggaattcgaaaaatcacatttactctgaataaaaggaaggactcttgtttattgactccacaacaccaccaacgaaccagtggcttagatacagtatcatcttcgtatgagatgcctgaatgttctgaacgcagaggctatgctgacactagcaatgctcagttatgcgctcctaatttggaattgaaaatgtctaagaaggtactgccaagcagctaccctacaaatgtgaaaaaactattatcaactggtattcttgatggtgcgagggtcaagtatatatcgagctcctctgaggttagacttcaatttttcttcttttattgtttcttttttgctgtaaggattattcttatgtgatgcttttgcttactggttggcagaaacagctagaggggactataagtggtggtgggtatttgtgtggttgctcgttctgccgcttcacaagtgtatgtctcttagatagctatgttaattgtttagtgtcttctgaatgtctgcatatgactcaatgatcgttattaacaggttctcagtgcgtacgagtttgagcagcatgctggtgtcaagactcgacatcctaataatcacatctatttggataatgggagacctatttatagcatcatacaagaattgaagactgcaccggttggcctgcttggtgaagtcatcaaagacttggctggttcatctgtcaatgaggagtatttcaacatctggaaaggtacttctatctttttagtaattatgaatattttataatatgatatagcttgttagatatagctggatatttcttttatgttatttattttgtgttgtcatatcataattgctcatatctccaagtggctgtttctatattgttatttgtttagtttagttgagaagagaaaatagatatgaagaaagggtgggtgaaataagtgaagtttttgatcttatttcttatccctatttttaaacttttgtttgacatcccgcagcaactctgcaacaaaatgatggaaatgctaaagtgtctaaaaggcatcaaatgaatattcccagattgccacattcacttgtagggtaaagagatacagtcacttgatattttttttaattgcatatttggtttactattttaaattctatattctttttttttgttctgcttctgtttcttatttaaaaaccaagaatgataatttggacgagagacaatgtttgaggtgcctctgctctaatattgtatattattctctcttattatgttaatattaatataaatcgcttattatgtcaatgaaccacatttcaactgcatgatacagttgtcttttaggtcttctgtgggaaagtaggataaaaaatctcttttgttttttcttccttaaaaattgcaggtcctctgttccagcattagatgaaagtgttagccctgcctcattttcctttccacatggcaactctaaatggcctatttatggaggaacagtagaacaccagaaacgcataatgaataagtttgttctttccctctccctttattttttattttttactttttgaaatttagcagtagcaaccttatgtacactataaaaatgtatttactgtaaggaactgaaattgtacatcttctgcagatcaaactcttatgttcctaagtcagcaatgcaacataagaaaactactgaaggaggcactaggagaaggtaacactcctgaacttgccgtccgccttgtcttttgtataccaaatttctttcctttatggatgaatttagttctggaactttttcactaattggagattgcatttgcagggataacgatcttcaccgcttactctttatgccaaatggacttcctgatggtgccgagttggcatactatgtgaagggacaggtgtgtatgtgtatactttttataaataaaacaatttttagttttttgcttaagtataacgaaacagttagttggtatacatattatttattttatccttggctggtacttgaaaaatatagagttcctacaacagacccatctgcacattgagttagacttaaatggccggggacatgtatatacttcaattgcattcgtttaaaacgttatttctgggggtttggggcaaaaaaaaaagttgatttatgggatttatgaacaggttactaattaatgtataattggcctgaattatcatgttccagaggatgcttggtggctacaagcagggaaatggtatattctgcaattgctgcaatagagaggtgaaattcttgattcagacagaagttatttagtatgatatctgaattttgatccttctgaattcgttgctgacatcattcgcaccatatttaacaggttagcccttcccaatttgaagctcatgccggaatggctgctaggcgtcaaccgtgagtacccttcattatgtatttatgtttgtaataagcagtttaatgtgttatgttgagttgtttggtccttttgcagttaccgtcacatttatacgtccaacggattgacactgcatgatatagcaatttcattggctagtgggcaaagccttacaactggtgatagcgatgacatgtgtgcggtttgtggagatggcggtgatctaatactttgtcacggatgccctcgggctttccatgaaggtatttgcgttttcaatagatttattgattttatgccacttgggggctagctcaagtagttggggtgtgtgtatgggagggggagcggttcaaatcccattatgtccaaataaagatatgaataaatagatttcatgatctttctggttcatttttagatctataaatgcttaatagatagtcagttgtattagagttcttacattgtgctggaccactggtgatgccctgtaatcatattagtattcatacaagtgattatattgtttccattatgatgtccttttgcaaaagtggttgtagctgtgacattttgaatgtcaatgcatatgaatatatgctgttgtgctgtttcattaattttttagctttatacatttttcagcttgtttggactcaacactggttccacaaggtgattggtattgtctaagttgtaaagacaagtgtgatcctggtagaaagacggctgctggagaaccgtccagcatttcaagacccattgtaattaggttgacacgagttgttaaggctcctgaaattcaaattggtggctgtgttgtttgcaggttagttgctatactgttgtttgtttaaccttgaattctgtaatgattttaggtggaataaggacaagttctttatattcaaaaaaacagaggatctgaatttgcttgtatattgtgaatgtttctccccatttatgctgtgctgtgtgactgtgttattcttatactgcttgctcttgttaagtaattaatggttttcttttgacttgttagggcccacgatttcagttcagctaaatttgatgagcgaacagttatgttgtgcgaccaagtatggattgcgtttgtctcctttattgtatttcttacaaattcttgtcatttttgtttgcaagatggtaatgttcgcttatgtttcagtgcgagaaggaatttcacgttggctgcttgcgtagcagtggactttgcgatttaaaagtaagtagaagatgttagaaaatttagactttgtgttgcttgcttatgcaaatttatacaaaaaatttgagtacttttttactatgtttttttgtgtatcttactgcaggaactcccaaaggacaagtggttttgttgtgatgactgcagtaggattcatatagctctacaaaatttggtatcactcggaccgaagactgttccagcttcattatcacatgtgatatttaagaagcatgcagataaaggattgtttattgatggagcagaggatgatattcaatggcgaattctaagtggaaaaagccgatatccagaacatctgccatttctctcaaggtctgctgctattttccgggtaagtatttattgtaccaggtgttatactcatttccatacttatcgtgcagtaggcttatatattttatgttgcatttgttagttacttctgcttgcaaactctttacttttttgcttgaatggttttttttatttactttgatcatttaagtgaagctttttccttttaaatgtgtagtgggatacctttttctcttaatattagactgaagtatatttcatgtgacaaaatggagtctacaatattacagctcataaacagtacttaagaaatttgttcatgtcgcttttttgaagcactttacatttattgattgcaaatagtttatttaaaaataagatgctgtgtattattgaactcagcagcaatcttttttgttttgttttcctttctacatgtttgttggagttataaatcttagtatcattttagatagttatttttgttttgtttagattcccttttttacatatttatgacattacatatatgtgtgatgagtttctgtaatttccataggttcatactactcacatctgattatctgatttgtaatgcacaggagtgttttgatcctattgtagcaagatctggtcgtgatttgattcctgttatggtgtatgggtaagtaaagttacgtgttttgtttggagtttatgcaataatatatctgcaagtaaataatcttaatttgtgatttatcttgctttgtaaatttgcagaagaaacatttctggtcaagagtttggaggaatgtactgtgtggttttaaccgtgaggtattcccttttgttattgttgttatgatattgggcaataatatgttatgtttaatgccgtttctttaattggttactgattttgagtaaaataataccatccatccacacaggtctgttgttgtatcagctggtcttcttaggatttttggtcgcgaggtagctgagcttcccattgtggcgacaagtagagaacaccaagggaaagtaagaacaactgaacctttgattctttcctgttattattttagttttggattcgtaagtagtaattgaattgaactctggttatttaacgaacactacaggggtatttccaagtattattttcgtgtatagagaagttgttgaattccctgaatgtcaaaaacattgtgcttcctgcggctgaggaagccaagtcaatatggacaaacaagtttggattcactaagatgactgatgatcgagtaagtgctgcttttgttacttttttttttaactattgaagttgatgataacaaataaaagagtaatgtggtttgggtgtaaatatattttcaggtgtcaaagtatatgagagaggtgcaatttactattttcaaggggacatccatgttggaaaaggcattgcaccagcaccagcaccagaatagcttatagctttatagcttagcttattattattattgttattttatttttttaaagttattctattttgttttgtgaaactatttcatttcctgtaatatgggtttctttctttagaggatagagtgagtgagtgcatctgagttgggttggtgggaaagagaggaagagagatgtattgtataaaaaaaaatgaagaggagatgagagcagtgcatgctgactttttataatgcatgcattacccgtactgttttttttaacgtaggtttctttaataatgtatgataataacacattgttgttttaggttaaaaaaaaaagaaaagaaaaaaaaaaaacatgaatacaacgtttttgagtgctgtgactgagttaaaaagtaaagtaagaaagcaacattatagtgctaattgtattgtatttaatgtatttaaaagaggacgataatggtctcattttaatttgtaaagctgttatttttagacttgagcttcttcttgtaattgagaccatgcaagagaattaaaaattgcaatgtgataagttcaatctcattctcttgtggtaaaacacagtcaaaatagtatgtatgtaccttctattaacgttaaaattcaatatgaataacgttagtatatttttttttaaaaaaacatagtaatttttaatttttataggtttgtaacatttaatatggaaaatttgaccttataaattatatgcataatgcaagtgaaaattaataattaaaatttaagctacttaatattaggggaataggttaatttttatgtatatctcaaaaaaaaaaaaaaaaatatttattatctcaaaattttttaacatctctctgttttcttgttgctcgttctctatcttctcctcttatcttttcctctcattagttttcactaaaatacccactgaaaaatccactaaaggatccaagatcgcgatcactgcgaccattgccaccatccgatcgagaccacaccaattcgattgattgagagggtttcatttcaattcgacttagacttcgccaatccttccctcaattgcgaacgaagaggtcaccgccactaatggggactgcaaacgcagatcacgaacgaagagaacacgaacgaatacgttctttgtaattttttggttttttctgtctttacgtgccagttcgatatattttcgataagaggttctaaaatttaaatttttgaggttaatggtgaaggtccgatagtagctcgatgcatagtagctgattggtggatatatttcgtgtttgatgggggtctgatactgtctgaatggtgtccgatgggatccaaacgtattggactccatcagacctccattggacaggaaatacgttcactgatcatttacgatgtatcagaccaccatcgaacctatattggaccactatcggaccttctccatcaacctcaaaaacttaaattttagaacctcttatcaaacctatatcggacactatcgaaccgactcaaaaaaataaataaaaaaactaaaaaattacagagaacgtcttcattcgtgctctctctgtttgtggtctccattcgtggcggtggtttctctgttcacggttgaggatggatattgaggtgggctcgaaaggattgaaatggagttgagagggttggtttaattggtttttaagttgattgagtgttcttggatggtggaggtggtgttggatggtggcagtagtcttgaatggcgacgatagtcttggatagtggcactggttacggcgattcgatctgttaaagagagtgagcaagaatggagagagagagaaatgagtgatataatctaataatattgatacactaatgattaaggtataaattttagccatataaagttaaatttatctttaacctttaaaaaatagttatataaaactgaaaatataggttttgctatttcttccttaaaatgggcttatctataataaaatgtagaaaaggcagctgttactactgtcttcttcccttccctggccatttcgttgttgatacagatattctcaagtgaagagtgaactgaagacacagttctcttgttggccttgcttatgattttctcatctgagctgagctgagcgtagctgaggtgaaggttcatccatcatccatggcttctttctctggtctctctctcaagtgctgtccttggtctcttcctcactctctcaatctcaaccaccgctcctccttcaacttcactcccaattctctctctcagtctcaacaacatcaacccctccctcctgatttcacctccaagcagcttctcgacacccttcgtcgccagaatgacgagtcctccgcccttcgaattttcgactgggcctccaagcagcctaatttctcacccactacctccatctaccacgagcttcttcgcaagcttgcaaaggttggttctttcgactccatgaccaatctccttctcgatatgaagaacaaccaccgcacctcttgcccactcgataaagccaccttcttgattttcatcgagagctatgcccacttcgagttttacgatgaaatcttgggtcttatctcgctcatggaggatgagtttggggtcaaaccagatacccatttttataattctctgttgaatcttcttgtggaggcaaacaagctcaaacttgttgaaactgctcattctggtatggttagtagaaagattaagccagatgtttccacttttaatgtcttgattaaggctctctgtaaggctcatcagattaggcctgccattctgatgatggaggagatgcccagttatggtctttctcctgatgagatcacattcactaccattatgcagggttacattgaagaaggtgatatgagagctgctttaagaatcaaggaccaaatgcttgagtctggctgttcttgtactaatgtcactgtcaatgtcttgatcaatggtttttgcaaagagggtaggattgatgaagctctgagtttcattcaggagatggccaagaggagaggcttccaacctgatcactttactttcaatactttggtgaatggtttatgcaggtctggccatgttaagcaagccctggagatcatggatgtgatgcttcaggagggttttgatcctgatgtttatacatacaattccttgatatctgggctatgcaaattgggtgaggttgatgaggctgtggaagttctcaatcaaatggtttcaagggattgtttccccaacactgtcacttataacactttgattagtgccttgtgtaaggagaacaaggtcaaagaggcaactgagcttgcttttgctcttactaccaaagggattttacctgatgcttgcaccttcaactctcttattcaaggcctctgcttgaccgggaaacacgacctggcaatggaactgtttgaggagatgaaggagaaaggttgccagcctgatgagtttacttacaatatgttgattgacagccattgttctaaagggaaaattaaggaagctttgaacttgcttaaggaaatggaatcaagtgattgtgctagaaatgttgttatatacaatactttgattgatgggctttgcaaaaacaaaaggatagtagaagctgaggagatatttgatgacatggaaattcaagggatttcaagagatgcagtgacatacaacactctcattgatgggctttgtcagaacaggagagtggaagatgcatctcagttaatggatcagatgataatggaaggtttagtccctgacaagttcacttacaattcacttctcacatatttttgcaggaatggagatatcaaaaaagctgcagacattgttcaaaacatgacttcaaatggctgtgaaccagacattgtcacttatgggacacttattgggggtttgtgtaaagctggtagagttgaggtaggaagtagactccttagaactattcagatgaagggtatggttctaactccacaggcttacaaccctgtaatacaagcattgtttagaaggaagagagtgaaagaagccatgagattcttcagggaaatgatggaaaaaggcgatcccccggatgctatatcgtacaagattgtgtttcggggtctttgtaatggcggaggaccaattggtgaagctgttgattttgtgattgagatgacagatagaggattcatacctgagttgtcatcgtttgttttgcttgctgatggactttgtgctttgtctatggaagataccttagttaagcttgtggatatagtgatggagaaagcaaagctgtctgagattgaagttggtatgattagagggttccttaacatacgtaaatttcatgatgcattggccactcttggttgtatcttggatagcaggaagcctaacaatagcaaaggttatcggtatagattaaggtgaactcaactcaagtgtgcttgtgcttgtgttctgttatgtattattattattattatccaattccaatgtggatgttgtattttctaggacattaaattaaattgtcaaagtttatagttgaaatccaaaaaaggggagaggtacaatctcatgtcccatagtttatttatttattttttaattttcaatcttgaatgaacttacttaactattacattgagaattgagtaggaaaaaaagaggaatgaaagaaaactacctgttatattattattagtgcaattataagttttacataatttaatttagataattgttattaataccgttatgaggtgacgttttataatcgactagctgttttttttataatttttataaaagtaaaataagtggaactcaatattgaattaaactaataacgatataacacttcacaagtgtgctaggtaccatgagtattttttagtatttctgaaagactcattatgatttttatcccttaaattttaacatgtaccaaatcatgccctctgaacttttctaaccgataaaaatttttcctgaattattgagattgttnnatttaaggacttttgtttaatttcatttaattttactatttcagtgattgt

SEQ ID NO: 14135 - DNA, 6826 bp, Cannabis sativa
cactcactcaccttgttggatttggatttggatatgtcttttgcatttgccaactcattcttcaactttggttttaggtcacttcttgtttcctttattatattatgatatcatctcctacccttattatctttctttctccatccaactttttccaacctatctaacaataacaatcaagttcttaacttttcgttaagatttaaaaaaaggatatcattaattctactcatctccaaatttctctttgatatttttgagaaaaggaatgaccaatcaatcaattatgtgttttactattgttactaacaaaacattcgactgtatatgttattctctatgtggggttggctgtcctaacactttccattcttccacattacaaaaccaaacgaataataataataataataataataaaagtagtgtcagcatgattgatctttgatattattctttttttcacttgttttaaaaaccattgcacttggtctagcttctacctaatattatgcaactattgaggaacaacagataagtaataatgtatgtaagaagaagaagcagtgtactctatgcactttcattgttgtaatgtagtgaaagagtactggaactgacacaagtaagtagaaaccaataagagaaggcaaagttaatgtcaacttttttatacacctatacatacatatgtagtaagatatatccttatgggatgacgtggatagatcttttatggaataatttttactcattcctttcatagatgtactgtgagtaagagagagagagagagagaacgtataatatttcatgaaatgtttctttgtaacataaaatgacaaaggggctggatattttctttcatagggggcctctatgcctcatcataacctgctcctttagctaaaaatacccgtaatccattttttctttctaatacattcttgtcataccatactgaacagtctgaacagttgcaactttccgatggggagctccagttgcggtggtggtagtagtggtggtggcggcagcagcactaataccaccatacgaagtttttccctgtaacaagttggaatcaatagcgactctatcgttatgttgttgcaccttattgacccctgcccgtgtcataaaaaatgggttggtgtcgatgttgatggcaatctctggtgctaatttggctgccatgccacattgaacggattgttttacctgtgatgacatgtccctggaggcttcagttgcagacctctcttgatggcctattacaggttttcgatagtaggcagtcggagggacagcctgaggaggaaggaccgagcttctattcagtgctctaggatcataagaatctttcataatgtttacattatcatatgctccaactggcccaacaactcttcctggtttggctgaacgcagaaccaacaatcagtaaagcatatacatgaaaacaagaaaatagggtacttgaaaatgtgactacacagactggaatatgtacccaatggaattctttgaggtccctgcatgttccttgctacattcacatgaactgtatctgtatcttttaaattcttgtatgcctcttctgtattttgacgatctctcgacgatgtatagttgtgttggtccttggcagggacagtgtttgagtgtacaattgtagacctgcaagtataatgtacaatgtaaataacaattatcataaactttttggcaaaatccacctgaatttaagtaagggagtatgctcatatgtaaaatatgagaaatgctaaggtgcccaacatttggtgcaattcaatctaagatccgatatatttaaattattaccactatcaaaaactattaactactggcaagatactatggtgttgagcactactggtgcctaatagtggtactcatcaaatataggtatactaggaggacggagctagggggccggagagtaccatgcccccgggaaattttctataatttttttacaagtgttggcccccattaagttttgggctggcttggccccgagctggtgaattcactaccagtaaaattacatgataaagaactgcattttaccttggaagagagacgtgctttctctcaagtgggataactggaccacttttaccaccattttcttcaagatgtgcaaactgctttctgaattgatcaacggcactaagataaacaaacaccaaatgtcaatgaaaatgtagaagtaaaatccttatttcaaccaacgtaaataaagattaaacaataacaaaacaaatattcattagaaccttgggtagagaaaatttgtcctctcagttccattcatgtagtctttcagcaactgaggatgatactctaatatctcgcgaaagattagctcccgtatgtcttctttcgtgacccttcgcctctcaaactcaaattccatttttgtaattggttggcaggaaggttccctctctaccctcgaaagtcccttgaaatagggatcagccaatgcctgataaagcaacaaatccaattaatttgatacattgaagtggggaagggaggaataaaaaattgagtatggaccagaacagtgtgtacatcttatgcatcaatgtacactagaacaaacctcttcagcagttggtcggtccttcggatcaaaagcaagtaacctttctaatagccgcaatgctaaaggatctgcattaggaaatttctgagcaaaatgaacaggcaattttttcctcatagtagtcaagtatctccttgctttttcatttcggacctgttcaggtcattttaaaattcgttaagacaaattagaagcagaaaaactcgaaagggaaaactaacaaatttgcttacccgagatatagtatctagtgaaggtgtaccaagcagatctgtcatcaaatctaactgatgtacaacatttttaccagggaaaagtggcttcccagttaatacttcagcgaaaatgcagcctatactccatatgtcaattgcaggtgtgtactgaaattaaacatttttttttcgaaagtaataagcaacaagtagaaaagaaaaaataaatgaaccatattaataaagtactaatcaatagacaaatacattgttctaccattaactttctagtggaaaaatcaatcggtaagaaatcaaagaacgaagatgttcaatttataatggccttccattcattggctaccaaggctcgactaaaagagatatagctcttgtgcttcttctaatttagtagcttactatgctctgacttgctcatatgagatacattccactcacttattagacacagcaagaacagtacaataaaggacacagaatacagcgagaaaacgaaagccaaataaggcctcggtcaaaaccatgaattccttcaacacatgttaagatgacgagacctaggctgaatatggccacctatgcattgtaaaatgtaaagtctccagaacaattagttgctagtagcctaaggcaaattcatattagctcctgaacttttaacatgatattcctaccataatgttgacttatgttaggcgtaacaaaaccaagtataattagctgtattaattactgtttctttgtattgttaaagtggttaggtggctaggatagtattaaggaagtgtaattagaatgaataatcaattccagctgatgttctaattctctgtatgactttgacttagtctcttatgtgagagtaggatttgagactttctaattctgagtgtgaaatcttaaagataactatcataacatccaataaaaaataaaaagtccatacaaaactataccttagagaaaaacgacccacaaagctctggagctctataccatcttgttgcaacatagtcctgtatatgtatcaacaacaatcaaatcaaccatcaactcaatttgtaaatgtacaacaacgtagtgtgcacaaattgcaacatgaaggaactttcaatgacataccgtccagaatattgtagtcggtgtatcattgaatgcaactcttgctaacccgaaatcacatattttaagcttacaatttgcatttgctagtatattcttcggtttcaaatctcgatggtaaacattcgctgcaaccacaagaagtaaagttagatataaaaaaaatgaaatactagggaaacaatttagtcaagttgcactagtgtggcttcaatatcacaatgtcaatcacattatggatgccattcatacatatacatgttttttaatacaaaatagggatcacaagtacagatagaaacacttgaagataacaggcagatacctgtgtgaatgtacttcaatgcacgaagtagctggtaaaggaaaaactggtagtgttctcgtgtcaagtcatcatttgctttgatgacttgatgaagatccgattccatgagctcaaaaacaacataaatatctttaaagtctcttcttgaaggaggcaacataatgtgtttaatttcaacaatgtcaggatgtctaagaagtctgagaagctttatctcacgaagaatacgagcagcatcagaaatatgttcaaaaatatcgtgtattttctttattgccactttttcaccggtgtgagtatcaattgctgagcaaacaacaccataactccctttcccaataacttcttgaattttataccgattcgcatcaccatactctgaaaagaagtccacctctgctgaattctgcaccatttaaacccctttatcttatcagaatccaccaaactggtgcacaaatttttacatcatgcaacaaaaaactgaacccaccacagaaattctacgagggtaacaaaatgggcatctttgaaacttgaaaggattcttttaaaaaaatatataatctaaaaatacaattttttgtactaaactcattgaaactttcttcatattaaagatgttcattttcttgttatttcacttctattgtaaatcagccgaaagaagattaatatgccaacttttcttgaatgagtctaccaattttcaccaaaaaaaatatatttttattaatcatcttaatctctaaattaactctaccagcagcaaatagcaaactgagaaaagtacaaatattcaagctacataagatggattaattaattatttattttaactccatgaaaataatattacgatcaaagaagaatgaaaacaaaacataatagacatcaaaccatgttaagcgtcccaaaagagttcaggtccattgatacagagagaaaaagaacaaaatgaaaatagcatctaatcagctggaaatgaaagcataaaattaagaattgaattaaggggggacagcagcccagaataagaattgaaaccactcctttttataagattcagtataacacctacacatattacagctcaagacaaataatttatgtttcataccagctaagatgattcgttaaaatcccacaaaatcaaaatacacaaaagggttatattccaaaatctctaaacaccaaaaatgaatatatatatatatataattataaatatgattacagtgtatttgtataatttaagatattagcaaagtaaaatcaaatccaaattttggtataaatgggaaaatcataaacaattctcaccttcttacggtgatcctgctgcatttttttcaattttttggtaacgttactttttctcgagaaaaaagaaaataaaaaactcaaagctacaaatctctcaacaaaaataaaaaatttgacccaaactgtttaaaaaaccttatttgccggtaatttagatcaggtaggtatgatccgaaacaataataataggaagaaaaaaagaaaaccctttaaattccagaacaaattagccacatttgccccatctaccccagctccggatcacaaacgaacaatcccaccttattcttctccccaaatcctttaccaaacatagaacacaacaaaccaaaaccctcatgcactcttccaaatccaattgtaatttcaaccctgaaacctcaagcactgaacctccaactattactaccataaatcacctgaattgactcaacaaaaatattagcattgtccaattcagatccaaaaccccccacaatttagcctaaaaatctcttttttctctctttcccaataatttaaaccctccacggagacgaacaacaacaaacaaagctcctcagttgaatcaggcacagagtatggaaatggaagctgcaagatctgttttttaacaccgacaaaaactgaaactttagagagagaaagagaaagaaaaagataataaagatagagaaagatgagttgtgaggggcgtgaagcataaatctagggaggaaagggagtgccttcgtatacggccacgtatagatactccgtatttatacggattcaccaatttttacatagagatctacgtaatgtaatgtactggaatcaatttcagttggggttacttttgtctttttacgctatgagaataagggtatttttgtaataagtgatcagagaatctgcgtgggagggaaggtttgggtaacagagccacgtgtatgtcagtgctggttgggaagaataagctgcacacgtcatcacgacacgtggcgttatctgagatgcattagggagcggtggacgaaacgacacgtagtttctgtgattgttttgatcacctgattttgcatgttgacaaaattctgtttttctttatttttttattttttttgttatataaaggaaaacatatttgtaacttcattaaataatatatgggtaggtaatactgtaaatttgaag

SEQ ID NO: 14136 - DNA, 4886 bp, Cannabis sativa
  modified_base (103)..(110): a, c, t, g, unknown or other
aagctagacaactttcctttcaagtttgatttacacaaatatggaaaccaaatcaatatatgccagccgaaatatacattaaataataaaatatttttgtcannnnnnnntgccaaaaatggaattaacagggcatagtacagatatctactatacatattaatatcttttataatgaccatgagctctaacttcaattttatttatgaggtctaacttcaattttatttataaatgcatttttttttaaaaagaacattacatgtgtatagcacggcgccgttttgctgtctaaatactatttccatttcttttacaacgaaaacattttctttcgtcttctttgatttttcaccactctctcatttctctctccatagctcgctttcactgtttctgcaaatccatattcaaaggtaacataactacgatcaacaatgtctaaatcatttcttgttttaagtaattgacgttttttgattggtattattgcttatagtagatcagaaaatgaatgctcattctgttaaggcgtgtgctcaaatttttgggttttatgccattttatttttgcttttaacaaggtttgatatttaaagttagtcctcctgggtttattttgtcaaaaaagacagacgaactaggtttaaattgttttgtttgaatttgagttgaaatgcaaatcttttgatgtgtgtttttgaatcgttttctcgaagaaaattggggtattaaatttgaaggttgtgaaatataaaactggttgagatagcctttgaattttgttgattgagcttgaatcaatggcgttcttatgctgatctgactttgctagcctaagttcactgttcactttggtgacatatttttcatttaaaaaataaaaaatatataaaatcaaagaatttttaggactggttatgggtgggtttgattgctttatgacccatttcgtaaatcgcctctctagctgtttaaatattgtttttttttttctttaagaagctaacataaagttgagatatatgttgctgctgactataaatttcataattcttgccaaggatctcatctctcatctcagataggcgtaagagtgaaccgctctcatctctctttctctccgctatctggtaacttctctctcttttaaatattcgcaattacatgacctggtacccatgcgtctatgttgagactctttactcgctttgggaatttaatctacattctacacagaaattaggtttttcttaaggcaaactgaatgagatatatggtcgtaatatatttttgaagttaaactaatttggaaattgattttgctggttatgctaactttttattttgtgtcctttattgggtgaaaaggtaaaggtaaaggtaaaggtggatttttttttttttttccttttttgagaaaatatcttatgttcaatttgtgcttaatatagcttgtttaaaagagtctagatttgtgttcatgatggaaatgtagaaactcaagttgggtatcaagaattcacgttagttgggttatgttcggttggtgggcttgtttaattgatgagcgaattaggttgattttgacatagcatttgaaaatcagaaccagttgactcattttttttcaactgatttcccttttgatatgtagtggacccttggttatcgaattttgataattctaatcaaggattttgaaataatagatagtatggaaaacccggatgcaaatcagcttcctgaagcggattcattgcctgatggatttgttgagagcttgccagaacctctggctccacaaactcctaccttagaacaggagaaacctttacccagttacaaggagggtaatgccacagattgctcgaatgaatccacagcaagtgagtttcagaatagtaagggtaggacagagaagacacaaaaactgagaacttttcctgttgtattatctgaatcagatagttttgatacttcagttgatgcaccaagtaaagactctatggaacatacagaaggtacacttgcccctccacattcaactccaccatcttcagaggcttcggttggggtatcggaatgctgtggcaaaaaggaacaacttccagaaaaatgtcaacgttcagagacacgtagttatctgatccttacattcttctcttaagcttaaattcacatgtttcatcaattattttgttcctttggttttgacttcttcacattaattcttttttcctgtattgcagccagtgaaggcgactcaggtgcaccaacaaccaatgcttcgaaaaacagaaaacctgtcagtacttttttatgtttgattcctatgttgttctgaagactaaagtaataatattagtttgcgttaggtttttttcttcttattaaataataaagttagtaaatgtgttgatcaaataacttcattattttgagactgtaaccaaagtggttctttttttttttcatatatattccatgaactcagcaatcaaatatttcaatatcctattctaggaaaagaaaattctatttgcttcatttttgtgtgaagatttgcttgtcatgcctagtgggcctagtttgctgttattatgtcatcacctacttttacaagaaattttacttgtatcttttcatagggtgtaatgtgtatgtctctcaaacttttctttattaagctttgtatgatggattcttttttatacaggaaattagtgagaccaagcgtaagactgtgaagcgcacctctaaatcagaacaagagtttttagagttcactttgaaatatcaacaagttattgctgaaagggattcaggtaatgttgaaataattatagtaacattttggttacaccttgagctctatatttatctaaatgtatgttggctttggtttctaattttcataaaataaatttcacattaaattttccatgttttatagtatgtttgaatatgagcaacgtatttgtctaattgataaattttttggtctcaccctgcctgttgtagctgttgctgttcgagataaacttgaatcattatgtagagaattacagcgtcaaaacaaaattcttatggtaggtaatctttctgcactatgcacccttactattattaggtggttttgttattttaacacgattcagcgagatcataatatatatactatgaaacctctatatagaatagctttgtggccgaattaattgcaacctaattgagagatatcactgaatagaggtattagtgtacaaaaacaattcttaacaccacccaagaggggtagctcaaatggtgttgtttgctcccacacaagctctgtggttcgagtctctcctgggtacctatatagcaattgctatggtttcttgttccccaaatattgtagggctaggcggagattctagttttaaaaaaaacctattcttaacacccaagtgcaaaagtctttttgagtaaatataatagtcttttaaaatttttgttctcttatttgatattagagtaacaatttttaaaagagtaaattgcggcagaacctcctcatagtgtcacctcactagcaaataatcctcaaaactcattttttgacggcaaaacctcctaaacccgtgttctgttagcacttttccatccacttttagctgttaaccaccatgctgtattgtctaggtagacataatgtacatgtgtcaccattttattggtctacataattgaattataaaaagtaagaaaattaaaaataaatcattaaaaaataaataaataaactaaaaagttttttttttctttcggatgcctcttcattcttccttttctttttccccagcttttattctttcttcttcaatcatcgtaccaataccaccaccaccgaaactaccattgcaataccatcactaccaacgccaacctaccatacaaacaccactacccactaccaccgcaaccacaccactacaataccactattgccattgcatttattagatcaaatcaaccacaaaaccaagcaaaaccaaacaatctcagatctagatccacaaaaccaaaaaacacaaaacaaaaataaaatgcaaaaacaatctcagatccagaacaaaaccaaacaaaataccataataagaaaatcaataaacgaaaaataaaaaatagaaaagaaatggtgagcagattttaactcgtggttttgagatctgagagtttaggaacctttaatggccgtgtcgactagttcaagggaaagagcagaggaagctggttgctgtggttttgttgatactcttctctctaatgaccttgagtcctgctctctagcagactcaaatcctttttcggctagaaattccaagcccaatccctcttccactttgccaccacatggtttagctcgctgcgtatctgctctcacttccaaggttgggtcgcctgacgaagattctaccattttcttgccttccaaacaaaacctagaataggtaatcgcttccaaagatattgaaaatggcaatgaaagaacaattgaaggagatgttggggagagaagggaggcttaggattttgggtttcgagaccaggggtgttgattcaaggttctgttttgatcgttggtggctggaggcggcccaacaggggttgcacaggtgaatagatagagagagggagtacattgtgaatgggagagatgaagatagggaattaaggttttttttcaaaattatttctgtattttattaaacttttaatgattttttaatttctaatgatattatttattattttttttaataaggttgagtacattttttttttcaatttttttttattttatgttttaagttttcttttaaattaatttattttaaatt

SEQ ID NO: 14137 - DNA, 7992 bp, Cannabis sativa
ttgcataatcggcattataccatgaatatagttatctacatatattaatattgacactctatgagcaacacttatttatgtaagtccatataaaatattctaacatataattggtaacaagtcggtgttcaaatacaaaaaaaaatatttttggtagctttcaaaggttcaaagcacggttggttgctaagggcttcaattagagacctagtctaaattatggggaaacatacaatcctatagtgaaagcatccactgtgaggattgtcctaacaattgttatgtctaaaggctgggagactcgacagttagacattaacaacacattcttgaatggtcaacttgaagagtaagtttttatgcaacaaccagagggtttcgttgatctagaaaaacctacacttgtgtcaacttcttaagtcactctatagtctcaaacaggcatcacgtgttggtttgagaagttaaaaaccacattggtcagctggaaatttatgaactgaagagcagattcttctttgttttactatcaatcaaattgtgagataatgctaatattaatttatgtcgatgacataattattattggtaacaacttaacaaagttaagacaatttgatgctaaattaaacaagaaatttgctctaaaagacttgggggttactgcaatattttctgggaattgaagtgactagagatgagacaggtatctatctcaaccaaggtaaatatattcatgaattgttgcagaaaaccaaatgttgcatttgaaaccatgcccaactccaatgactgttggaataacattgtctagttctcatggtgacctgttagaaaatcctacagaatatagaagtcttgttggagctcttcaataccttactcacacaagacctgacttgagctttgttgtaaataagctaagtcaatttctcaaagctcctacaacagcatattggagtgcagtcaagcgcatattgagataccttaaaggcgcaccatttcatggttttcatatcaaagtttgtgaaaacttagcctaatgggattctcatatgcagattggacaagctacccaaatgacagaagatcaacaacagggtattgtgtttatttaggtgatacactaatttcatggtcctcaataaagcaacttgtggtgtctcgatccagttattgagtctaaatatagaaccctcactcaagtttctgcaaagatgacttggattcagtccctgctataagaaatcaaatttcctttggctgcaatcacatggtgtgataacatgggagctaatgcattaacttccaacctggtttatcatgcaagaacaaagcacattgaactttatgtgcactttgttagaaacaagatactgaacaaacaattggaagttagaaatgttacctcacatgaccaagtagctaattgcttgaccaaaagtctcactggtactagattttaatttcttgttgacaaactaagtgtggtgcaatccccacttagtttgagaggaggtgttaagaaatgaaatggtaacatgggacaagtcaccaatcccatttaacaacttttatccaagtcagctactaacaagtcattattgagaaatcacctacggttctagcattgaaggcatcttttctgttttacctttttaaggaatattcccttttattgttaggtattgtaataagtgtaatgaggtgtacctcttctagaatcttcttgtatttcactatataagttaataaaattatcaaggctcttggagctgagttttcttattacctattatgtgtaaatcttcacggccttaaccactcttgtcaatggtttagtaatatgtgtaacttccaaaacgacaacaattcatatttgagtttctgattgtctccaattctagttaatttttccagtgagataaaactattatcaaaagtccaaggaccatatccacaaatacatgtttctctttcaccaaaacgaaagagaaacaagtaaaaaaaaacatctaacgagcgaaattaaatgatccctacccacaattttcgtagtcaacacacaatccatcaaagtttttgccacactagccgcacaaaacctacgtagtattacgtgaatagtgtaaaacgttgaacgttatttgttataagtaattaaaaattatatctttgggtctaaaatgtgagatatctaagtatgcccaaacaaattaggagcatttggaggtgtttaagatcacgttcaatacaaatattaagtcaacaaaaattcaggcatttattttccctattcatttgcttcattagatgaataacacctatactagtaatcaaattaaaataataatgaaaaataaactaagactaaaaaaaactatttctgttcatttaccaattatttcattccaaaaatgaaataaggtgctaccttcataatgtacttgttctattgtagatcaccaccagcagatggcatctgcatataaataccacaaccatgtagagaaaaagtcagataccatcaaccgatacacgccctcagacataattacccaaaaccagattaacaccattgttccccccaattctcaggaggtgttaatgtatattatttataagattatgacttgtatttatacgtaattcgaaaagcttaaccccttttcaaacccctttttaaatgtaaaaattatgatttgtatttatcatttgcagaacccaaacttggattgtgaaacaaaacaactcaccaaacccagggcttctgctgcgcttctctgactttcttcatcgcaaaatccaatcagcatactcattaaaaattctctctgttctactttcaagttcttctccaggcctcgagcaaccatctccatttcaggctgaagattcagatccccaacaagattgaaattagaattgacaaaaataaattctagacaaagaataacatgatctcacaaacatatttatatgcgagaaagttaaatgaaaaaggtttgaaagttgcatgcacagcggggtatgctatatgtatgtataggaagttaaatgaaaaaagttgcatgcacatcaggtatggtatatgtaggtttggataaagaaatgggctgcaatgaaagaatgttgaccaaaaaaataaataaaaaggtgactgcatcttttacaaataacattcaatgttcaatattagctttttttaaaacaaaaccattggcccataaaacatagcaacttaataaaagaaaaaaaaaacagcacaaatcctacataaatgtagtaatactttgtaactttagcaaccaataaacaaaaatgtacagttgtacaatataattacatgagacatctcatgatcccataaacaacttgtgttacacgtaaaacaacaaactaagctaaaactcatgaccaaccgttccaaattcactcaaaataattttgggtctaaacaatcacttgagccttgttagttgttactaatctgtaatggcctatactataaatgaaatgaaagtgtttccactccccttctatccctgcattaaattgcaactcagaccaccagctgtggccgatttctcaaacaactagtttaattaagttaacccaatctaaatgcttgagtactcattcttaaatccactttcattactgattcaaaactggccctgataccaaagatatacatagttgtgttgagtgcacttgaaaggaaaatcattttcaaaacatacagacagagacagcatataaaaggaaaatcaatgtaaatgagcatactgatgattcgtctggaggaaatattcgtagaataaggcatatctttgacagctcagacattgcttcatcatgtttaccttgcatttccaaggcctgcaattaaagaagcatgtatgaatataaatatagtaaaaattcaaaaattagagacttctaatccaggatatgtatagaactatgttcttatcatattaatttttgttgtcgtggggactgtccaattcaaaaattcaaaatcctgattgaagtcaaataattttgtacaactatatcgtccaattcaaaaattcaaaatcatgattgaagtcaaacaattttgtacagctatattttgttattgttaataataataataagacgatttcttgagaaaagaatcttcatactagggttcagccattaaatactggaaacatggaatttagtaactcgttaatttaaaatgacactttttctagacctaaagattccatgtacttcccgtttctaagataatgttactgcaaatcaagtccaggagaaccatttgaaacaaactgaaaaaatctccacaccttcaagttcagttcggaattctgatatttatcatatacatacagtatatatatatacatcagttatagaggtagttaaatgtcactatgtgtaaacacttttgttgttcatttcaaaatagaaaaaaaaaaaagaagaaaatagttttttatgttttttttttaaggtagttacactgcagttaatctgttcggttactagttaccatctgtaaccccttctgcagcctatataaggcttgtctctctactttgtaatcggaaaatttagttcaatagaattcaattctactttcttcgtttttcttttactctgtgatgttacaactgagcaccatctaaatagtttccacagctttgtgaagcaaagacattgtggtttattcatatggaaatgtaaaataaaagtggtgaagttacccaagcctgcaaaaatcgtgaacgtgtgcgtgcagccacggcagcagacacaattcttccagcgcgagtgttttcaagtccaatgtcctcagcaagtccagcaataaagtgacgtacatcctcgccatcaatctgaattaaggatgagtaacttggcgccctgaaaaattcttaaacaggttatagaaccgggagacattatcaggcacaaacaaaaaccagtatcaggctgttggaatgtgacgaaaatgtccaacaaaactcctttcacagaatacatacctgccacaaacatttaggacataatcaacagatgtacggtagaaggaatcccgtgtatttgatgtatcaaaggaaactcgtacgccagatgtcctgcatatttgacgtaactgctcacacatacagggaacaaaaacattgcatacagatatcagtagatgcaacaaaaataccaagctgaatttgatgtcctcaacaagaatacaagataatgatcagaactcttaataattatttccttatcacacttaggtagtgtttaattggaggtaatgaaatggaatggaaatgaaagaaatcaatttttattccattcctttgtttggttgcattttatagtattggatgttggaatgactttttcattattcaggtggaatgactagtccattttaaaatggaaagaaagaccaagcataacatgcacaaacacatattttataattattaaaataaaaatcagagaatattaattagaccttgcaaacaaatagtcatacatttgaaaagtaggattgaatttaaaaacataaggggaaaaaacattgaagaataagttaataatttgtcagcactaaattagtgctgaaaataagttgaaatacatgaagataagggatttgataggataaaataaacaaagcttttaaaacaagattaagttatccccatactaagggatttattttggatgttagattaattcttttaatatcgcacagaaactcattgactaatcaatctccctacataaaacgcaaatgcatctctcttttatctctgtcatgctacacaagtacacaaacacttatcaaatgatcaacccacattaaactgcacatgcatctctttctctacataattcacatgttaggaaccaatagatcagctcaaaaacaatatggaacacaattatagctttaaaattactgacttgaatgatatcatgctccacaatgtcctttccgctcagtctattgtccgtcattgctggaaatcaagtggatgagttcccaattaaagatcaaaatcattaccaaaattttgcaaaatgtgacagatgtcagattttacctacaaaacacaacacaacagaaaatttttcctaaactaagtttgggaaattttcctaatatacaacgataagaaaaaagaggtaaagtgtcaaaccaatttaaataacaactagtaaaaaaaatacaagttgaaaaagcactacactgcagaccagcctaataaatcccctaactcaatgcttcaaataacattttatgtcaatcaagataatgataatactattttctataacaagcacatatattatagaaaagccttttataaaaatgatcgccaaattgaacattatatattattagaaaatgataattatacaaagtaaaaaatagatttatattaatttgatcatattctttgtttccctgttcaaagcacagtatagtgtaattaattctttaccgctccaggtgatggtaaagaaactgagaaaattaagagagagagctccttattttaccccttaaacactttaaatgcattttccttaactttcaaactttttcataattacattgaacctctaaagtaatatgaataatgaagcaccaagtctctattagttcatcatgctaaacaaacaccgatagtgctgcttgttataacattttaatcctaaattcagcttaaaaccattagagactgttattacttcagagcttttagtacaataattaacttcacaccacattcttatgacagaactcatcagtaacataacttatcgattagcgtaatcgtttcttcacccttaattataaagagaaaataataattgttatccttgagaaaaaaaaggccgaaaagtttcaagtcaaataaaaaagattgatacatgaatacaaatgaaacaaacctcgaaccaatctgttggcttccctctggtactcttgctgatccgtcattaaatcgtgatgtttctccaactttggccaccatttgggcaacctcttcccgacccgagcccagttcttcagagccctttgggaaccaccaatggcatcctccttggtcgactctaacggattactcaaacccccaaaccccttttccctcgaaacaaagttccctcttgtcccagtcccagccccaaccacaacctctttcccaccaagactcctatccctccgaaccacgggagctgaccttccagacccaaatctactcctggaaaccaacttcagcaatccaaagaagaccctgaaccccaaaacgaccacacaacccaaaacgaccatactccccgcgaaatgcagcgtggaccggcggcacgaaacgacgagccttcggtcgtcgtcgaaggtgattagggtctgtaagtcagtgtaagcgtccttgcccgcggcgatgaaacggttgagtttggtggagtagtagaggtggtcgaggtcgatgacagtctggattttagagtcggagacatctgaaaaggcggagaaggtggataagggtgaggaggaaggagatgagggctttgagaaggaggttcttctgggttttcggcgcgaccgattaggagggcgaggcatggagcaatggagtctgagaaatggagaagagtaagccagtgcgtttgcggaggtcatgtatgtattcggtttcagagcttcggcgaaaaaaacacaaaatcgacaaacaacaatagaagatttggaaaggaaggtttctaaacagtgaataagaagtgtagagaaatgtcctagcaaaaaaagagcagagaaatccaaaataattatactctgaatgaattgaatattgatctcgagtagagtaagatacctctcttccaaacatggaccacgttgaattgaaacgattccatttcatcgtaactagactacaaataataatataataataacgaaaatgttat

SEQ ID NO: 14138 - DNA, 7729 bp, Cannabis sativa
acaaggtaagaaatcggttatgaatgcacaagaatcttaccataaaagaaaaaactattttgtcaactaacttgccaaaaaaggactttacagtcatgattcgatattttacgattatggcagaaaataagtcaactattgtgacagacatggtgccaataatgtctaaaattattgatcataaactcaaggattcaaactatttagtttggagcaagactatttttctctatttatggagtattgacaaagatgattacttgactagagatcttccaaaatcagattccaaggagatagtcaatctgacatggctttaaggaggatgcttgcttatttcttcaaattcaaaattctattaaaaatgaggtgattggtttgatcaatcactgtaaatttgttagagaactaatagattatttggaattttcgtacttcggaaaaggaatttgattctgcaaaaatacaagttctttttgggtctgacatctcatatttgcaatactgaactacttcatttgctccgcttactagtactttagtaagtcgcaatagtagtaatgtgtctaggagatatactacctcaactaaacagaaatggggatatccataagggtctgacaattgaacctcagattttggaggtatttttttgcaactattgtaaaaagtatggtcacaccaaaattgagtgtatacagttgcattttaaaaatcagcaaagaaagtttgctaatgttgcaagcactgatgatgcatctgacaaatcaatcgttatttctgctgatgaatttgccaagtactcaaggtaccaggaatcacttaagttttgatctccttatgtcactattattgttgatttatgtaaatctaattcatgtcttcttttcaaattctcaaaataggtcattgattctggtgccacatatcacatgagaggtaattctaatctcttttttacttttcaatctcatagttccacttaaactattaccttaactaatggatcttcctcttttgttcttggatcaaacaccgttactcgtacacctctgcttacattttcatcaatcttacacttacctaatctatcatttaacttgcattatgttagaaaactcactcataatctaaattattgcatctcattctctcccgatcataatttatttcaggatcttatgacaaaatagattattggtaaaggacatggatctgacagcttaaatcttcttgatccacttccaccaatgtctattgcttgtccaagtgttgcttctacttttgaggttgattctcgtttagatcatccatcccttcattcgcccaagaaactttgtccccgatatagtaatgtatcttcattagattgtgagtcatgtcagtttgtcaaatatcattgtgttagtttgagtcctcgagtaaataaacgtgctagtactccttttgacttagttcttttgatgttttaggtccttctcctattttgtgtaaacctgaattcggattacttttatggatgattattctcgtgtaacttggttatatttaatgaaaaattattttaagttattttctatattttgtgttttctgtgtggagattcaaaatcaatttaatgtttgctcatacttttcgaagtgataatggcaaggaatatatatctgctcaattttaatcttatatgatctctaatggtatgcttcttgaaacttcctgtgttgatacgacatcccaaaatggagtagcgaaatgtaaaaatagacatcttcttgaaactacgtgtgcccacttgttccaaatgcaagttcttaaaccttattgggtcgatgttgttaccacaacatgttttcttatcaactgcatgccatcctttatacttaatggtgaggtcccatttaaaattctttttcttggtaagtcattatttccatttgctcctcgacaatatttggcaatgttagtttgcttgagatgttcgtccacatgtcaccaaattagatcctaagtcattgaagtgtgtcttctttggttatcctcgtctagaaaggatatatgtgttattgtcccgatcttaataaaaatcttatttctatcaatgttacttttgtaaaaaatacaccttatttttcatcttcacctactcttacacgttaggggaggatgatactttgttggtatattttatgtgcacctaacacatgttctaacgagtctcttgttcctccacctgcaacggtcataactcagcatgcctacaactcatcagcctcctattaaagtgtactctaggcgtccgactcctctgcctcatgtttcatgtcctgcacctacttctgtgccatcagatttgaacccaagtgatgatcttcctattgcacttcatgaagataaacgcagatgtacctatcctatttcttcttttgtttcttataatcatttgtcctcgtcttcttgctcatttgttgcttttgttgattctatatcgatacctaaaatgatcgtgaagtcttatatcatcttggttggcttactgcaataatagaaaatgaatgctatagacgtgaatggtacttgggacttggttgttttaccttcaggaaaatgggatattgggtgcaaatgggtattcacaggttaaggtgaatccaaatggcataagtgcttgcttaaaggctcgttttgttgctaagagttatgttcaaacctatagagtagactattgtgatactttttctcctattactaagctaacatcggttcgaatgttcatttctatggcagctactcatcattggccgttgcatgagctcgatatcaattttttttcatggagatcttaaagaagaggtgtatatggagcaacatctgtttctcaagggcagtcaaggaaagtctgtcgtcattgcgaatctttgtgtggattaaaacaaagtctttgtgcttggttttagtcaagctgttgaggcaagtatgttgaaaagtaagtccgaccattttgtattctataaaagaccaactgccaggattattttattgattgtgtatgtggatgatatggttattaccagacatgatactagaggcatctcatcccttaaattattctttcatactagtttcacacgaaagattttgggatccgcgagtatttcttgggagttgaagtcactcagagtaaacaaggtacttttctatctcaaaagaagtgtgtactcggtttgttaatcgagataggaaaattggaagaaaatcttgtagtactctaatgaatcttgttgtgcaccttacaagagatggggaatcatttaaagaccctaaaaagtatcgcaagttggttggaaaataaaattatcttactgtgactcgtccaaatattacattctatgttaatgtggtcagacagtttatatcatctccaacaattcatcattgggcaacattagagcaaattttgtgttatttgaaaagagaacctgaatgagacatcgtgtacacagaccaggggcacactcatattaagtatttctcaaatgcagatttggcatgttttaaggtagatagaagattcacttcaggttactgtatttttgttggatggaatttggtttcttggaagtaagaagccaaatgttttgtcacgatccaatacagagtcaaaatagagctattgcagagtgtgtgaggtgatatgtatatatccgctattagctaaagtaggactcaaaatttaagtaccaacgagattatggtgtgataatcaagttgattttcatattgcatctaatcttgtgttctatgagcgcaccaagcacatcgaaattgattgttattttgtttgtgagaagattcaacaaggtttcatctcgattggatatgtgaagactggagagcaactaagaaacatcttcacaaaaactcttaatagagtgcgagttgattatttttgtaacagtctaggtatgatcaacatatatgctccaagttgagggagaatattagatatgtatattagttgtaaaatgaactagaaaataaactactaaatttggtttattctctttatttcctagtataactttcctaaattgtgtataaatatatactataatcttaattgaatataagtcaattattttcatcaccattatttactaccaaattcaaaaagaaaagaaaaatatgatattagtggacttctaggagctatacaaacacccctagacaatcacgacttaacaaaatcagtcaacaaataaggcaacaaaagattccctttcctaagcccacggtaggctttaaatctcccactatcaacctgtagatatgacattgatcccacacaattcatgatgaagttaatccatgatttcacaaaacccaatcttttcatcatggctctaagaaatactcattccccaatctcctaatttagaagcaatatgcccgttctgcttcgtttatgatgctcaacccaatgcatagcctcaaaaccaaaaatattatcaatctttctggaacaaacacactttgtttgtcattaataatcagagcaagaacaggcctgaaactgttggtaattacattacaaaggcctattagcccgaaatccttcgcatggttcattcaattttggaatcaaggacatgagaatgtaagtttgtgtgtgaattgtaaatactttgagtctgaagttaaatcaaaaaagtaaaagtataaaaagagatgaattgctgaaaattctgtagttaataagtacttcaacttcaagcacccaaatacttatataaatatattatatatataaaaattacatttctacgactctgaagagtcagaggaacacaaaatgttgttatggtagttatggtagggactgacagtggagcaaatacatgtcaatcaattgaagcaattattcacattaactatttagtaaatagtaaatactatacagctgatgaaaacaaacaattttaaataattgaactctattataaactcctaaaataaacttacttgcacaatattttgcagcatcaattagtggtcagaagaatgcccggctaccatagaacacccttgatccatccttttttttgtcaacttctaatttgttgttatggttttgaatagcttcactacgatcttgacattctgccttatcaagctccattggtagcttcatatttgccaaagactcagtgaattgttgcatgcttctcatgtacatgtccactatttgttgctgcattgcagactgctcagcctctagattgatattcccaagtggagctgaaaacacttggccaaaccgagaagaacccgaatttccttctcctttgttgttgttgttgttgttgtcctcctcctcttccttacatgagaattttgactctttctcatctctagcttcgcttccttttctcgaagttggagtatctggacaagcacttgggccatggtttcctgcttctgtagtagttacagatgcattacctgaatttgatgattccccaaccatgcgattccttttctcgattgaatcacttgaattcttatcatcactcaaacttgttgcagtagaactaaagaagccagagttctggatgctcccattaggtgagatagtttcctcagatgaatttaaagtcatttcatagtcatcaccaagctgaggtgatgcaccaagatgaagaaatgaggcaactccaccagaaccaggcttgataccacagccatgccttgccaaatcaaaatactcagacaccatttgttgattctccctcactacattgatatcagggaactcaaccctacaatactcaattgggtccaagatcacttccgaaatttttctatcaagcagaacaacctctgaagttatagatgaattagcagaagattcagataacggattaagggaaggactaataggcaaagatgtgttaagtgaaagagtcaattggacagtcccagctggtgagtgaaagagatcagtggaagataggctataatcttgggacaattttccttttctaatcacttgtgaaattgggactagagcaaaacccaaaagctgatcttccataaggttccttgccctgctaagcatccagatttcacatttgagtacagcatcaagctgagtgactttcatcctcaaattctcattgaaatcagggttcttaccacctccattgatgactctagtagagatgatctcatctggattgtaagtaagagaaaattttgcatacacatcttgtttatcatagatacaaatgttgtgaatgttcctagcattatgaacatagatttcaagaatccctgaaaactcagaatcaccattggcatcacttacagtatctgcgttgagattgtaccggaacccacttctgtgattaaaagaatccatgggaaaaaagaaagggagaaaatcctcctgtgggtatttcaattaaacaaaaaccttaaaagttgaccaatcaaattaattaatcaaataaaaacaaaatcatttccatttttcatagcaaaactcaagataaaggagaagaagaaaaaaatctcactctttttttcctacatggcgctaatcaattactaaaaatctatgtttttccaacgttgttaagaaaatttccaaagatgcaccaataaattaaagcagaatcattattttatgaacaaaacaaatttaagataaagaacgaggagaaaaacttacaatggaagaataaatgagatagattgcttcttggaaagtcaagagttggtatgacacagtaggtaggaatgaaagaaagaaaataatataagtgatgatgttacatcgtttctctttctctggttttggttgggagagtgggtggaagatagtgatgtgttgtttgattgatggtgttggtattggttttgcttgacgtttcagtctccacttcccagcgactgattttctccactcacacacacattggaggtccccacatggacccttggaggacccaatctcgactctgttcttcttcatatcatcatcattcatcaacatcatcactctcaataatctctctcggaagcttggaggccccatatataatatatatatatatatatatatatttatataacacaacacagaacagacatagattctctcttccaaagtcacagttaaacttcttctgttcttctaccctttctcctaatgaatgactaagacactcgtccattcgtctatttttcagatgagttgttctcatcagcaaaaaatatgtgaccatttttatacattccccaaggccaattaccaccaagaattttcaacagatgtttggtagagatgaaggagagttagaaggatgaagagtaccatggttccatggataagatttgctgtatgattttttggtatcggagagggagatggtagacataaattttaaatataaaattactatattatcaattatgaaatatatttttcatttctttaaactttaaaggataattataaattaatttataattttttttgttcttatcttcaatctttactcttctaaagaattgaaaataagaaattcggtaaatactattttagactttgtgttttgcaaatgttaactttctattttgttaaatgattaaagggaaacttacaaaaatactgtttttttaccaaatattttcaaaaatactaggacactgcaaactttacattttt

SEQ ID NO: 14139 - DNA, 3781 bp, Cannabis sativa
  modified_base (3037)..(3037): a, c, t, g, unknown or other
tgagtttcgtctcaaaatcacttaccaaccaatgaagtaacacataaactaataaccggagtgagagcgttcataaaatacttaagccaaacaaattcacgctattcaattcaatccgcaaaatgcaaatattcgtacttgtgcgaactgaattacattaaaaaatttaaattggtacttgtgcaaattaaacagtaatcgatataattaagtttgcacatctttatatatatattttaaaaaattatatatatgtataatcaatatttttgttaaatatttcaaaaataaataataatttaaatatcatatatatataaaaatttaatacaaaatataatgtaaaataataccatacatttttttaatttaatttgttattaaagacataaaataataatattttattttattttattatgagttatgtgaagaaaaaaatattttttaataaatgttaaataattcaatattaaaatataatcaattcaaaataatcgatttaatctgcactattgcagattgaataagattagatttgagttattgtacggattagattgaatctaaagtataaaatttgtattcagtgtgaatcaaatacaactataaaaaatagtgcgagtttgattagaggaataatattaatgaggaatgctaaagaacaacctaaaatgcccaagatctcctactattattggtgcaaatggatattaggatctcacataattaaatttaaaatttaaatatgtggactattttttttttttaaaaaaaaactcgtctttcttgcaaaaattggagggaaattcatgtaagctggataaagataatgagggaaagtttagattatattacttggggcaccaagatattctgcatcttcttcttcttcttcttcttcatctacatagtcttctaggctaacaccccatgagggtgtggtgttgccatcctcattatgcctcttcttagcacttagagagtgtctaagtttcctagccttctctttcaccttagacagaactgacttcttttgatggtgcccatgatcttcttctagatcatgattccttgcaattgaagacgaagagcatgatgaggatgaggatgaggatgaggatgaagatggtaaccacggccaagacccatcaccatctgcatcaacaaatttaaactctaaacgttggaataaaataatgaattgtctcattgattataattatttattagtaattttatacctcggagcaactgttccatagttgccttacaaggcgttttaggagtagtagtttcaccacgtcgtaataatgagcgatcaagctgagccattgtaacaatgttttttcacaatattgtattgaacagtgtttatatatttatatatgtggtttgttatgaatggtgagcagagattaaggatgatgttgaggcattggtttcggggttccggagaaaaaacaagagcccatggtcacctggtttcatgtgttttgtgggatttgatttcttacacgtggtgcctaagtctctgaaattatagtcatctcttggcttttgggctatttcatgctacttgaggttgagggttgaggagatgagacttgttttcttcaaatagaaatttgaccatgtcattcattcttacttattataataagcaacacacaatcctaaattaatttcctacctacacctataatccaaattctagaaatttactaacttcctttgacaaaaaaaaaaaaaaaagaagaagatattttgttttgtcttttaataagttacttaactaaaatgccattatcacaggaaaattctttaatattttatctgttaaaattaaactaaaattgtttttttcagattatgggaaaaataaaaacatattcagtgattaattaaacaaaaaggattctaaaacattaattatacaactatgttaaaaatacatgtaaacaaatatctagtaaaggatttgtaaattttttttctttcttctttttgaaaatacctaaagtcgtcattaattgattcattgatcaatactacaagctaatacatgtaacaataattttttttaaagaaaactttgcctcaatcattacaggagatgtaatacaatgtgcgcaatttgattttgcttaatttttcaaaagaaaattatattatacaagaatgaaaagagaatgctataataaggtgaaagaaaaccaatttatgaaccgattatacactaaccacccacataaaaaataaaaatactcaatatttagacaaatataacatagacaaaaaaaatactcttcaccatctttgaatgtttaaagtttaaaagtctaaattataataataataataaaaaaaatttaaagtctaaagactttttaatgtttgacatattgattataactaatttaaaattaaaatttattaaatttctaatttttatattcttcttattcacatcaatcaagtatacaaaaataaaaataaaaaatagtaaaataacatcaaaaaccgttttgctactgggtcaaaaaaaaaaaagagggcaaatacataattattttgaaaaataaagagtacctttagtaacactttttaatgaagtttttgtttttaaaattaaaaagtgaaaatatttttcaaaattatattttataaagctgtttttacttttcaattttttaattaaaatctaaattttaaaaataaaaaaaaaaatcacttttaaaattttgtaaacaaaatttttaatcaatattttggacaccgactccaacttagaccttagaaaccaaacccggacccgaccccagacttgaacccgccctcagtcccgaccttagattcagcctcgaatccaacttaaattaaataaaatcaataaataaaaatagaaataaaatttacagaacacacttttattttttgttttttaaattaaaaaataaaagtgattatagaacacatttttttttttaaaataaaatttttaaaataaaaactttacttttatttttgtgattanaaaatttaaaaataaaagtgttactaaacgccaccaaattttttaacaaaaagttgctttaaaatttgttttgtccaaaattttggaagggccccctttggagctaaagtagctccgtccctttacttatcaattttaatctaattaatattttaaataaattattattcaaatatatatatatttatatatatatattgcgttatttgtgggataactcctaatactttcaatttgcttgtacttaacccccaaaactcaaattttggcagtaaaattccaaaactagaaaaccgtacgttagcaatttacagtttccatccattttataattttttttttcagttcactttcacagataccatcaccaaattcaccaccactgttacatgaaaagataaacaaccaccacccaccaccctcctccacaacccaccatcagcacagcaaacactaccacttcaccttactgtttatatccaaatcacacatagaaaaaaattaaacaaaactttaactaaattttaaaaaaaaaattaaacaaaactttaactaaattttaaaaaaattagatcacacacacacacacacacacacacacactcttatatacaaaaaaattttagatcttcaactttgaaccagatctaacctacgaaccatccatccccgtcaaaccaagaataccatccttgtcattgaacaatgaacctatgaacccagacacacacacacacacacaca

SEQ ID NO: 14140 - DNA, 5519 bp, Cannabis sativa
  modified_base (32)..(61): a, c, t, g, unknown or other
  modified_base (3823)..(3823): a, c, t, g, unknown or other
tttagaaagttcttatttaggatgttaataannnnnnnnnnnnnnnnnnnnnnnnnnnnnntaaaataatttccaacaggatcctaacgggtagtttatttttgtggaccctaaaagaaaaaggcctgatgagatggcccaagtaacaaatgagagcttgtaaggcacaactaatatggtgcaagatcaatttagtatggaggcagacaataatacattaacgggctcaaaaaaaaggctttcggtgggtactggtttttagacccacggctcatcatcaatatcattatttggaattgtgaacggcttaggaactcatgggttatccaattctttattcatcttgtgataaaaatgaaacccagttttatttttatgtgtgaaactttgtgtcataaggaggtggtggagcaagttaggttgaaattagggttcaggattttttttctcaatggatccagttggtcatagtggtagggtggccttttatggagaaataaaggatattcagcttataggttattcccttactcatatagatgtttgagtagtgtggtgtggaatgaagctttgaggttgaccaggttatatggtgaactaaatacacaacttcagagcagttttgaaaattaagagagacttcctcttcctctttatcgtggtgtcttttaaaggatttaaataatgtgatgagccaagctaataaacttgggggtaatccttatccctcttagcttattgatggtttccaacaagtggtaggtgagtgtcatctacatgattaagactttgttggttgcccttttatgtgggaaagtagttgtggtagtgattctttgattgaggtttgtttagatagagcccatattactcagaactggttaaatcttcttcaatttgctaaactctataatcttgaagtttctacttcatatcattgccctttattccttaactttgtggcacctattagtggtaatcattctaagtttttccgtttagaaatgcttggttgagagagcctttttgtcttcaaggtgccaaggattgttgggagctttgtttcgattagtcaatgatggagaaaagcaagttgtgtgggaaaaaattgttagattgagagaaaaactttattggtaatttcatagagaggattggaaaatgtaaaaaagagatccaaaagtggaacaaggggaagaatgttgattctattaagttgtacaatgaaaaaaaaaaaaaacttgtatgaaattatgactcagagagaggtgttttggtgccaacgctctaaacatctttggcttcatgaaggggatcaaaatagtaattttatccatcctaaaactacttctataaggaagaataatactattactcatctctcagactcaagagattggtgggttaattgagataatggacttgcagatgtggtggtcgattactatggagcaaaacatggctttgttatgccctattcgcgacgaggaagttaaactttccttattttagatgcatccggataagaccccatgtcttgacgaagaagaagcaacctcttaacatggtagatttgtgtcctattttcctttggaatgtgctctataaaattatatctaaagtcattactaattgtttgatagctgttattccttgtgtaatttataataaccaaagctcttttatccaaagacatctaatctcggataagatcatggttccttatgaggtcatgcactatctaaagaggaagcctagtggtaaacatagttttatggctttgaagttggactttggaaaatcctatgattgcattgaatttggatttttacaagcaatgatagaaagaatgggctttgatagaggagttgttgattttgtgattgcttttgtttcgataatgcattattttctgactcgtgggtgctatctgttgggttatattatcccaggaagagaaaatcgccaaggggatccatttttccattaccttttctcaatttttgttgaaggtttttcttctttcattaagcagtttgagtgccaaggggatcttttgagttgtaaagttgctaatggtgctctgattatatctcatatgctctttcctaataatagtaatgtctattattggtggaatcatgtaatattttgaggttgttgtctttgtctgaggagccctcgtgtcaaaaaatatttttttttttaaatctttggtcctttttagtgccaacatgtaacaccctactggtttaggtacaccactctgattttcataattactgtggtgacccttgctaatcaaaggatttattataaaatcatgtttaatcaaaactttataataaataaatagataaatattttcatatataaatattgtaaatttaaacattttataaaatgtgggatctcgaaatctattattcatatgtgaacataacaaaaatttcaccttgcgactaacaactttgagcctatataatctcgaagattcaaacactacaggtctaatcataaagatatgtacaatcatcactgcgctccaatactcataattgttcacccctggccgttacatacaaatgaaagtatatctgtgagtcgacacactaagtaagaaaagcataaaacataaaaatataaccgacccgcaactagatgcccgtaaatctaatcacaaagttcgtactgagtcttgaatgttcttaaggaaagtaaaactagccataatacctcatgtactaagtactctaggcatactagtgttggtggcattagttcgttctttgtgaaagcctagcatatatttgtcgtatctcaatgcaactctatgtacacctcaccaataccttgatatgcaaatttgatggctttacatttttccttacatatatttgttgctatctcagtacaactctatgtaaacctcattaatacattgatatgttaatataatggcacctgaaacatgcctactaacgatgtgcatacatgcatgtgttatactaatcttttctaaattccataattaggtgcgctggtcaaactgagtgaaaaaaattgctcaatgattggaggccctaagtgacatttatgtaaaactagtgaatgtctcgctaaaatatttttggggacgtaaactcaaaatagaagttttcctatcgataaataacatgaaaatatcctaaatatcaagaaaacatgaaaattaaggtactcaaagatcacctcaactggtagactggatccccaaacagttcaccgtttccctgagtcctgtctaggaaacaattcattgcttctacataattggtggactatttcgtagtacaaactactagttaaactcgattttcccacctcaaatctacccataaagtttctcaaacttttcagaataccttaataacatattctaaacatagtttaacaatcaaacacaataaaaacaccctgaaataaaatctacctttggagattaagctttgagtttccaaactcaaaactttattccaattgctacatcagctacactacttcaaaaaaaaaaaaaaaagttaaattcaagctttaaaaaacaaattccaacccaatcaaactataacaaaaccaaatttacaaagcaagcataaaactaaacttttcttcatcaagattaataagataagtgttctaaagtttaccttggtttttccttccaattcccttataattcttattgaaattcttgctagataggtgaactaactctgaattgctctttgttccttagggtttcttaaggccgaaggtggagagggtttagagagagagagagagngagagagagagagaaaaaaaatatctaaagtttttagtttgtatttatccaaacagtccttatattatttactaaaaattagcatataagtcccttattattctacaatatacacttagttggataattaaacttataaaataaattgctgaactacctttagattcaccactaagtaacctcttaacctaggggtaaaatggtcataaccaattttttagcataacctcgacaacctaaatgtccataaatcttggcccgctgaatctaagatactaaactgtatctaagtgacactattggctaaatcattaatttctactattataaggcataaatttaaaaaaaaaaaaaaaacaaaaacaaaacttcgtaaatatctaatatgacacacctagaacccaataaaatctccaaattattcctctaatgcctaattctgacaaaatgacttactttctactactgcacattaatcataaataattattaaatcactaataattttcttatttccatgtttaattatgcggtcattgcaattatccaaccgttgaaaggatttcttcgttgaaatcaattttgagcaacttcaaaaactgatccctcaaaacaaactctaactcctagttggcttcctccaccttgttatacatccacaataccttaaccaaagctatagttttatttcaaaggacctcatcctttctatcaaaattctgaactggttattcatcataggacaaatctgattgtagctataaatcttcataactgaagacatgagattgacctaaaaaataattcatcaacatttatatccgaacaacataaacattgctcacaatgttggagttaaaaccagctagtacactactcgtcaaactttcttgagaatctctaatggccatattaagaaagggctaaatttttctttttattctaaagcgcttaaccccttctattggtgaaatcaataggaatacataacctcctacccaaaattttgtattcttgcattttggatatgcgtaacttttttacatgcttaaggaagcaagcatgacaatttaatacccttttgatacccataacataattagttacttaattttgtatcaaactttataataacatatagattatgcatatgtgcccacaataagattttaatccaacataatgtgcttgttgaatccgattgtctagtggtattgcaagctctccaaatttatgttcatctaccttctacctttgggttgttggtttttaagtgttaaaagtttattttcttgtctaattttcactacaagaaatgagtccttttatcctattttttatgcttaagaaaataaaaagtagaataaaaggtaagctgaaagttttcaccccagttttgtataagacataagggccatatttttaacactaaaataaggaaaaaaaatactctaaaaaaaggttaaacattatttttttattaactagtcaaacacgcccatgatggattttctaccacactttggggcaagggccttgttaggtggtcacgaaaaaaatcaattttccactctttattattttgctagaaccaaaaggggtaaaggagaaactcttttataaacacttctaggtttagggttttatctctttctcacccaagttccctctctttcgtctctctctctctctctct

SEQ ID NO: 14141 - DNA, 2151 bp, Cannabis sativa
tttttcttgaatatcttttgttaaataaaaaagaaataattattaatttgtgtaataggggaatatgaagagaggtgtataccaatagaaatgagtttccgcccaaaccaaaaaactctcttttctcttctcaaaaaagctcgttcctttgttgcttcaacctccaccaccgccgccattgctgctacttcttcttcttcctcctcctcctccgccatcgccatggatgctcccaacactctcaccaccaagctttgcatcatcggaagtggccccgcagcccacactgccgcaatctacgctgctcgtgccgagctcaaccctattctcttcgagggttggatggctaacgacatcgcccccggtggccagctcaccaccacctccgacgtcgagaattttcccggctttccagatggcatccttggaatcgaactcacagaccgattccgtagccaatctctccgattcggcactcaaatcttcaccgaaaccgtctctcgcgttgacttctccgcaactccctttaagatattctccgattccaagaccgttattgccgactccgtcatcgtcgcaaccggcgctgttgccaaaagactcgagttcgccggatcgggtgagggaaaagacggattctggaaccgtgggatttcggcctgcgccgtttgcgacggtgctgccccaatcttccgtaacaagccacttgcggtgattggtggaggagactcggcgatggaggaagctaacttcttgaccaagtatggatcggaggtgtacataatccacaggagggacagcttcagggcttcgaagattatgcagaatcgagctctgagtaaccctaagatcaaagtggtgtggaattctgcggtggtggaggcgtacggagagggagataagaagaataatctgggtgggttgaagatcaagaactcagtgagtggtgaagtgagtgatttgaaggtgtctggactgttctttgcaattgggcatgagcctgccaccaagtttttggatggtcagcttgagctggactcagatgggtacgttgccaccaagccaggtagcactgtgaccagtgtgcgtggagtttttgcagctggtgatgttcaggacaagaagtataggcaggctgttacagctgccgggactggtaacttctttcttcttcttcatttttgttttatgtgaatagatagaaagttgttaatgaagttgtgtattgaattgaattgaacttgttatggatgagatagtacattgtgttttagcaaacaaaacaaagaaggctaataaggatttcggtctgtgaactctgaatttaggaggcatattataatttggagcaaaaatctaaatagccaagaaagaatgcatatttattctcttgttttatgttaagagaagaacaacagaaacagaaacaaagcaaacaaacaagttgtttattgaatttgttgatggagattgagagtgaatagtacatatacatatacatgattgttgatgattgatgagagaattttgtttgggattgggattggaaatgcagggtgcatggcagcattggaagcagagcattacttgcaagagattggatcacagcaggacaagactgactgactagtactacctatgcctagaagcaaattttagtcttcttaagtcactttacacacataattaatgtaatctccattattgttactattatttcttgtattcagaagaagcaatttcaattggattttattttcatcttcaatctatactgtgcttcttattccctttcttactagtttgttactgtatttgaatatattacctttttctttataatattcgtcaaaaccaaactggatgattgccaataatgattattgatactttatctctttagaaaagaaggaaaaagaaatatcaatacattatttaattgtattaaatcaaataaaatcctctatccaataccaatgtttattttggttatgttatagaacttttttgtctgaaagaacctcgagttgaataaatggtatcttatcctattaaaataataaaaataagtggtatgttatcttattcaaataaataaatgtatattatgaagattattccaaccatttagcacaagccgtcttagctcag

SEQ ID NO: 14142 - DNA, 3080 bp, Cannabis sativa
  modified_base (2776)..(2781): a, c, t, g, unknown or other
tttttttttttttttgcttatatacgaaaatacacagagtaactgaaatcacaatttaaatttacattgcaatttattcagtaattatcggaataattcaagccgtaaaaattaaaaaaaataatatatgatatgattttctaaaatataataatagtgagtcaataactaaatgttgactaagaatatcttactttagctcgctcatcctttttttgctaagagatttggatttttttctccatagtttgaattttgaagacaaaaatatatagagaaagagcaaagtgcactcctcctccacccacctcataaatattcattaattttatacactaaataattatctttttttgaaaaaaaaaattattttatttattttgataattaattttttacttttactaaaaagaaaaaattaccttattttgctatcacgacaaaagtaaaaaaaatctttaactgaaaaaagacaaaagtaaaaatatgatttaaatattgtaatataaaaaaaaaaatcttttttttttttaacaaaaaaaaacaaaagatgttggtcgtacggtacttaatacaaattagtacggtcagtgacttttacgacttctttttctttctttaaaattaaaaaataagccttaaaaataaatctaatttaacatcttcccttaaactttattaaaagaataacaaattaaagatttcatataatgagcaatcaattgtatactgacacgtgtcatattgatgaccaaaaacgggattattatgtcagcacttccacgtgctcatttctccgcgtcggccacacgctccttgcactttcggcaagaggttgagttaagttcactcactgtagttccgtttcaatgttttcttctaattaatacttataatattcaaggaaaaataaatatttaattcttataataaacaatcaaagctcgagactttatcatgagcccaccaatcaacgagtgacatgtcatacataacttaggccatggcatcttttttaattttcctttattttctttttcttagttttatcaaatacttaattacctttattaaaatttatattttctgtgagtatatttaatatcattaaaaataattattataccttcaatactagtcaaccaattaaatactatttctgttaattattatttatttttttaaaaaatatttgtttatagttcttatttaatatgctgaatttatcacatggggaggcttttattcctttttatttaatagaattaattttatcatttcagaacaaccaaaccaaatcatcctttttagagaatctgatatatattttctttgttttctaaatcgaaataaggaaggaaagtacaattccaaggttctgggtaagattgcttgcacaaattattcagaaaaaatattcatattggtttttataatagttaatatgtgtaccattagaataatgtgtgtgtgggtttttttaatcaaattttctctttaaaaacaatgatgcattgcatttgccaaaatgcatgtgcaagcaaagttataatatttcattcatctattgttaaatttaattctctcaaaaaaaaaatattgattgattaacacaagttaggtagtatgtgtgtcattgcttcaacttacaatcatgtccactaaatcttaaaggcaataaattaaataattttttggaatttttttattttcactttaaaatattttttttttttgcatttttacggaattctatatagaaattattattgcaactagcggagcaacctaaatcacaaccaaaaattatatagcaacttatatagaaactactagagaaaccactttagaaactcataccgtaaattttaaaaaaaataatatatagaataattctcctaatttttttctgaaaaaaaaaatagagcttagcttatatatccaggcggagcatccttacctatattgtatagatagagtgttttattacagcaattataatgtacttgaaaataattgtgtaattactaattattaaaatagtagttatataacatagtaatctatctatttctatatatatttatataaaatgaaaatataacgcggtgatgtaacaatttaaaattgtttagaagtatccaatttatttttcctttttctaatatttttactatataaataatttttttgtaccaaaaccgtacaaaagtattgctaacaaaatacaatccttataaatctatatatctatcaatatattatattatatatttatagagcattgctaaggagaccctcttttgtactcttttttacactttatttataaattaaggacaaatgttatctctttttattagtgtatttgtacttaataattagacataatattattacattattacgtctatgccattacaataaaattatcttaaatatttacttagagttaaatataaatatatatatatatatatctcaaacaaaattataacaccatttaaaaaaaaaacaagaaaaaaaaacaaaattgtaaagtatgattaatttatttaacaatttaaataatttaaataatcatatgaatagtaattaaaactattttatttatatgtttttttacgatatttttttttattactattattaatttaattcaaaatacatatatcacttatgttttgtttcaatgtaaaaacaaaaaataaattaatgtaactatatattggacactaaataaattaaaaaataaaaaaaaaacaaagaaaagaannnnnngaattgtttgtatttaaatttataataattagtttgacaaaaaaattatttaattagatacagtaaatagatataaatagaaaaatataataactagataaactaaaaaaaaaattgatgtactacacagataaaaatataaaaaaaaaaacataataataatattatgacaattattaaacagtcaattggcaatcttttaattttttttaggaaaaataatataaatagagcacaataaataaattaaaaggataaataaattagaaaattataaaatagagaaaataagattttaa

SEQ ID NO: 14143 - DNA, 17894 bp, Cannabis sativa
atatgggatttcttgatttgtgcattttcaattgatttgtgcaattattactgatgtttttttttctcttttttgccaaggtatgtagagagaatcgcattagtatctttaggcactgataacatcatgtgtagcagcagagaagtcattgaatggatgcagaagatacaagaatggaagccaaagttcttcacactggtccatataccagacaagtatcggcaatatgtttcaaagttcattagacgagtaattatcgctcgcatggctgaatctcctgatcttgcaggtgcttaccattcaaagttaagagaagcctatgagacagatgataaaatgaaaaaaccagacattgcatctcaggacaaggaacatctaattagacttcttgatgatattgaagcacagttgaatgaaacagcatttttagcaggagaagaatttaccatggcggatgtgatgcttattccagtgctcgctcgcctagtgctcttgaatttggaggaagagtacatcggaagcaggccaaacattgctgagtattggactttggttcagcaaaggcctagttacaagaaggtaattgggaaatatttcaatggatggaagaagtacatgactttgatgaaaacatggggctttgttcgtctcagaactcttgtgaagagattttgatgcaagtgtacacactacacacacatatatttaaatctttgaggttgaataaagtcaaaagaaaaggagctaactttatgtacgttttggtctttctttctgcattttcttcttcattttacttggagaagatgcattgagtggaaatatatcttgaatattgatccacaatattaaattaaattacaaagattagcatttgtacacaattgcttatgctctccaactgaagtgtgtgagcttttaccagtgcaaaattatacttgtgaattacaagaattctcttttggattggtacctttcagcgttggcatgaaggtggtgacataacgggatgactttgttggcgccgatgcagtcgtccttcccttgtgagggcagtgtctgtgttgttggctcttctcagatccgttgttgaggttgtgcttgacatgggattcctgtgttttggttgttcaggtctctttggtagtggtgttctcaggtcggatccaagggtgctcgggtcgtctctcgctgatggttggtggcattatctaagtctcttcctgatttggcttggtttttttctccttttgttttgttttattttctcaataatgatattgttatgggtttgtccacctttagtgtggagttttctactgttaatctttcataatatggtgtttggtttactttatcacaattagttcttaacattgtttttattgactcattcaggcaacaaaagttgattacaagattttttatgatccgtattaaagttgtgtaaattgcagcattgagtatattatttgtatgttgtatgacccttttacttcatcaatgaaaatgaccttttcaacaaaacataaaataaaatcttcttgtctactcagtacatagatataaatgacagaataatgatacttgaactcaaaatatgcaggcaagcttcacagaaccattctgtaatataggtgtactgtaagtacatgtcatcgctcattataacacccataaataaccctacatgcattagttggaaactcttgacactgaaaaatgaaaatggggcaaacagataaagaactgaaaacttggccaattattagcttatcattaagaaaagagaaaaatgatgtgtcattactcattagttacttcagctgatacattaaataattaaataaataagaaagcctgcattctaggcaacaagatggaccaataatattccatttcagagtcaccgtatgggaggagaagcctatttttttgagtgttggtattttccatatcaattcaatatcggatgcagttttcattcaaaatgaaacccacaagaaaacagaaaacagaaagaattggaaatacatgtaatgaaagaaaggaaacaagtaaatcaatgttgactgtggttctctggatgctgatgacaattattaccagctttctccacaccacagcctaaactttctgaacaatatgtacttctaagctcgcttgttatgtctcctatacttacgcagtttgtaacaccttttgagcttacggtgtcattccttttcaagtggcccggggatccgtgttttatgctattccatttctgctgtttaaaatatcttcttcccaaatcttgtgaccattctctacctcgtttgaatgtatgttgattgtctgtacacaaaatgtccgcacctgataggctaccagtagtgctaggagtgctatcgttcgtgtgagtcggaggaagctcaccgtcctgttgcttttccgcaggttgattaatcgacagacagtgtccattctcagaaggcgaagagtctttcttaccacgaggaagtgggggcaatggtggaaacggatgaaaaggcatgccaggagcaacaacccagcttcccacagtttcaggtggaccaaattgctgtataatggacagaggaactccgtatgaaacaggtgagcgagagagaaatttctcctgtggatgcccaacagcagtgtcgggaggacactgcaaattacaaaccattgagggaccaagtgacagtcccatagtaggcgtaatgggagacgagaaccctggtggaacatcatccccggtattctgttttacatcatgagcaatatcgactttatgaagctgatatcgatcatttgtgcagccagaaacatctttgtcctctgtgctcgtctggggtaatgagctagactctggccctttggactccacattcagttccttgtgctgaagagaactagaatcttgatttgtcactactggatactcccatgatacctgatcccatcggcttttacgcttgcgagttcttgtcccactgatggggcaaacacctgtatgtgatgcagatgatccctcctgaatgcctgcactcaccaaggttgaagcaacgaccggttgcttgacacaatcaaatgcttctgaaggtctcccggcatgatcagaccaatcattctgtgagacagaaaacctgttgcagtcggaccaatcgttctgtgagacagaaaatctggaactcctagaatgttcggtcttgttttcgtccctgtctatatgagtaacttttctacctagttttctaagccacctgtcacggaaattccgtgcaatctgatggacctgtatggacagcagatttaactgattaaactttttaaaaaaatggagtcatataaacgagttgttacatgtcaggaagcaataagatgctagaaaactgtcaagtccaaaatagggataggaaaggaaaaaaaaaaagagggggggaacaaattcaataaattttcaagacaacgaaggggtagttggcttgagatataaatacctgtctatcaccgtgctctgtcagtgacagaattgactccgtaaaactgcatgcaaaaaacatatttatcaagaaacatttgaaaactagataacaagtgatttatttattttaaaataggaaacaaaagataataactatttaggaaacaaaggacatcacagtttaagattttccagctgcctgaaaaccaatatacaagaaaaatactatttttgtccactcgattgtacaaatcctacaagagttaaaaagaaaatgctaaattttgatgaacctttatattttaattaaggtgcaggaacaagggaaaaattggttttttaatagagatgtaaaacaagtggttattattgacaggttaagtctggtattcaattatattcttttttcttcctcatttttttttccaaaatttcctaatgaacctctaaatgatgaggaaattctaattgttcaaactatccctcaaagtcagcagagaaacaatgtaagcatgagaagaagaactaatttttttttctaacctctccatttgagggcaaggaggatctttgctgatatgtctacagttaataatctccctgactgccaaatactccaggacctgcaggaataataagttaggagcatgctgctgcattgttgaattcatgaagctttactgtatggtaaattgtctaccaaaacctcatgacaatgtattagcgtcaaaatcatttttggataaacatgactcgttctttaatgccccaagtaaaaatttgtcttttcttttgttttgtcaattaaagcaaaatatgggtggatggggctgaaatactttacatagaaagaaaggatcattcaatcaagtaaggcttaaatttgcacgtaccttgagaagcttccgaagaataggtatctttttaaagtctgctttgtactgcttcattatattgtgtagcattctcaaacctaaagagaaagtgacattgattaactgcagcaaactgggaatggcatagtaaattctctaatatacttaccattattgttgattatatcagtcaacaccagccttgattttgttttcaaaagagcatcaagaatcattgaaagatctcgatttctgaaaagagaaggtataaaaaataaaaagtcatccaccaaaagccattttgttcaaaaactttcagcattctacatgaccgacaattcaattcaatagaggatattagaatgatgataaaacaaagctgacctctgaataggttcaccattgacactatcacctgatttggcagtatgatataaaagctttaagtagaattttggggcatcctgtcagaaagcaacatgaattgcaaatatgaactccaacattcttatgaaaaaaaaaatatgctgactcttgtgatagtgcactcagcttatttcataatgcagcaaagaaaccaaaattaaaatgctaagccacacagaaatatttgtccacatgcattgtgtcctaaatacttactttccgcttacttattcccccataatcatcaagcaaatcattaagtttctcctcaactgcagagcattaaaggtcattgacacttatttgacacaataaaatgtcttcctctaaatacacataaaaagacattacttaccttcatcgaaacggctagcaaaagagccttctatagcttttttgggcttcatatgaagcacttgagatttttttgttaacatctgaactttgctagcatttggggaattacttttaacctttcctttcttaaggacattggatgagtgaggagctttcatattaggatgagctttagaagaaagcagcctatcatcagcaatgcaaaacttggaccgcctattagcatcaacaccgtcatgtaaagatttgttgagcacctcaacaggtgaagttcgattgaatctatgagaagagcttgacgatttttcaagagcagatggaatgagtttttgagtaacatcttctctttgttgggaaatttctaaagcttcaccagaaagagacatttttcccttcaagtccaactctaatgcatcatctacaagggaaacaacagaagcagagtaattcatggagtcctcttttcctgtagaaatctctaatttcccaggatcagtagtgtatttatcccattcatctcttttgtccagatcaccctcagaaactggtgctatgacatcattacaggaactggctttgtgcattaaattggcatcgccatcttcaggaagcataagagtttctggaaagtcctcatctgaaccactttgactaccatcctccttattaagaggatcaccaccaatataaccccggcattggggagagccacaataacactttttggcagcagccccaaataccctgacatagttgtagtcaaatgtcacttcttcaccctgacacaaacacccaaaaagaaaattgcaatgacaattttgtctgaaagagacagatagataaagatagaaaaaggaaatagaataacgaaaccacaggtaatggctcgagttgaaaatgcatgcaacaaactagtggtaaggaccaacttacatgacctatgtcaacaatctctcttctattacacgtgtgtgtgtgtgtgcgtgaacgtgtcataagtgaaatcagaaaaaatacaacctacagtagagtaaacaacaacagctcatttaatgtcttctcctttggaagttcaaattcatcaattaagcctattcccatcacctttacctttacctaataattagtagaaaggaatgggcttacaccagttcaacttaaatcaaattattgaaagaaaataaatccttttcaagtgattcttctcggccatccaaactttgaaagcatgagagtaaaaaataagcagtcacaacaaaacggtaattatggccttagcaaaaaggtctaaacaaataaagtaatagagcaaaatgcaatttcaccttctttatatctctcaaggcaaagagtcctatacaaatctctccattcaccatccactgcagcaaaagtttaaaagttagagtagaacagaaagaagttacaaacagaaaaattgcaggctttccttccagagttgtgccctaaacatcctcaagatacaggttactctctttaaggtcatagatgcatctccaacttttaaagcagcccgacttagcaagtcaggccacaaaattcacagatgcatctccaaggttggtatataaaattgttcactccaaatcaaagataaataaataaatgtggaaaagcaaatgtcttctccaaaaataaaagatacatggcaaaagggaccataacatagcaaaatcaagagttggaagtaaacataacaagagagagcagtcaagccaatcctcaagaatgttcaactggatgtaagctgaagaattcagatccaaatggtcaaatccaaactcctaaaccccatccctcccctttcccaaaggattcaaattggaaaaacagactcccccttttcaccttaatagatagaaaattcaaaacccaaaaaaatcagattcaccttttctgtctgacaatttggatcacagctatggttaataaaccgtcctttatttccttttacacatgcatctatgacctgaaatgaaaggtagaagtgaatcaataagaacataatttaatatcattacagataataataaaaaaaaaaaaaagaggttttaatcagtctatttatttatttaaagttaggatgcgaaatactatagtacttgagattcaaatagctagtgcttgggttgggccaaaaatattactgagttggagtatgtctgtttttgtaaattatcctactctacagattcagagaaagactattccaaaggctgcaagtacaattggcttacaataactctaaagattaaaccaccaaggaagatgtcaaaaccaacatgttgtaaatccagcttatattccagaagatacatataatgaggttcaactggaaatgaagaatcataattcctaatatgtactaaacaaaaacgccaaaaatgctattaaatctacccatgagatcatgagttcataacatataattccgatagctcccaaaaatcttttgcattccaagtgctcatcaaggccataatgggaaaccatgtcatactcaccccctagctttgatgattattttccaatgtgatatatatactgtgtcatacttatattaacacacacacacaaacaaaatatatttgaagggaacattaagagcttgcacacactcaagggtttgctgacaaaatatgagaaaaggtgatcatgcatcaataagatatagatgcctatatactaacctcattgcaattaagtgtcataaagtagaaatgtttatgacccttcagagcatactctttctgccgtgacacataagattgcatatcaagcacctgattggagatacagtaattagttaggcaggaaagaataaactaacaataacgcggttgtgaatgtgcatttgcatagttagtaaacacttgcactcagaaaaaaggatagcaagttcaagtaactttaaactttaatagtgcaccaattagaaattgccgcactccaatttactcaaaaatagacagtttcattcccacaaaccactaccagattaactagcaagtctcatgtatctgtccaaaaaggcgacacaaaatgccagcagaaaatcaaacacaatttcacagcatacacccagtttatcaaaaaaaaaaaaaaaaactttctagaatactttattttgtattaactgctgttcatgccatttgcacgaaaaaggtatagttctatgcctaacttgttgggacttatagtctgtataatgtgcatacttctttatcagatccatacagtaactcatggaacccctgccaacagttccttctagtttgaaaagaaaaaaataattgtaagccctgaaaccatgcgtcatttaacttctacaataatgatttttatgaacacaaatttattttctcatgttagaaaaaacatagaccaatgacaacatgttgggaactagccaaaaaaacaaatacttcatgacttaacaccaatttacatttgaaatacttcacaagttaatattacctccccaacatattcaataagaaaatgtcctttggatatatcctcaagcaacttaagcccataaccttttttcccacaacgaaacttctccagtttggcatacttgcgtttctgaaactgcaaggaaagcagaccaacagattaagaaaaaacaggttcagaaaagaccgtaacaatagctgcaagtccaagatacctgctgatttgaacaaaggtctcggcatggacaggttccttgcatacattcaatgtttagcactcgattcaggcaatcatctccgcaacccaaccggccatctgaaggtggcttgcattggcagatcatcatctgatagaaaacagttaagatcgtcaaacttcaacaaatctagcgtcttctatatgacaataagataagacttcacaaattaaagtacttgggaagcatttaaaaagctaaagaggcaacagctacaatacaacatgtccccaccaccaactatatatatatatatattaacatgaacaatgtacacaagcacaaatgacaaaatatttctacaaaagcttccaatccaacaaacatactcaccaaaacaatcagcacgtgtaaaatctctattacagattttgcagtcaataaaatatgattttttgaaaaaaataaaataatccacttccggcagtagtgaagtactaaaacttgttattttctttggtaaagcaataccgttggttctcaaagtaacgtcatttaggtttacaatgagttaatatgttttcaacacaagaataatacaacattatgcagatatcaaacttcttagagacagccaagaatatgtagctcatatacttctatgctggacagttgcttggagatttaaaacttcatacaattttgtctctagggaggtgcaagaaaaaaggcaaggatattggtcatctgctttgggagtgtgactttgctcaaacgtatggtccaaattgctcactgaatttgagatccagtgtgcatgcctagaaaatgtgttcatgtgttaaagagtgtaaattgaaaggggctaggaggatctctattgtggacagctaccactctttctattttttggggtgtttggctggagaggaacagcagaatttttaaagataatgaggtttcagcataagggctctgggagaatgttaaattctgggtagtaacctgggttgacaaagctaaagactttgagggtctacctttctcaatcttagtaaagactttgagggtctacctttctcaatcttagtaaagactttgagggtctatcttttttcgatcttagaaaaggctttgagggtctatcttttcttaatcttagtaaggaatgggcaacttttctgtaataagatagactcagcccttttattattgttttactatgttatgttttctgtttcaagtatagtttagcttactgagattgtaccttgatctccatacaaagtttacaaaagaagtttcttttcaagaaagaaaaaaataaacttcatacaattttgtcgagaggattgaacaccaatgttatttcatcattttttttatgtctcgggtatttttcagagcaagacacaaacatatgtatgcagaaacaaaaaacataaattcaaaagcatatatcaagttgtcctattgctatatattaaaattcaatttgtcagacacctggttttcatcacaataatttgcatctgcatataaaatctccaataaaccccaaggatacccagcatattactaacaaaagctacaaatacagctaaaaatagaatactgaatagatttgggcaaaaataaaatccttttcagtacagacctcatcaactgtctgtgttttccgactacggtgaagatattgattagtcctaatactgacacatgcagcagtcttttttggatctgcgacaaatgagaggaagtgtcacaacaaatacgatgctagtgtttctgtaaaaacatacacatgtatgcaaatctctgcctgcaataaatgaagacaaagcatacctcttggacgcttgcattctaagacctcatgatttactagggtaccagagacatcttcttcccctgaggcctctgataattccaattctgcgttaatatctgcatttgacttctcttgagggattgagcaatcagcaaaggttttatccatgttgtccttacatgtccttcaagaaaattagttgaatgtatcaaaaaataaaaaataatgaaaataaaaaatgaagtacataaagcaaatgacaataaaaaaatgagctaccattttaaagaaaagcaaacagttggcacacattaaggacaattcaccaaataagaacaagtataaggaagaaaagacaaaaagctaatgacaatatataaattaactactaaactgtggtattcatgtcaaacagtaggctttgatctttaatactattacagaaaccaaagagaacaaaactgcataaaaaaaattgcatcgtatggccatcaggttttatataattattatagaacaatctgatttaccagacataaaactaggtcaaatttctcttaaaattataatgagatccagaaattaaatttggttaagcagctaagccaaaaaacataaataaatccgtatgcattggtctctgatccctgcaaaaaatattttctcatgaaaatttgacaactctcaattttaatcaaagcaaatcataacaaacaaacccaatatgcatttattctgtatgtcccagagtttctgtaaaactaacatgaatccttgaaatgggtaaacaagaattaataatggatgtaccatgtgcactttatttcttctatagtatctgcatcttcagccggtatgcgccgccatttatgacaattatcacagctcacccaagcattacgtaaaggaagatactgctccccagtaaaacctggtaacttgttcgccttagtttctaagccaggcacattttcaccagagttggcattcatttttccatctccgacatggacaccttaatcatcaattagtataaaatcagaatcaagcttgcattgcacagatctagaaaagaaagcactaacagaacagtatatattatttacccatgcacaaaaattaaacaagtattacctgtttctggttgactttcctctttgcaagtaacgttaccacaaacagacttctctttggtattcttcttaccaacagaccttcgttgggccttctggcttacattgaaacttttaattcctgaatcagagtcctggaacttgcctttgcgaattttgtgacctttagtcttagcatcaagaatagaacttttgccattctgtaattttgacaaatcagcaccagtatcttgattgctgggtatttcaacttttgtaccactttcaacttggaacgtctcagcaaaaacagtagcagcagcagtctctgacaagtgcaataaatccatatcacttgctgaattgcttgaagcatttgctctgactgatgaaataagattctcactagagctaacgccattattactattttgttttcgcacgtatagctttaatgatttagatttgaccattcttgacggattaagtgatttttcttcttcaatattattacctaaagaaagcttatttttcttcttcgcattcttattgctggtgagatctccaggagtggcaagatctttcggagaagtaactgcaccatggaagtcatcatgacgtttaaaatcaacacgagcatcaggggttaaattaataacttcggaatcgggtgaagttccaggatctttgcacctgtcatccgcagcccctcctgatgattcaaccatatggggggaaacgccaaaataatctcccccttttttagatgacatttctgagaccacattgctctccaagtcatttaaaaaatcacttggattattgcttaaacacttaaactgtgtggcaatctcatcttttctccagtcatcctcaacatcgttagctacttttgctgattcaaagtacaattcagcaccaatatcacaaccattggcagtacatgaggctgaagtatcaacaacctcgggaaccatggcagtcatagagctttgacattcatctttccccattttaaccttcaaacggatattagtatttaaagcaccagattttctcttggaaccttgtgatcttattgtagcccctttctttttttgctttccacttttctttccaccatttgctttcagtgatccttgattaatgagcttgacttgattactattgtcaaagagttgcgtaacgtttcccaatgttccccaagcagatgaacgagctgatttggacagacaacttctcttcttccttccctggattgcaattttaatacatctagatggagctggtactttggttttgccttttctaggggtctttgttgtcgaagtttttctgattgatccaccttttctgctattccttcgagaagttgatgataccacgtcaaaacttttggtttctgaaacataatcaattttctcatcatcttttcctggataatctgtttgactatacctctctactggactgctagagttgatgggaccatacatgtgactgccaagttggtctggcacatccaaccttccagaagagtcatcattaacaacacccaggggttgagaagattggaaagaaccagatttttcaagtacacacttggacggcatgaaggatgagttttcattgagaatgcctgcaatttcttcattaggcaccatctttcgcccaacaacttttgtatctaaagttacatcactttcttcttcaacaaactccataacctgtttagtagggggagtatcaacactcccgtcactaatctgctcacactgttggacaaaaatacttggtgactcattcttgtatatactgtccgtacttgtggaaagagacacatggttgctttccatttgaacagcttcagttatactactatctgccaaaatacaactgacgcaattattttgatccttcttcaagtcacaattactcacttcttcacctgaacatgatgcttctgaaaatattccaccccgctgtaagggtgaaaccatgttacacgtgtcatcttctgacccaacagaatcgacaattttaacgcttaaattttccaagtctgaaacagaaacactctcaaagtcctccttttgtttgtgactgttacccagcacaacattctggggtagcgattctaaactttcacaaccatgtaattgagattcctgctcgcacagatcactgttcacctcagctacatcattacctttatcttcaatcacctccacagaaagatatttgtcatttttatcaatggtctgctcaacctgcagatcacagtttattggcaaactagtaacggatataactcccgagtgtactaaatttcccaagacatcgtcaccttgtgcactgctttccttcaaacattccctacccctttgattagtacaaacaccaatttcactgagattgtcgttcgagcaaaccctgctgtatccagggtcattttctgaagaattatctaatgccaaaacacatgcattttcaatatccccagccaatgtaccattaacagcacacacctgtgtagtatcaacctgctgatcacagtttattgacaaaccactaacagatatagtgtccaatgatacctgacactcccctcctagatttcccaggccatcttcaatgtgtggcttgttttcgttgaagtattccccacccgtttccgtggaacaaacatcagcatcactgttactctcatttgtaaaagccttactgtccccatagtcatttttcgaagtattctccaatggaaaagcatctttattttgattatgctctgccaacgtatctccattaacaataagctcccgtgtggtatcaacctgctgatctctgctaagttttagcgggataccagggacttcaatgggtgtctcacagtcccccacaagatttcccaagccatcttcaccctgtggcttgtttacctttgagcactcccgaccctgttccaaagtacaaacatctacgccaatgtcattcttgttcaaacaacctctatcatctccagagctatttttagacaaattttccaatggcatttcttttgtgctatcagtcttgttcaaacaacctctatcatctccagagttatttttagacaaattttccaatggcattacttttgtactatcagtctccccttccaacatatctcctttaacagtacacacctctgtaattaactggtgtgaaagcttcgaacaagagtgctgatcggaaacagattgcactagaatctccgagcacaaattatgcccggaaagtgacacgcaaacgggttcttcaactataaccgaattatcacacaaacccatttcattgaaaccagtttttcatcacaatctaccgcaacccattactgaaaaaacatagcaaaagacgtcaaaacgaactcagtgtcagtttagattcagacccaatacaatgcctatcccaatcaccaccaaatgaaatttaaaccctaatttagtcttcaactcccaatctattaaaaacaaatagtagtaaaaaaaaaatagatagatagattgaacgaacctgcagcggctgtcagaataatacgtgtatagaaagccctaaaaccacattcacccaacttccttctgcagaagtacaaaccctaacttgggaatcaacaagggaatgcaggtacatacatcttcgtataatacagacaaaacaatgtctacacaaggaaacaatcaatatttaattactttttctaggaaagggggtagaaagatgaacagagaaagcgagagtaattataaaggaaaaaaagaaagagctaataaagaagataaaaaagaaaccaagaatggagagagagaagatacctgggaagaaagaagagattgacggacgacgcaactggagagagagagaagtttatttatggtttcctttcctttttcgatttttatcttttattttctgtaattaatatatttttataaaaacaaaattatttatttattttccgtgtaatagagagacaggagaatcggttggtggagtgtatgagtctatggaaggaagcggtttaagagagtgaaattaccaaaataactataaaaataaataacaataacacaatctgatgattgatttgccgtggattgcctccacgacgcaccgttttgaccctacttctctccccactaccttccacgcacaacccaaaaaaaaattgttaattcttttcttcagggtattttggtaatttctgttctctattatttgaccagaagtatttcaaagtctaactaggctctgtttttgagttttttcttttttatatatatttaaatgaaatgtactttgttgtcttttgtgttggtttagttggagaaaagaaaatatttgaagaaatggataatatgtatgagacttattttttcctttattagatttttttttttggacaaaacaaaacaacccgaacagctcatctatctaaagtagtatcatttttatttgatgaactattggtactttaaagaaaaaaaaaaaactatgcgtactttacccaattttactaactctcaactcacacgagattggaatgtataaaaatctgtaattattttacgtttgatgtttttattttaggattgtgttattcttttcgaatatgcatgcatacaatcttaaatttgagatgtataacaataaattttgagatacataagaggccatgataaagtttttctttgataattatattttgtattctacacactccaaattttaatttttacttattacaaacatgtaaaacttgaataaaaagatacgccaaaaaaatcagcttgacatccgaatgaataattgtgtcaccgaagttttaatcaaattttaacgcaaactatcgcaaaactttgttagtaattgttttaccgttgttggccaaaatttatggtttcgtgtgtgatagaatctcaaaaccatagctagtcatcattttggccaaaaaatattgttttttcacattgcaaaaccatagtttaaacattgttggtgattgttttactatcgtttttggtcaaaaatatgttttcgcatcgcaaagttcaaatttttcaaattttgataggtttagattttaaaaaaatgctagcaaagtcaataaagtatacatatgtgtttaaaccccttaaaatagtactttgagtgaatattattggagttttaagttttagattgattttgattattaaataacaataataatgatgaattggtgcttcaatggtgatagaggtggcaacatccatggtaaagatgatattaacgttgatgacatcacaattgaagcaaccatatttttttaattttacgtcaaatttttatattacacacatgttaacgcagattttcgttaaccaaatttgagcctcacgattatgattcaacacagaaataataaaagctatagaaaaataaaatatgaacaccgagttttttacatggttttgcagttaaaattctgcatagtccacgaatcaatcttatttagatttctaagagtttctttcgtccccccttttgatcttatctgccactatttataattccatagtggcaatgaattgcaaagctgaccaaaatacatttactgccattatccttaaaattatgagatttgattacaaatcaagccaaataaatgaggtttttacatagctgtaaatatcccgtctttattgggccgagatgaacgcataattaaagaaatacggtaagtcgtatctcatagggatgcctcgtctaggagggcgccaagatcactttgatagcaagcagttgcttgtcattttggcttctcgagactaatattgtcttaactctgatagttatactctctggggtggagaggatcttcctcgcatgcaaaacatcttttagcgagataaacgcctcgctatctgttatcttggctcgtcatactaactatactcagtttgtatgtcgtataatgtacgctaatcatttttagcgttgttgttatctctttcacgcagcgaggttgaggcctcgtcatgaacgtatgcacccacatggtttctcgtcaatacataaattagcagttcgtatgtttctatctcgcaga

SEQ ID NO: 14144 - DNA, 6495 bp, Cannabis sativa
  modified_base (5751)..(5752): a, c, t, g, unknown or other
tagcttctacacgcataaggcatcacgatccattatcctatcacccacgaaaataataatgcaaccgcaaaatttgtttggatgtgtctactttttactactatattctctattaccgaggcccttagtagattccaaaacttctctaaaagcaattttgtttcttcttatcattttacatattatttattttaattaatccccaaacttattaactcactacatatatagtactatttgtttcttctctctcaatcttcttattcttattcttattcatattcttcttcttcttcctccaaactcataaactaaaacgtctttattccttttcaaaagtttcccctcagctccttccattttccatctccgttatacatttatcgggaattaagcatgcggacgtagtcggtcaatgtacgacaaataactctccctccatttcctacctataaatacctgaaatgaacacaattctgctcagtattaattgatcagtttcaggtaagaaaattcatttctctctctcttatttaatttctttcatttgttgtcagatatttcattatatttttactttccattccagcaaaatctactattttgttttttgtttctgtttattctttctactaatttttgattaaagtgggcagctccaattttccttttattagtccatgattacacagtgaaaagttttatctttatttgtttacttattttgtagtcttttcgtttgaaagaaaaaaatatgtcttttactttatttattttctttttcaactgttttttttttttaaaaaaaaattatcattgcttagtaaacaaaattaacatctatcagatgcgattaaggattattttgagtaacttcaaagcatcctttgctttcttttctaatccacatccccccactaacaaaattgacgttgtaacctcaccttaactctctcatctcctttttaaatattttcgcattgattaataattttagatttatattaattaattaattaattgatgtaattaataaaaggaaaacaataattcttgaaacgttttgtttgttttcagctgttaccagatatggcggtgtaacgcgaattgggaatattataaaatgttgttgtaaggcaaggcattttgagatctttattatattgttgttttaccattttaaccctcctaaatggctgtactcccaattatgtccttcaacttcatactattactactatctactcttttgttcttcccgccattttacctgtctctaacggtcgagactcaggcccttcttcaattcaaaaaccagctcaaagaccctctgaaccaccttgattcatggaaagactatgagaatccatgtcgattcgtaggggttacttgtgatcctgtttcaaggaaagtcgctgagatttctcttgacaacaagtccctatatggggagatttcaccttctatatctctcctgaagagcttgactaaactccatttgccttgtaatcatatttctggaaagcttcctacccagctgactaattgtagcaatctcagagtgttgaatctcactgctaattttatagcaggaaaaatcccagatctttccaggcttcagaagttggagattcttgatctctctaagaactatttctctggctcatttcctgcttgggtggggaatttgactagcctggtgtcacttggtctgggcgaaaacgtgtatgatgaaggagagattcctgaaagtattggcaatttgaagaaattgaaatggttatatctagcctattgccggctgaaaggggagatccctgaaattctgtacgagcttgggaaattgcagactttggatctttcgagaaataagatctctggaaggctgtccaggtcgatttctaaactagaaaatttaaataagattgagctttttgctaatcacttgagtggagaaataccaccagagcttgctaaactcactcttctacatgagtttgatatctctgccaattacttccatgggacattgcctcaagagattggaaatctaaagaacttaggggtattccaagtataccaaaataacttctctggagagttccctgccggttttggagatatgccacagcttttcgccttgtctatctatgaaaaccagttctcgggtgatttcccagccaacctcggtcgattctcagcgttggaaagcattgacatatctgagaatcagttttcaggtgcattcccaaggtttctgtgtgagaaaagaaaacttaggttcttacttgcagtggagaataacttttctggggactttccagattcttatggtaattgtaaaacccttgagaggctaagaatcaataacaaccgtttgtctgggaagatcccagatgagatttgggaacttccatttgcaaaaatgattgattttagtgataatgacttcagcggggggatatccccaagaataggtttctctaccaacttgaatcagttgttattagggaacaatagcttttctggcaatcttccatcagaacttggcaagttgacaatcttgtccaagctctacttaagtaacaataatttctctggacaaattccttcagaaatcggagggctgaagcaactttcatctttgcatcttcaagaaaattctttaactggtcccatacctcctcaactgagctactgcagcaggatagtggacttgaatcttgctacaaatgcattgactggtaatatccctgttgagctttctcagatgagctctctaaactccctaaacctttctgggaataaacttaccggaatgattccacaagatattggtaaagtgaagttcagttctttagatttgtctgaaaaccagttctttggaccagtaccatcagatcttctgaccatgggtgacaatgctttccaaggaaataaagggctatgcatagatcaaaacttaagggcaaattctgatatgataatttgtggtagaaatcgaagccaaagaagcctacttcaaagcaaactggtcctgttttgcgttatagcatctgtgttggttgccattttagctggtttactcttggtgagttacaagaacttcatgcatggtgatgctgacatagacagtaacatagaagatgggaaagaaacagaatcaaaatggaaactagcgtctttcaatcaattggaattggaagctgaggaaatatgtgatttggaagaacacaatctgattggaagtggcagcacagggaaagtctatcgcctagatctgaggaaaaatggaggcacagtggctgtgaagcaactatggaaaggagatgctctgaaagttttggcagctgaaatggagatcttaggtaagataaggcatatcaatatactaaagctttatgcatgtttagtgaaaggcggatctagtttcctggtgtttgaatacatggcaaagggtaatctgcttcaagcacttcaccgcgagatcaaatgtggacagccggaattggattggtatcaaagatacaaaatttctctaggagctgcaagggggattgcttatttgcaccatgattgttcaccaccaattatacatcgagatataaaatcaaccaacattctactcaatgacaattatgagccaaaagttgctgattttggtgtggcaaagattgcagcccaaaagggttctgattttagctcttttgctggtactcatggctacattgcacctggtgagtttcaatattatgatgtcttgtgcttaacaaaattacaaatatttttagatgcattctattctattctgctaactgcttagtctcattcatgtatatgctgctgtttcagagctggcatatactcttaaagtgactgaaaagtgcgacgtgtatagctttggtgttgtgcttctagaactagtaacaggtagaaggcctatagaagaagagtatggagaaggaaaagatattgtttattgggtttcaactcatctcaacaatcgtgaagatgtgatcaagattctcgacaagaaagttgcatttgaagtacttgttcaagatgacatgatcaaggtcttgaaggttgctatggcttgcacaaaaaagcttccttctctgcgccccaccatgagagaggttgtgaagatgctagtggatgctgagtcttgcactcccaagctgcttccacaccagaattctgaaacaaactatggtaatactgatagtaagatgttttattagacacttttacttcttttttttttagcaatgtctcaacaggtgtgagaaatcttacacaagtttttaattaagagatactatgggttttgaattttcaatcagaaaggcttataacaattctgccatcttgatagactatcatggcaagtgtttcgccattgcatgatgataatgttttgtaatttttagaaacaaaaaatgtgacatcggaatggatcttctagttattatctatgaaactatgttttttttttttcacttctagatcaatgactactgtgaaatccttttcattttcagaaatttaatccagcaatagagcaatagaatggatgatgataaaaaataaatgatgtgattacgatgttttggaattgaggtgtttaattatatggtactgattattttgagaaataagttttgagttgttttattggtgtggtggccaactgaaagtttatgtgaaattagttagtcgtgactaaatcctaaagccttagaaaaattatataaatataatttgaattttcaataagctaatatttgaccaaacttatattcaaattgacgaaatatatcaaatcattgcttactcgagtcgggtattagttctgatttttttttttgggttggttttttacaaaaatgttgaatttttagtaaaaattcaaatcggcagaaattacatttatattgttttcttttttttttcttttatactgtaaatactaaaaaaaacaaggtctctatctttcacgcccacaaacagaattactacaaaaatatcagtacagtcggaaaacaattattaatttcgacgagattgagcaaaaacagtaaaattgacgtcaaatcaaaccaaacaaaagaaaaaaaggattaacaaaaactaacaattttttacacagtctcaacactagatgcaatagtggctatatttgtaagccaaatcttgaaaaataagaataaaagaactactaatataaaactaaaacaacacaaaaatgaatgtaaaataatgaaccaaatataaccacttaaaaaaaacataaaagaactacacaataaaaattatcaaaaattagtatatactgtaataaattaaataataaaaaagtaaaaaaaaatacacgatactaaaattaaataaaattagaaaaaatattatggggtataattttttttcctcaagggtgctagtgtttgggtacatattaattatgaagtttcttagttgcaacttgcaagtcaatcatttgtcaataaatcgttcttattcatttcatatttattaattatagtaaaagatttgttgctgacttttctttaatcatgcttcaatgcatggggcatatagattaaatgagaaatgttaattataacttcttattataattttttagtcaacttctatgttcgaaattacgtgttgaaatatttttttataaatttttttcatagtacgtgatattcgttatagttacagtattatctctgtaaatttttnnaaaattctgaatagtttacagtatcgaaaacataatgtgtttttgggcgtgaagattgattaagagattgtaacaggagattgacggtaacactcctctcaattttgtatgtgaaggtttttgttattgttgttctattattattattatatataaatatatattttacaaaatagactcttttgtgcattttttatataagtatataaataaatattatatatatagatataaatatatggtagaccactcatattaaggtaaaatatagaagaaaaaaaggtaacgttttgaaaataatttcattaaataagttaaaaatatattttaattatttttttattttttgaattttactttttatataaaaatatatttaaaaatataatatttaattgatatagaaaaaaaataaaataattgatgtatgatgcattataatttatgctaaaataaaaaataaaaaataatagaatataaaagttatacttatagcttcttgagtagttaggaatccggacttaaaaaaaaaaaaccataaaatttaagaatgtttttcttttttatttttttttaaattttttaccaaaacatttccaaaagtgttgatttaattcttaaagcaaaaaaaacaatctaaaagaagcttaaccaagcatagctttagaacttaaattatgcagagtaaaagtgccacaaattcaactactactctgcaacagttaattttacagcattttttc

SEQ ID NO: 14145 - DNA, 7560 bp, Cannabis sativa
  modified_base (2827)..(2829): a, c, t, g, unknown or other
tttttaaaaatatcatttttgttgtggatgcataacaaaaagtaaaaaattgaaaaataccaccatttgcattttgtattaattttgtctttgaagttgtacttggaaagctgcaaattttccaataggtacaaacgtttgttgcgttcaactttcactaatgtgaaaatttctgataactcttcagcttataacgtagacatatcacaagtcaaagtttgctcatgcaattaaatgaaaataagaactgggttttcctacaatatgtgttaattatgcaaacttagcttaaccttaggggttttatatatatccgtgaatgaatcatgatttttgttaattatgcaaacttagcttaaccttaggggttttacatgtatcaatgtatatttaaccaaagagtttgattatggtcaatatttcactcgaaatcgaacaatatttgaaagaaaacagacttgtgtaacaaaaaagttactatttttcttctcaattgttgattctagaactgtgacaaggtgaaataacttatgtacatcttttattatcaatgaagaaagagtccaatgagcatttgtttatttctaaaatggctttgcttgaattgaactagcttctctaaactaaaccacttaaaatttgagacattgttataatctccgaacaacatttaataataaaaaaaagtactggtctatgactataaaagctagaaactcaaattttaaatcaaataaacaattctatcttttgttccttcagacaacttcttctcctgatttttttgttgtgtcatcagtggccacaacagaaagttcttcatttctagtctttgtagtttcgattttcacaattatttgttcatctgttgttgttgttgttgttggtaaatctttttcagtgatttcagatggaggcttatccttgctcttaccccacagaaccatgtaaaggcccactacaataataacagctccaataaccctgcaaaaaaaaagtgtcaaaaatcatttctatgatttgtgacaacatacttgtacatgttgtagagattaagaaagtaccttcccaagtacattagctctgacaaaatgaaagagctcaatattgcaacaattacaagaccaacaggattaaaagcagtcacaaaaacaggtcccttttgaatcatgactaatccttgaatatagtaagcaaaaccagaacgaaatacaccctgcagtagtaaccaattgttatttattataagtaaatatcagttaaaaaagagtgaaaaataaagagaagagtgagtgagtttctaacactgtaaagtgatgctaatatcatggattgtgatcttaaagaccaggctgcagggttgccccattccattcctaaggccacaaatgtgccttgccctgctcccatcaagcacattaaagatgttagggaaagctcagcagggtatgacttcagtgtgattgcctgtaaaagcaaaatttatgcatcaatatttgaaatgaaatcaaagaaaaagtttcaactctcttaaaaatgtcaagaaagtggaacttacttgtagtattatgaaactagaccaacatacacatcctgctataatcattagagcacctttaacagagttttgattatttgcagcatttacagaatgatgaagatggttagcttgttttgcccatggtaaattcaacactggtccattatacatggtcatgaacattgctcccccaacagctactatggttcccattatctttgcttggctatgtacttttttaatattaaccttctcaagcctagaaacaaccagttaagacattattaatgaattgtccccaaatgctactaattcacaagtttgatacttttttatttctttgtcttttacctacaaatccaagccattataaatgcaaatgcaggaagaacattgcacatggcagttgcaaaagttgctgttgtgtacttcatcccagtgtagtacaaattctggtcgagtacaggcctgaaaaagagccatgagcaaaaacaattaataactagtttagctaataacaataataataataaattctatgtaatggtctttactccaagaaggccagcaacataatcttgaaaaagatagagaaagtcatcttgggccttgttttcctgttacaacattgagatggtattgatatgttagtatattgtattatacatactctctggctctccaacacaatgacatataataaagacttaataaaaaagagaagacagatgtgagatgtatatataaatgtgtgtgtattgtatacctctctaacacgattgcaaaaggtgcagttataacagctgctataatatgtctatacactactaaaacatgttggctcatcccttggtttagagcagctttagagattattgacattcctgcatacccaaattgctgcagaatcaaggccacaaatggttttgcttgtttgagcatttcagctgaggacttattattattattattatcagttgacatttttttttgttttgaaaattaactcttaagaccctctctatttttctccttaaaaaagaaaatgaactatatgatgtttcatttgacacacttatatagtttttaagttttaaccacttctgtcactttccttttctttacatattatatgttttagagaaagaaaattgtcttacgattacatttttttcattgaggtgtaggaattccactatatgaaaccaaaatacctttatgaaaaaacgtaatccttttcatcaataatcatctgacaccatcaactttataataataataataatnnnaataataataataataaaaactagaactgttgcttactaagaaggaagcacaaatggcaccaagccagttctatacgtatcaaccaaattagtgggggttttccttaaacgtagttatatcaaaataagtgacactataatattaattaatcattaatgaagttttgagggtaattagtgatgtgaataaagagtggatcaaataattccttctttattagaattgagcatattctaatattcgtttaggcatatcttggtttcttgtcatcattttcattatttgaattcctacactacaaagcactactaaaaggtggcaatatggaacattgtcttgatagatacctcaattataagagaactcaaccagagattaaatgaggttatccaatcatggacaacttaactattgcttagatattatttatttcatactaaggacatctctcactagaaagaaaaaaaaaatatcttctttgcttagtggaacctctccattgtagatggggagcataatggggaatacaagacacaattgtgttgatttttacagtgtttgtttgctttattaatggcttacacagatatttgaggaattataattatggcacgtatactatataatattcaaaaaatgtagaaatgtaacacaataaattaagaataatcggaatcagtatttttaatatgttgtttattaaatttttttgaaaatataatattagtgatttatattgtttactaacggaatatataaattgactaaattatcattttgagttaaattatagtatatattaattattttgtaaggcatattttaaagaataaaattatttaatattaaaaaataaaataaaaataaataaaatctattacttttaatagcatttcttacaaaattagtgtaggaagtattccattcttttatcctttatttaataaaattttctatttcttaattttaataatgtaagtaaacaaatataagagagtgattactttaccattaattcctattacttaatattaaattctgtaaaattaattaatcaattttcgtattaggtaaattaaaacatgtaaaacaacacagaactattaataaagttaataatatattgcggttcatgtcttttttcattaagttttgtgtggccttaatttattggaaaagtttcataaatatcattaatttaataccttttatttatgttttatttacaattttataatttgaagttttttttacaaaaatacggttgtaaaattttaaaattacaaaaatatactttttccagcataaagtaagaaaccaatcaaaaaaattgacgaaaaatcaaccttacggcaactataaataaactatataaaacaactagaaaaacaatattatgacaattataatagaactataaaacaaaaaaaaaaatgtttattatttttactaaagagaatttttgtaaataaaaagttcaatgcgtaaaaataaaattttttcctgtattaacatattttggtaatttttttcaaatttttacggtttattatttaattttttttgatatatatatatatatataaagtgtataggggaattactttatatatactatttcttaactattcttaaaaaaaaattacggtttgggttgttccgatagttgttcgaataatttctatataggttgttatgtggattttgattgtgatttatattatgtcgctagttgttatgtaaattttagtaaaaaggaaaaaaaaaaaacactaatttaaagtgtaaaatgaaaaaacctcttctatatatatatttatacatagtaagactcatgcattcgattcacatgttaggtaattgcaaggggatacgttacacatgatgttgtcatgaattgagattatagtgtcaatcaaagagttgcagatcatgacaaaacaatagaatcatcacaatcacatcaaatgtatgtacagagagattatgttattggggttgttggctcaatttccgcaatggtctacactttttatatggacacaacaagtgtaagccttttcaccttaattttttgtagtggcaagaccacactttcgacatgtttttaagaatttcaaatatttttcaatactcaaaatataggtttcgtttggtatcaaattaattaactacaatgtttggggcaatgtttgccacataagtttgtattaattattacaacacttaattttaataaagcccgtagtgttttataaaatacataaaacaaatggatgtttaaaggttgtttgtatcttaatatttatgaacttagattgtattatagtaaaaattagagttggaattaaggtcagtgtttgagtttaactagagttgggtctgaggtctacatagggttaggcttgggattaggtctgggttccaagtcggcgccaagggctaggatacaggatcaaggtcaggggtcttgggtccaaggttaggtcctaggtctaggttctaggttaaggttggggcttgggttaggtgtctaagtgagggttcgaggctagttttggggtccacggtccagggttcaaagccaagaccgacggggtctaaggtcaagagccatgtctagggttacgaccatgaccatttgcagagctaggggctggagttaagtttgaggttgagtcccaagtttaagggtttatgattgggtttggggttatagtcgaggtttagggtcaagtagtggatttggggaccaagtcaggatttggcgttggaattggggttcaaggtcggggcagagttcagcaagctttggggtcatgggcgatgtccttagtccctaccaggaccatggtcgggctaggggttggagtcgggttctgggttgagtcctaggtttagggttcgagtttaggattacagttagagtcaaggttcaggttcaagaacagggttcagggttcagggtcagggttgggattggagttgggttcaagtgtccaagctagggccaagatccaaggtgaaggtcgaggttggagtctgggttgtggccaaggtgaggtctgaggtttgaggtacatgggtaggttaaacatagaatacattgtgaaagtctatcacatcagaggtctgcctatcaaaaccctgaacaacaccatctttaagggaacgatcaagcaccgtgaggaatttcctaaaagttaatattttccaattaataacagagatcgtgaattatattgtcatagaaccttctcccactcattatttcaggatgaaaggtttctctactaaaattatctcacattttaactattaaaagtaattacactgtaatgacaacgtattagacttggaaattagcaaacaattactagcttaatagaatataattactactttatgattatgtgcacgttagtaaaaaataaaatatattgtcaaaaataggcattagaggaaattgtttctcaattacagagattttattaaattttagaagtgtcatgcatgttatttatgaattataatattttttatattttatacccggtaatagtggaattcaatgatttagccattagtgtcacttaaatacaatttagtatttcaaaataagcggggcatgatttatggacttttagaatgtcggggttatctagggaatttgttttgaccatgtaagacccagatgtattggtggcaaattatgctgcgttggtcatctgcctagttgttagtttcatctaaccttgtggtctttttggttctttgataggtcagcttagtaatatcaaactaaggacaactgtcctttttcgttagctgagctgtcaaagtttgttagcttaagagttgttagtataaattcagggattaccggtttttctaactaactcttcttcgttgataagcatattgctcagctagggcaaaatatgtttcttgtttgttctggtgtttcttacaggtctgctgatgaaatcttctgggattgaaggtgcatcagagatcgtgtgtttccgaagggagttcagattgctttgctgaagagaggtcagctggaaagaagcaagggattcttgccttctgaagtctaaggttcttagatgattttctgatttgagtgtgttcaaatctattgggtaatttctgtatgaattaatttctgattactttttggtataattgtaatagaaactggatagtgtatcctttgattcatagtgaaagttattaccctcgttcaagggaacccaagcaataatcgcctgaaatgaggtttcagggtcatatgaagctggtaattctgagtgttctatgtttagcttcttgcacattgagattagtttaatctagttaatacaacattcaagaaatcaacactgtagactttacatttggtatcggagcagatctttctcaatttgagatcgagatcttggtgtgttgtgtattttcttgagttgtactgttttcttggttaatagcgttttttttattccttcggttcttgtaaactaacagtcctcaagttgtttcttgaggtattaccccttgtgtttccgtgtttgctgtgatttactgcaggtaaataaagtatggagatgtttcgtgaaggaggttccacctctcggccacccatgcttgaatgagctaactacccctactggaaaaccaaaatgagggcgttcttgaaggctgttgatgaaagagtttggatggct

SEQ ID NO: 14146 - DNA, 7236 bp, Cannabis sativa
atatgataacagagacgtaaatgacattgctgttgatgaaattgccaatattcttgtgttacggtttgatgatatatatgccacagaatatttattttgaccaattagattttattaattaagaaaaagtttctcacctcctctgatgcaatcttggatttcaaactggtgtttccaccacaagtttgcattgcatcaatttcaacaccagattctttcatatcagcaagttctttccttaaaccttcatcagtgcatcctaaagcataagcattcaccccagcactaataaactcctgattaaccgaaatcgttatttgagtataaacacaatttagaaaaacctcacaagaaaagaaaccaaaccactgaatatacttttaggttgtcacctcctccacgatcaaccacattcctgtacctcctgagtaaactaattgctatgttccttgaagaacgatactcttcatcagatggaattgaatcatccaaccggcactataaaagttcaaaactgttttaaacatactaatcattcaaaaaagttaatgtataaagtttaccaaaaacacttactagccatttctttgtagctacatggtgaggctgacccacatgattggtgttcagctgaaaacggtttttccatgaaaacaaggaagatggttgtgtacaattacatgaggtcctaagtagttttggggttgatgaaacattgatcaaggaattgagatgggtattcctagatggtggcaatgcctcgttgatgaagggtattacaatctgggcttgtcaggcactttgtagtagctactgatgcatacaccatcaacatgtttagaccatgataagatttccttcaaacaatccaatattaacaccaaaaattagatgaaatgaatttcttataaaagatagaatcataatactcactcatatatatactaaaattacagataaaattagaaaagaaaaacacaacagctatgctcaatcatagccagataaaaatatgctcaaatttactagcttccaaataggcaatcttcaaaacatctatgtttaaggtatattgataatttccaaagttcggctattgagacgaagatcaaatagaacagagagagagaaaatttcacaaaaacaccaacctggtcagaatatggatggtaatttcatccacaaataaaaggacccaacaagaaacttcaagttcaatactttttgagtaagatagataatcaattaacgagaactactataaaaataaaataaataaataaataaaaatctttaggttcttattacggaagccaccaattttatgaatggctccagagattcatataaattccaaataaatatattctggctgttataagaatccacatacgtgggggacttccaagtttgccatttgcaaggcaaccctgataacgacgtcgtttccttgatgatttctcccaattatttatagagtctattcgagaagaccaatgaatataagagctaagttactccaaaaattaccaacacatttttttattattttatatatcatttcttttacaaatttaaaattagctcattaaataaataatgataaattgatgattaattaatctaacataataaaaaaatatattaatttaaactatttccaaattcgacgatgcggcttctctttctttcctaccatgcaaagctattcccaactaagaatttatcgtaatatttatcataatagtcattgattaattctgaaattaagatattttcgagactcatattcttaggagggattttgtgaattttgtaaattcattattgaatttagagtgaatgatatttgagagtttaagaagaattaaaatgtaaaatgaaaaatggaaaaaaaaattgagtaaaatgaataatagaattaatagagttgagaatactgaagaagcttaagtaaatgaagaataaatgacatctatttaaactagctcaatcttagacaggataaggtggtgcggtggttcatgaaagctgtttgattacatccagttctttcacaaccaattttagagactaatcttgcatggtcagttatgtcaaaatattgtgttgtagattttgatgttggtaatggtagcccattttcatttcttgaaatttcctcacttgttgatgctcctagtggaaaataaataataaaaaacgatggttcattgtgttgctttttgcatggcacacacattcagaataccattgaataatagaagctcatagcaaaaatatttctatattgaacagcaaaagtaccacaagacaatcaagctgggattacacatacttgaagctataattcatcatcaagattcaatgaaacaaggtaagcaattaagccaaccacaggaacaaatctaagaagatttacaataccaagcttgctctgctgaacatttcgaagattttcaccaatcaaccaaggctggaagatagtgtagagagctatatcccaaatgaaagcataagcaagcctctctgaaccaagataactaatcagaaactcccatctctctgcaatgcccccgaaaccgccatccatacgaccaaacaacgcccataatgtagataccagacatacaactccaccagtaagaccgacaacagatgcacctcttgtcatgacggaccccagctgtgaaagcttgttttgatttcgagtgtcgtctgattcagcctcattcagtctgatagccatgtatggtatcaaaaatgctgtgatggaaaataaaagttgattctttggtcatttcaaaatgtaactcttaccaatgattataagaagtaagcacaaaattcaactatattaaaacaaaacatactgtttgtgaggaacatttggaaaccccacaaaacgtctagagatcccttatatctgtccctcttacgatccgtgaacagcaaaggagcaaacataaatgtccacccaattacaaaattgaatagtccttcagacatctaaggaaatatatgataagcagtatcagaaaacaacagagatgtttggatcaagaaacatgaagtgtggtggttaatcaaagccaaaaatgtgttattgattcataccgggtgtagaactggtgcctcaagcaaatgaataccaactactctgccaagaaagtaaactgatatatcaatcatgtaacaaacaaaaatatgctaaaagaataagaactgtcataatacaaaattatccattatacacttgagtaaactcacaccatcctaaacattaaaaggaaaaagttaacaaatgagtgaaaagtggttatggggtatgttaataacaatgatttgaacataccagaattcatcagaggcaaaataaagaagaaattgagagagaggcccagaagggaatttactgtgtctgaactgatagcccatacaggatctccctgttcatattttttgtgacaattaaaccaaattgaattaagatgatcaacaaatggaacaaaaaattgttctcaaaagaaaggcatagatatactaacaggggcattagggagcagaaaaagccacaatatgtagactccctcagcgacccacaacagaaattgaagcgctctcctcaaattatcatccaagtcttcttctccctcttcggccaccactgatgttggtttccggggagtggcatggcatgtaattttactcaactttatgctattcaacttcgtgtgttttagcaattttaaatcatcagatggaattgaatcatccaaccggcactataaaagttcaaaactgtattaaacatactaatcactcaaaaaatttaatgtataaagtttaccataaacacttactagccatttatttgtagcaacatggtgaggctgacccacacgattggtgttcagctgaaaacggtttttccatgaaaacaaggaagatggttgtgtacaattacatggggtcctaaaaagttttgtggttaatgaaacattgatcaaggaattgacatgggtattcctagatgttggcaatgcttcatgatgaagagtattacaatccgggtatgtcaggcactttgtagtagctactggtgcatacgccatcaacatgtttagaccatgataagatttccttcaaaaaacccaatattaaaaccaaaaatgaggtgaaatcagtttcttataaaataaaatcatagtactcacttatatactaaaattacagatataaaaaaatacaacaacagctatgctcaatcatggccagacagaaaaatatgctcaaattcactagcttccaaatgggtagtcttcaaaacatctgtatttaattgataattctcaaaaattcccagagtttggcttttgacacgagatcaaatataacagaaatacagagagaaaatttcagaaaaacacccaacctggtaaaagggcacagcaagaagtttcaagtttaatactttttgtattcagcaaaaaaaaaaaaactttttgagtaagataatatagaaattctcaggaaaaaaaaaaagaaaagaaaaaactaaaatagaattcacaaacgtggggtatttacaagtttgccattggcaaggcaaccctggtaacgacgtcgtttcttttatgatattttaatattttttaatgttattccagttctacccttcatagcgaaccctcacccagttaggtgctgtgtcatgactgcgatcacctgtttcaaagcccaccatgcatctcacttctaacttggactttggcacaaaattcaaaaatgattattcggtcatgttaaagtcagacatttaactcgttagaatagctcaagtacataaaaacaaaagtaaccgagaaacacttgattcctgaatttgcaaaggatagagtaaggtgtttgtcctgtagtgcaatcaccactcacttacgatggggcttctctccatatagacgacgaatccttctccaccaaccacaccagaccaaccatttttcactttttatttttttattttttttttattatttttttttctactgcagtacacatattcgtatacattatctctcttcagtgccttgcagaggcatatacacacacacacatatataaaagccaatctctttcttggtgggatatggtcttttgggctctcagatttgcatttttctgaaaagccaaggatacagtactgcacaatccttaacagtcggtaagtgagttagttatctctttctcttctttagttttgaggcacattttctggtatttttatccaatgttgtctattttctccagttttattcaatgaaaaagtttttgccttttgggtttggggtttggggatctgcgtcattctgtgtatgaatctttgaatttttatggaaaatatgaggtgggatctagatgaattgttaatttcatatcagcttgaagtttctttactgatttttcttataaatgtcatatagtgactgtgtactatttatatttgttacatttctggcaaacgctaattgagatgggcaattttctttttcctcttctgaatataagttttaagcttgtgtttttctgattcgggcaatgtcacaatacattggctcgattaactaccctttttttttagagtttaagcaaaattgatacgaatcttttgatggcttattgttttaaacatactctctttcaaaataaccattgataattgacaattcaacactgttaaatattatttactgtgaaaatggtgtttattctctgtatattaatctggcagttattttggtgtgccaataagattcagtatttactcctttgtttttggttggtgactagaagatatcccaattatcacatactttatgttaagatgtagtgttatactattgggaatctgtcttaaattttcttttaattgtacctgaagccttctgtaattttttcttttgtcagatactttttgtattgaaaatgagagggggtttatggcaacttggccaatcaatcacccgccgccttgcacaggctgataagaaggcggtagctcgtagatattattctgcggaatctgagctcaaaaagactgttctttatgatttccatgttgctaatggtgggaagatggtgccatttgctgggtggagcatgcctattcagtacaaagactcaatcatggactctactgtcaattgtagggagaacgggagtctttttgatgtctcacacatgtgtggactgagcctcaagggaaaagacagcatttctttccttgagaaacttgttattgctgatgttgcctcgcttgccaatggaactggaactcttactgtatttacaaatgagaagggtggtgctattgatgactctgtgatcaccaaggttactgatgatcatatatacttggtggtcaatgctggatgcagggataaggatctggctcacattgaggagcacatgaaagtgttcaaatctaaaggtggagatgtctcatggcacattcatgatgagagatctcttttagctcttcaggtctgttttaaatttcatataattttgctaacctattctcagcttttgatgtctgctttgttttccatgtcataaacctgtaatgacagtattttgagggtgtttagttgcctattggttaaggttttttcgctaaagaaccatgttctggaaacaatactgaatacagattgagagcttaaatttatcaatttaagtctgtgattagcttatttgacaatagctactaaccctgttacttttatcgtcattgctcttattttttcattagattcccgtatggttaatggttacacgcatgaagagtttcttgtcttcttgttcacagggccctcttgctgctccaactcttcaacacttaatgaaagatgatttgagcaagatatattttggagacttccgagtgttggaaatcaatggctcaaaatgcttcctcaccagaaccgggtatgcttccttcgggtctaaacttgacattgaatttgtaacagcaaggttgatttctagtgctcctaatgaatgttcagttgatgaacataatttatatctgtactgtcttagcagatgctttgagttttctatttctgttcatattatttcccatgttctgagcatatcattgtccttttagtaccatgtattgctatcctaacattgacaagttaatggagtatatttgataatttcaatatc

SEQ ID NO: 14147 - DNA, 7095 bp, Cannabis sativa
  modified_base (1287)..(1288): a, c, t, g, unknown or other
aagtttatccaaatctagatgaatttcaagttgagggcacagagaaggtgatttgcagtgctaaaatgcatgatggtctctatattctcattgattcttctaaaagtaaacaaatttgcagatcgagttgtggtaaacattccaatttctgttttcaattctgtgtctattttgaatgaaaataccatcatgttgtggcattttcgccttgggcatccaatttttggttatcttgaaaaactatttcctcagttatttgtccataaaggaccaaaactctttcattgtgaagtctatcaacttgttaaacatactcaaaactcttacccagtttttcctacaaaccttcacaacctatttaaatgataggtagtgatgtttagggaccctctcgagtaacaaatattaatagagctagatggtttatatccatgagcacaccaagacaacagggattttcatatgaaagaaaaattaaaatctgcttcatctttaaacttttccattccatgattcaaaaccaattcaaccaaagatcaaaattctgaaaacagaaaatggaaaggaatatttaaccccattctcggtccttacctgttaaatcaaggaattgttcacattagttcatgtgttgatactccttaacaaaatgaaatgacggagaaaaaacggacatcttcttaaagtttctaaatctattatgttcctaaatagttttggggggaagctttactcaccaccacctatctcataaatcatatgcctataattcaaaactccaagaaatttgttactagcaacattccctcatatatgggccttctcctcaaatcttccattcagagtttttggttgtacagtttttgtgtgtttatgatcttagaacaaaacttgatccaaagtctaacaagtgtctcttcattaagtattccaacacttaaaaagggtacaaatgttactccccagttacaaaaagggtttataacactaggatgtcacctattttgaacaacaatctttctttcccaaacctggtattcagggggagcattcacaggaatatcaactttgggaaacacttcaagatcatgaggctgcattcctcaatccaacatcatgacacacgatgctcaaactttacatgtgttctcaaagtcaattggttcttccttgcctatccagctagatctctcactgtcaacaggttcttccttgccttctttgactatccaaccacagtacacctagtgcaacctcctcagaaaatccaaacactctttcaaactnnccaccacttcaaactcaagcacaagtttatataggtaacaaagaacttcgtgtttatagcaggagaaaagtagggaataaagtggtcgacatgcaagacaataattgttcaaacactcatcaaaaccctctcgaccttgaaaatcatgatgttgaggattctataactcatgagatagagaatgttgaaagagtttggtacatgccacaaaattgcaaacagatgttgtcttgcaaggtaagaggatggaataggatttctagactacggtcgacaacagtattagctattttgtgggtgtggttagaaaggaatggcaaaatttccaaaaacatagaaaataaagtagacgactagtgagataaggttaaattttgggttgcaacatgggtttataaagcaaaaggttttgatgacctgtcgttccaagacctcatcagagagtggggttgtatcctatcccaagacactattttattttttctttgacatatgatgtgttataatgttctagtaccttcacatatatgtttttatgggaaactaacatttatatactgagcctttgtctcttttcttgatcttgttcagattcccatacatttatgagacaagatcttgaatggaagattgtagtaaatgaagaaataaatgatcttgagaaaaatagcacttgggtcctcactgagttggcttgaggaaagtggacaattggttgtaagtggaattttacagtcaagtataattcaaatgggattatcaacaaattcaaggattggttggtcgccaaagggtttactcaatcatatggagttgactatcatgagaccttttgctcctatcgccaaacataatacagtaagagttttattatcacttgttgtaaattgtgattggcctttatatcagttggatgtgaaaaacacattcttaaatggagagttggaagaagtctatagaaacttcaccaaggttgaagaaaaatgtcaatggttgattagtttgcaaactccaaaagttactctatggcttgaaacaatcacctcgagcatggtttgataggtttgcaaagtcagttgtaaaagtaggatacactcaatgccaaaccgatcataccttgttagggcaaaactcatcaataaggaaccttactattctcattgtctatgtcgatgacataatcttaaatggagatgattcagaagagatttcttgcatcaaaatttgagataaacgacctaggaactctaaaatactttcttggaataaaggtcacccgatccaaagaaggaattgttatatgtcaatgaaagtacatcctagatctacgaactctaaaatactttcttggaatggaggtcgcccgatccaaagaaggcatcgttatatgtcaatgatagtacatcctagatcttctaagcgaaactggaatgattgggagtaaaccagcagacactcccatggactctaacttaaaaacaaatcagtagagataagagttatcaaagatttatcgtaaagctaatctatctcttccacaccaaaccaaatattgctttctctgtcagtatagtcaatcaatatatgcacaatcctagtgaggatcatttggaattggaaatcgtatcttgtgatgccttaaaatgacaccagatcttggtttgctcttcagaattgagataccttaaaatgacaccaggttttggtttgctctttagaaaacatgacaagcgagacaaagaagtctacaacaatgcaagttgggctagagagttaattgatagatgtccaaccagtggctactgcgcctatgtttggggtaatttggttacttggcgtagcaagaaacagtcagtggtctcttcgagcagaatagaataagagtatcgtgcacagttactgggtgtttgagtgggaatgtggattaaaaggattgtaaatgagctaaaggttgaggttcctacatccttcaaaatgtaaaacggcaatcaagctaccatcaacatcgttaagagtccaattcatcatgacaaaacaaaatatgttgaaatagacacactgcatttttgagaaggtgaaatacacttcatttttttatttaaaaaagaagataaattctaagatttttcaacttgacttcacatggaaacagattgtggacatcctaacaaaggccctagcaagaacaagctttgaagaattcaattccaagctaggtttgtataacatatacacgtgtagaagtataaggattatttgttaggatctgaaattagtattagagttatttccttgtgtagattgtctttgtattttttccttgtttatagctgattctgatttttcccttctgtataaatgtataggctgtaatataaatttttatcaatgagaaatattattcatacacaaactacaatatcatataatgattaatgagacttgtccccaacatgaagcgagattaaggtttgtgtgtgtattgtcttataaatgcaatacagcacaaacaatgagaaaaccagctagaattatattaatctataggccacgaacaaattttatacttttgaaaagtaacacttatatggaaacccagccataaatatataccacaggtaagaaagcacatcaagtggaaaagtaaaaaaactaaaacagaaagactcaaaagatatgagactacctcatcttcaggatgtaaacgtgactgcaatattgttaatattgtctgaagtgtcttcagctgaataatttcatctgccatttcagcatgctgcaaaaagaagaggaacaagttgaactaccaggggtataaaaataaaaaccttcacataaactaaagaaaatgtaagctacatgcttcaaaataggactatcacatcagaagtcttataagttctctatatgccatggttactcttctaagaaggaatcctattgaaagctttatcatcttaatcattattaatttatgtctgttatgagaattctaacttacaaaaaatcagcacagtagtagttcactcaagagcttcttataacctatctgcctgagattgtgtaaattgaaagggggtaggagaacctcccaactggggtgtttggttggagagaaatgagaggatcttcgaaggcttcgagaatggggttgaagaagtatatggggaaagatgaaattttgagtggcaacttgcattttcaagtcaaaaggatttgaagggttgtcttttcaagaccttaccagagaatggggtctcatcctacatcaagactttagctagctctaagtttttatatatgtcctcaatgctcttatctttacgttttatttctctgtatttgtggctagcttgtaatcggtgttcctccgccataaccaaggctcccctaataaatttggaaagaggccaatcttagacatttaatctctgtctctttttcaaattaaaaaatgaactatatgtcccaaatttagtttgaaaatgctcaattaaataaattgaatgttttccctaatttgaattactaaggaaaagaccctgttatttatgagaataatttcaagtgaaaatcttctaccttgcctgccactagaagtgaaattcaaacaaaagtagaaactaatagccggacaagcccaagacctgaaactataagcttacttcttttagtgttgataatatctcttttaaggctgatacagaaactgcatcatgagatattaacttctgcaaacacgaaagtccaataacgctaagcttgacagtcttgacctcacaagccaccagaaagattcgcagtatgtcttcattttgcgcaatctcactgggacttgacaacgaacgaagctgcagattatcattaacaaacgcatgagtctcaatcaagcaatttacagcgacaggggattcccctactgaataaataatgcaattcaaaatttctgaaaccgcccaaaagctctctaaggcaaaggaaaaaataaaacaaaaacgaaacataagcttttattggattggaaagaaagaaaacggcaaaaagtacgtttcatctgttttcacaaaagtgaaattcaactataattttccataatttcagcattttgatgactacaatggtaattccaaactttttttagaataattcaacgtcttgcctaatgcaattcaacaattcaattgtatgtgtctcggctcaatatcataactgaaatatgacacactcgcatacttcgtttctggaaagatgataagaatccatcttcactcgcatataaagctcactcatgtcaacgaaaattccaaacacatctcccagctcaccaaaagttccaattttccaacaacattttcactaatcaattctatacactgacgatgcataagaaaaggcataccttcaatatagcgtgctcagctccgtccttaacagccgggtaacgacggcgagcttcagcacagagcgcacgaagatctgattccaagaccgccatgaaagccatcgctgacaagcgttcatggaatggttgagcctagggtttgaaacaagtagctaaaatgtgatccaaaacgcaaatttagaaagtaaacatcgagatcaaaacgcctgatcagaaagcgcgggggtatggcgtgtggtggtgtgactgtagtgaagtagatcttggagccttcagcaatgtggaagaaggaaccgttgtaggagcacgagggtgagcagccgttgcccatggaagtcgtttgggccttgggccttcaacaacggatgatatatggtatatttacaaaatctataccacttttgtgttattattccaaaaatatagtacaaatatgtcaaagagcacaaaagttttttttttttttttttttttttttgctctaacacaagtttattttagattaggaatttttacataaaatgccatttttttctgtttttaaacatttatacggtttcatagtttcaattttcaattttaccattttctttaaacatttatacggtttcattaaaactatttacatcatatacggttttgcttacatcacccaactccccacacgtttcccttcaaatttccaattttcaatcacttctattgtcagttttcacacactatcccactccctcatttatatcaatattttttgaatttccctttcttcatcgttttcattttgttcttcttcttcatctgttcatctacttcctctctttttttttttctgttttttgttttctgattgttgtgtatgcgtttttcctttggttttgagtaatggctgttactcgatcttgttcgagttctttgtccccttctcctaagaaacccaaaaaaaagactattaaacaatctaaacccaaattagttgctaaaactacttcaaaatctcttaatcaaaaatccaaagttgttgttcatgagagtgagccttcatctggtgatgctaggaaagctaaaaggaagagaaatgataatgaggataattttgttgttgttcgtcctaggaaggtatgtttgatttatttatttatttttttttttgttttttattttgatctgttcttgtcgtgatctggtgcattgtttatgacttgtatttttttttgttttttatttgtttatttccttaatttttttgtgtttaggttttttctttgttttttgatgttgtgggtttcagtctcatttttgtccaaattaggtttgcaagttccatgttattagtttagttgtttaatttaaattttgttcatatgtatttattcctattttatgttctatgtgttttttttttttt

SEQ ID NO: 14148 - DNA, 3298 bp, Cannabis sativa
agatattttatttttttttttttttttaaattaaagaaaaattgatgtctaaatatggagacaaagagagagagagaaaaaaaggaaaccgggtcgattgggattggattgggttagtaaccacgcaatttcctaagctaatagcctagaccttaaggtgttttgaaatctccttttctgggtcttaaagcatgcatgtgttgctttttctcttctctgaacctcattttgtctctaagtgcttggaacacatatggattccccatctcctctattcctactacaccttccttcttgctttttccattttcatttttacaaataattaatagaaatattcagataaaagaaaatattaattataataataattatataaataaacacaaacaaaaaacatcataatttctcttccttttcttttttctccatcactagtcactactactactatattacttttattttatttattctattgtcttttgcattgccatctttcatataccttattagtagtattaatatatgattaatgtattgtatattaattattttcttgaggagacagagatctgtacttaaccactttttgttatttttttttatatatatatttttttatgtattagaataatatccacgcctatctttgctacctaattcagctatacttaattcttccagctaagattatatatataataaacagcccatattctgtcacttgaaactttaaatttatttgtattttaatcaagaatccatgacttaattttgatagcacattttcgattagtgcatacaatcatacattattttgataaatatgatacagattacaaatcttatatatttaattttcataattaacagaatatataattttattgcacaatatttcaataaatggaaaatttatatatatactttgacatttttacaattttacttggggaattacttcatataccattttttatttttttctaaatttacagttttggttgctccaatagtttcaatgtgggttgctgtatggatttaggttgtaattaatttaatttgctccgttagttactatatgagtttctatgtgaattttcgtaaaaatctaaaaaaaaattgattgaaaatgtaaaaataaaaaaactcttttatacttttcctacttaatttttttcttttttttttcttcacgttaactttctttttcgtttttgttctttttgttatttttttcagtcatggatgactgactttttttgtctcctctctctctacggacttaggatttaattttaagatggacttagttatacatttaatataatccaaaacaataaatgactagctaaatttaagtggaatagcaagttttcttgacttgttgtatagtaggttaccaatactgaattaaattaattataattaattatttttttaaaaataattaattttttatttaaatatttaacaagaccttttttagcaattaatatttacaaataatatttttattttaatatttaagtccatatttttagcaagatctttctcggcgtgatagggcttcagacaacccatgtctgaggaacctcggacaggcttcttgtttgaagctcgcttatgcttgaccgagcggtttcttagctctgcgctcgtaggtgttgcaccatttagatattttgttttcaaaattcaaaaaatcataactaatttctgtaaaagcttaaattcattaatttcttatctacttttcaaaaaagatactattaggacaaaaataaaaatatttttcatcgaaaaatcgtaatttacataacattcatcaaataagcaaaccaacatgaacatatccaaatcatcataatcattgttttaaatccatatttcgtgaaagtaaattattaacatggctctgaggccagttgttggggattattttaccaggatctagatttactaacatgtatattgattaacaccctaaatatgaattctctaaaacaatagaattatacacatataaagttaagaaaaccttgcattagttgtagcggaataatatgtctccttccacttttcccagtgcgtaaatgcactgataaaaactagatttttccaacgcaaatgtatactgagaaaagtcttacttttaccagcgcattaatgccctgggaaaagtctaacatttaccagcaaaaatatgcacttgaaaaagtcttacttttaccaaattaataattttgtgctggtaaaattttgagttcctaaacaatctatcaagttttcgatataataaccctttttgttttagtaaaaaatgaaactcagttgtcaatgctgcaactatatgcaaccagcacaaacccaaatttaaagcaatgagcaagaaataagaactcataatataatctccattggaatagcacagatgttgtaatattttattagagaagcattttgtatccctcaccttcgacactggagtaaaaaaaacaagacctgcccaataggcataaccattcaaggaagtttattcaaagagatgtggactagaaaatgtgctaatgtatgtcatgggattatgatgactacatgtacttggtagaaatggctagctagctagcttcacttgatgtatctctacttgtcgacgttgtaatgactggacataattgataatctcatcaagcattagtgcctgatctacatattgttaatttagttaattaaaaagaactcagacaattattaattcattatatatatatacataaattaatctaattaatttcatatgagcttattaccttattgcactggaacaagatcttgcagaaacttcatcctctcgtttatcttttgtcttctcaattaataacaataataaaagttcaaaacctgggttaatatgaattatgaaatgatacaaaagtaggataggattatacaagtgatcaagttaagctagtatctatattgattgatttgatttcattcatttcacccataaattttctcaattgaaccaattaataaaattatttatgtaacattatgatattttttaccaattcaatgagacgcgctgataaaagtaacttttgctagcatattaccctattatatgctggcaaatgcaacttttaccagcgcaaaaattgcactggtaaaaagtatcaaaagggagtgctttacacggcttgtttatcccagcacaaatatgagttgcgctggtaaaaatacgtttcaccagtataaatgtgctctagtaaaactgtgaccttttggt

SEQ ID NO: 14149 - DNA, 2618 bp, Cannabis sativa
gaattgacaaaagcataatctaatctttccttaacatttatgccattgacattattgttgtgccatgtgaacctttctccttcaaattgtgtttccagtaagccacagaaatcaatagtatttcgaaaatcatcaatctgtttctcattctttagaggaccaccaaacttgtcggagtgcgaaatgatttcgttgaagtcgcgcataactagccaaggtaacagtggagctgtatctcttagctttttcaataattcccaagttagaggtctttgggacacaaccggagaaccatagaaaccagaaaagtgacacgtaggactatcatcgagagtcatgtagcagtcaataaagtttattccatagtgtaaaatagttacatttacattagacttccaaaggaaaagcaaacccccactaagaccaaccctaggaacttctataccattaggaaatttaaaagcattacgatatttagaaatagaaccagcacataatttagactctataataaataaaacatcaggactactttgggaaatgagcaaacggagttgacggaatgccttcgggctgctcaagccacgagcattccaacaaacaacattcatggagattggcgaggctgcccagcagccttcgccaaagagacaccgctgtcatcaactgccagtgagagttgggataactcagaggaagcatctgattgttggtgatgaatttgattagtagagtcattgaatggtgaagatctagtacgacatcgcttgagaacatttcaaacattaccgcctgaagtaaccagttgtcgcttagcatatagagatgaaactctattctcattgagcgggtaacagtcagcagtagtgtttgttgggattttattcacatctgtctttggaatagcagccgagaagacaatatttgagtgtgcaggatccgtctgagataaattagatggtaatggggaagcatgaatgtatgctggtggtatagcaataggtaaagcaatggatttgttagggacagtagtgaatggcagattagtattgtcttggatcgtgatagcattcttacagatttggctatcattttgtaatgttgttgtgacagattttgaacctgaagattgaccaatatcagcagaagttacatgtgaggatgtatgaaaggtggtaggattatccaaagtggagtcaggtggggttgtggcaattgactttcctttagattgaagaataggcttgtcttgaacatcaacagtaattgattctggatggatagcaggttggtgattatgaatatggtttttagagatcacaactcctttccctttttctctattagttactgaaggtggaagcgcaggaaactgtttaggatgagatataataggctcaattgttttcctagccaatcgggtgataaaaggccaaggcccttcttttgaaaaatcctgtcgatatcgattgtatcctgcatttggtaaggccgatcccgccatccatggaccataagggagatcagtgtcttctccttcatcaattttctctaagaattgagggcacttatcaaatacatgaccaattacaccacattcgtaacaaaaatccgggagtctttcataacgataatcaagccatatttcatctttcatccaagggaaagtaacagtttgtcccctaagtaatggctgggaaacatcaatagccactcgaattctaaggaaaggaccccatccttcatttagtgaatcttcatgaacttcaataaaagtaccaatgagattaccaattacccgagccagcgattcagatttactgagaaagggtagtctaaaaacttgaatccaaaaaggagttatggtgtaagactccatagaggcattctgcagaacacttggagagcagagaatcatgtgctggttatggagatgccaaggttcctttgataaaactcttcttagatcaccttcacagccaaatgtgatcatataagattcaaactcatagttggaaatggacacagcaaaccgtccttgccaatttttgctgatgaagtcatgcaattgcttgggattgtatcctcgtcgagagaagatcctacagataagttggtgtacagattggcgtggtggaggagcagtgatggaagaaagattgacaacttccttttctctaacagagagggctttggatatatcagggtgaaaggaatccatttaaagaaaaatcaacaacagagtagaagtaacaattggaaaaaccagactgaaagataaacagaaacagaaaaagaagaaaaggttgatgaggaggaaaggtaatgttgcaagaacagtaggcgggagcagttattagtgtaaaaatttgaaaaaaggatgaactttacagttaaaaagaaaaaacagaacaaactgccacagagcaaagggcagaccaaacccaaaaaagacaaatattctatacactttattttgaataatataaaaagaaaaaagaataatattttttttattttatagtcacatttaatataacataaacataaatataaatattttcacctctaatattattgacaaataaatttaaaataatatttactaattaaaatta

SEQ ID NO: 14150 - DNA, 13536 bp, Cannabis sativa
  modified_base (10211)..(10221): a, c, t, g, unknown or other
aattctttaattaagtaataaagaatcttcaaaacaaaatctatatgtcttttagtgaaagtagatatgattgtaaaagttaaccgttaatattatcgaaaaaatttagacaatactaaattatgtaaatactcgcttagaataactaatactcaaatattataaaatataaatgagtattgtaaataataaaaaataaagatgaaattataatagttgaacaagaatttgaacttatattacttagtctactgttgaaagaaattttgtgctctgtattttatcattcaattagtgttagctctgattggaggtggattgacctatttatatggtaataagtaaacattacaaaatatggtgataatgagacctttgcaataataataggtcatcggatatcaaataaatatgatgctcactttaataacacttaaatatgttagattgttatttttgtggattgatatgttcacatcttttattgacatcgttagtcataatacttctttgatatcgcggtctttctttagcgaaatcattctcattgggagagaaattgatcctaataacaattaatcttacggagaataaaggttaccattgatcaccaaaaccaatattagtacaatacaatggatgagttaatgttactgttcattaggagtagttgcatttaaatcacatcaaatcagtctataaccattaaatacacgtgtcaaaaatttatttatccaattcattaattattaacattattatgtgagaaatactaaaaaagttactaatactacctaattaaatatcaaatctcatatcattattgtaataactttaattttaaatatgttataaataccgatagtgcctaatagcaagcaatacttttctaaaaattatactttttcccaatcgcattctcattcattattttggtctcactttctttcttcagtgttaacaatctataaaaagtaataaaaaaattgatagctgattacaaatatttaaatctaatcatacagactcatcgtctcaaaacctctcttagcaactcaattcattggtaaaatattgttctgctactcaaaagtttaattattgtcctctcctttgaaaatggttctaaacaaaacaaactttactcatcataaccatgttttacagagagctaaagaaacagcaaaagccaacttacacgaaatcgaaatgtttagaaataaaacatgaaagttgactcaaaatgtaattgctaaatgtaaaatctcttgtctcactttcaagagccgataactcgcatgttttcctcgcctagacattagtcatttagcttccggttttctccaaccggtatgcaaaagatccttctacatttgatgacgattaatagcaacatgaaaacggtggaaatatattacctgacaccaatgtttgtcggggatcggaagccaaacaaagaatacgagggagaacacaaaacctaagacttggggacggtcacattaaggatttttacatcttggtagggtttgtccgatttgtctgtcttcactttctctataccctgtcatgtcaacaacagattgtcagaaaacggaaaacattactgtagtttttcaaagttcatttccatgatgagaaaggtgcatcgttgacgactatacctgtataacatccattccctttataactctgccgaaaacggtatgcttgttatccagccaaggggtagccactgtggtgataaagaattgagatccatttgaattgggtcctgcgttagccatggatactgtgaacggtcggtcatgtcgcaaactgcagatacaaaaattatgtaaataaatatgaatataagacaaaaatttatgttccagttgaaaataataataatgaataaataaataaaaaatcatattacctcttgtgaaattcatcttcaaactctctaccccaaatagattgaccaccagtgccatctcctaaaggatctccagtttgtatcatgaagcctttgatgacccggtgaaagataagattatcgtaatagccattccgacaatgagtagtgaagttctccacggttttaggacattcctcgggatataatttcatatgtacatcacccatcgtggtatgcataatctggcagaatagggcatgaaattagaaaaccaacacaccgattcaattactcaaaatacaagcatttcttttttgtccaaaaataattggcatggacatacacatgatgtaagtaaaaaaaatggaaaatatggtcattgaatcggaaaaaaacactagcctacatttttctctccttacgtatcatttattatcttcttttacctactttcttgagtacgaataaaaagccagccagaaaaattatagagcaacatttcttcaattttatgcatctaaagattgcaattatttattttttttaaaaaaaaaaaatacccaccacattttcgggaagagatgttgtggcagacttgccaatatccgatacagccaaaagttcatcagcaggtggtttttcattgaacacgtctcttcccttagttgcatcttcaggttcctcaggttctctccgactaaaaatgttcaaagagtacatcaaatgacatttatacatccaatccaatcttcactataattttccttctttgttaaagcagccaaattcattataactaaaactagaggtaagaagcaccattgatggtctgagataaaaatgcttcattcaaattttcatatggaagacaagggcacgacaactatccatctaagtgaatttatactatagtacatgcctttagaaagcaaaatgttaaagtgttcgaaaaatggttcggaagaatataagtacctgaatagataaattctgtgcttcttgaaagcacagcatacaagagtaggatctgtcaaaggatctttgctttcatttgcatttgctgcagctgcgggaatttttcgaacttttttactgcttcgatcaccttgatataaggcaatcctcaagaacctatcattgttctccacctttccaagtattcgagccactttattggtgtgtagatttaccacctacgagtacggagaaatagaaaaagaaaatgtcaatttttgatacccctagggcaaaaacatataaggtaaacaaaagtctcccactagatgggaagcaggggattgcatacttgatgatagtacagtctgatttcagaacaataatcttacttttatccccatcagggttgcataaataaggaaatttgagctttcgtcaaaaattgcatttggcggtggggcactttctgttttttcaatctccctctcaacggccattcttcgcccaaagtcaatagcttctagacggtataaaggcacatcacttctctgaacatcttgggccacctgaacaacacaagaaaattgacaaatacaagtgttcaggaatttcaatataaaataatacatcctcaactcttgttcttggagttgttaaagtattgattttacaaagaaataattttacctcaagagattcattatatacgcgtcttagtttacccgtttcaaaccaaaacacacgtatccgtcgatccggtgatgtaattgaaaattgcttaccatcggggctcacctaaagaacatcagattcattgtaaatcagtaataatgtaaattgttttttcatacataacaattatttaggtcaaataaaataccaaaaacgaagtgagagaaattcctaagataataaatagaaaattatcatattttttatgagggaaaacattatccatctgcaagcaaaaactcgaaaaagatagaccaaaatacctcaattgaagagacagtagttttgcactttataatttcatagagattagtgtcacttttgaatctaaacttgaccctgcaagcatgcaaagaagattatagtttatattagtggtaaattagtagttacgaaaccagagcaatatgccagagagagttttctattaaaataagaccaaaattcatatctcatgcacaatttacagaccaaaaataagtcttcataaaaacttaagttggagcacagtgtacttacttatcatcagggaactgcaatgtgacaggactccaatactcaatcattcctttagtgtcagctgaaattactgtatcaaatacttgattgtacttcataactttcacaggttccaagtgtacctgagagaaaaagtaaggaaataacagctgtgtaaaatactttacataaaaactaaaagatagctgaaatattatgaagggttaataattatgctcctcaagtcactagtgttacctctttggaaatgatagcttcatttgaaccagaccatgcatcaaatatgtgtacatatcttgaatttcgatcactaacagcaagccttgcttttgcatctccttgtttgtagacccactcgacagcaccaggagtaaaggagaggcgaatcatcaccatcatatcgtagttgactacgtcgtatatcttgacagcatgatcgtttgaaattgtacagcaaagcaagccatcagaactaacctgcatggctgaaccaagtcatggttgaggactgcactaataacaatatttttcctattattagaacaaacaaaaaactcagatgataaatgcaactaatcaatttgctcctcaataacaacattgatcgttgttgaataatcgaacaccgcaaaccaaatggtaagcacatgtcaaactatcaagaatttcaactacccctttcacaatgaacgatggtacttgcaccttaatctgcaatgtaggttgcagccatggagtgcgtaacacaacaaggttgtccagtgatggagtatgatgaaaatacaaacttattccctcacatgcaaatttgcaaatttacaattaagtactcattactcaaaatcaaaatgacaaaacatgcttaattctgactctacatcagaaaaatattgcagtaaaaactttagtctttaaaggatgaagaactcacagataagccttcaattggaccaaggtgggatcggaaatgcttcgcaaactcaacacccacagcctttttcttccaaaactttaaatgtcctggtgaagcaaatgacaaaagagaaaaagtgtaattataaacaacaagtttgcagataagttgtcatattataaatcaagatcatgtaatactgaaagtgacgcagtcctccactcctcagaaatgaaaaagtggaagaaataagtagaactggagttggtctttagtgaaattataaggcccccaacacatctcatattattcacccaagtcaaacatgtcatcttacctcaaactattacccattgaggcaaagaaatgatctaaccaaagcagttttgttaaatcccttagtcataaaatattgttgaacatctaaactttcactatcattgtccactaccattacaaaagaagatactatactaaactcaacattgtgagcatggaaattagaccaaaataatcataattctgaatgaattagaactaaattctccagctgattactgtaaaatgaagaaaattatgtgatattagagtaagttaccatcagcacttccagtaatgatgaattcagcagaggacacatcaacatgcgtaaccacatcacggtgcatataacttttctcatacctaaaaataaaagtaaaaaagtctgaatcagagctcaaacggaaaatcttaaaccctaaaaaagaaaaataaagaaaggaagagcagagcagagtagagtagagtagaatagagtaggtgatacatgttggcggaaggaagtgcgtcgaggtaggcatgttcgaactggagaggacgcttggggcgagctctgggaggtggaacgactgtgacatcgtcttcggtctccgtcatttcagccaaagatgttccattgacgttctgaggatcttccattagaagttggaagaggtaatggaggaataactcttctcttctctaatctctgcaacaatggaggaatgtcttcactgtttcacttcgtagaagaagaagaagaagaagagaggtctcaaccgtatcgggcccatttggatgggccgaaaccattttgggcttacttattaagctcgtttagttgaagaggaaattacactctataccctttttacgttgttctcttttatttttaccctctttttttaaagtctaccatttttatcttttcttttaaacattgtatcaattttgcccttgtaatttcaagatactctccatgtgactctcttatgtctgggtattttgggtacaatacacataaaaagaggtatgtttcaaataaatataaaattagaggtaaatttggttaattgattaataaaagaggtatttttcaacttaccccttagttgaataagagtgaagaagtcatttatgtgggccttgtgaaatgtaaccatattaggcctacttattgggctcattttagttgaactactcatttttgtgctatggtaatggtatggtgtataagagaaatttgaaaaaggatcttctaaatgtgttatttggaaaagaaaaaagacattttccatacttgttaggaaaaaaaaaattgaaagcaatgaacattaaaaatataatatcatgcttttttttttataccaatatatataatatcatgttacttgttaagaaatgttactaaataaggatttgttgtgtttttatgaaattgagatagaggaaggagtgaatgaggagaaaggagaatggtaatacagttatgtgagatttgtccaaggtttggggacactttttggacccattttttttaaagaaagattaaaccttaagcctatcaataagaacaatgcataacaaaaaaaaaaaaaaaaaaggattgatcctatttggtttaacttctataggtgtttcttaatcaaaaaaaaaaaaacttctataggtgtttcaacaaaaaataaaaagtaagaagctaggatttaaaaactatttttaaaattaaataattttaatgatatccaaacaagtacttttatttgaaaaaaaatcttcatataatagttattctttttcatttatacttttacaattgatttttaatttatttatacttttataattgactttttattcatttataaaaataaaaacagtataatcttgaattggaaacaacataatatcgaaataaaatgaaattttataaaacagaaacagtataacctcaaaatagaaacaacttgtataaaaataaaaaatatatattaaaaaaacgcaaaagtaaaaaaagtaaaaaaaacaaataaaatatcgtataaatggaaattataaaaataaatcaaagcttatacttatcttattcttctggttataagcaaagtataaacttaatcaaacgaagccagcaagtcagaggcacaattatttactctaataatacagttagtaataacacaaactaatgagcaatagtattagcatactacttaacaaacacataaaaacattctctaaattttgacaatcatgaataacttggccaaaagtaaaaaaatataggaacgaggctagaacacatttaacaacttgataaataataagtagttagactaagtaaagataaaaggagaatttacaagtgtctgaatatttattcgggtggcttcacaatttttaatgggcataggcatcctaggtaatttagttaagaggttagattttataaaattcaattatcgttctcaacacatgactcgtatgagctcaaagtttcatttcaaaaataatgctatatttaagtaattatttatcaatcaattcataactttttaaatacaacccaatctaattcttcaattgattcaaacacaacctggataattcttaaattaacttaaaacttctttgacaccaaaaactttgtccatcaaatattgacatataagcggttcaattttgaaatattgttaaatatatttcactactattttttttcactataaaattgtttctataattctcatactccaaagattcgtgatatgcaaaaaaataatggtaacaaatttttactatactataacataaaactattcacacaattagtaacatataatttcccaaaaaatgatcatgtaaactcactaatttggtaggccttgatttgtgttttgtggaggttttttttggttcacatcaacactagttaattacaaccataatttaacaaaaactcaaccttagctactacatcaaatcaattcaatcacttatacactctaaatttcaattcatttgacttcatctatatgatgcatacatttactaaattcttacttgtttttggccaataataggaaaacacacacaataagaagaaaaaagaaaaataaaagattaatttcatgaacaaagatcaagatttaatcaaatcaccatgatgatcataggatgacaccctaactaactaacatccatcccactattctttttatctaattatgtaatgtttatgcagttgtacagtcgattagttacgagcactgttataagacactaaaatgactaatactattataaagtgataccctataaatagtaaataattttctatgatttttattgaaatataataagagaaacttgatattaaattgtactaataacgatataacagctcacaaaagtgatatagtcatcatgataagtgccttttaacatttttcgttggttttatcttgcttgaggatccttgtcttaattttttttttttacaattaagtactccttgggttttataaacaacaagaattaagattgggtggtgcccttcatttttgaatctcattcgaaatcgtttcttatttcatatgggaaatcaacgagtagtattaaggactttcatcttattcaattgcttattggctttagtcgaaatcataatttacgtatttatctcattgtatcccataatttttatttttaaagttggggatgtgattgaactccaaagattcgctatactacaaatatgatcaccgaaatcgttatacatatgaatgaaattatttatcacttaataatgtaaatgaatactatgttttctcaaattttttttcttttgaataataaataaaaattcatatatgaaatgacttttctccaaaccaaagttaaattaggtgaggtataaatatcctatatatattatcatgcttttaaaggaagttaattattttcaaaactcgctttagattttcggaaccacccattaaagctctctttgatttgaagtacttttttgttttaatttaatgctttgtcatgataatttttaacatataagaaaggtgggagagtgacttaatccttaaaattctataacaatgaaaatgaaataatttaatcaataaactaatgataaagttaagcctatctattattgttattattattatatatgttaatacatacatatatggcaatggtattttatatctaaattagttagttcactctagctcttttattacattatatattcatagagacaaagatgaccttaatgaatgataacactactaacatattcacttttgtgaatatattaaatatatgaatgtaatatatattatcatagaaaatgattttgattactttcgtgaatatatattttttaagttgttaggaagaaggtgaaaaagataaaatcatattttttaatataatttcaaatcaataaaacattgaacaagaaaaaaaaaattagtcctcataaagaagttgaccaaactatgaagtggggtcaattaattttttcataaagtaaacctaattaggaataatatgacatatctaatatgcatatgaataaaaaataattctagcatccatatgatagttaacaaatgggatgaaaatagaagaaagacatgcttatgaagaactgcatttttagatttagatttgagtagagaaatttcgtgataatttatttttatttttaagtaattgtatttatgctatactgttgaacggtatgttttattttgttgggtgtatctacggttttcttccgcattgttagaatttggaaatataaggtgaatgaggttattatctcaaaaccaattggtaatgggaggagtagctcattcatcnnnnnnnnnnnaatttatttccacacattaacaatgtgggactaactcttaatacaaatgaacctttcaataatataataagagaatgtcagtttaagataagtgacttcttttttcacataataataataataataataatattaattttagtttaacaagaataatcaacctctctctctccaccctattattttacccatcttccaaataatgatgacaccattaaagagagttactataattctccttttagtaagtagccgctcccattcaaaccccataatttgtcctaatagaccatcaaatatggggttatatcatcattatgataatgagcaaaatatgaagactttattcaaccaattttctttttttgaatatatttcatttaatttaaaaacccaaaaccaaaaaggtaggtttttcgcaaatattgtttacatgcatcttagtttacccatatatttactttaaaggataattttttattagattattctcttctctttttaagttcaatgaccctcttgtgagttgttcttttgtaacaaagtgtggctattagggagacaaaatgcttctttcttgtgtgccttttaacctttttttattcacatgtatcatacactcatatgctttgttgtctttttttaattctttagctttagagaaaaaaaattgattttcatattaattaataattagtatagagatttctctatgtgctaaaagttgatgatttgtaattggaactgattgtcatttcggagtaagtaataagtttgacgtgtttgtttaactagataattatattattgaaatttataatatttagtgtgtttggagtagaaaaaaagtttaatttgttgtgctcgactctaatagctcctatcaccgatttaagttcacgaatgcctattaaattattagtaatagctaagattaagttcaaataagagtgtttcaaaaaaaaaaaagttcaaataaaagtgagaaactctataaatagtaattataatgctcatttattgtacacttgatataatgttgaaaatatagaaaaagattgtaaagacattcatttttagatattagactgagtatacgagaataaatatcttggagataaaagtttggagctttgttgtgtaagtcttaagtgttcttaattttttttcttcatatttttgtgattatggttatttatattattattgaaaagtgttgtaattttttaattattcttaaagctctcaatagtcttcaaacaatatatgtattttgtatttggttgtatttgtaacattcatattccttcaagagtaatgtaatatttcccaacacactttttgcattttaaaataaatattttctaatgataattgcatagttatttcaattcaaaacacatacaaaatattaattataaagcaactttctaagtggactctaacaagcaatacaatgtgtttgtggttaaaaaatgggagttggaaatgtattcaatattcatagatgaagctaacaagtatgtgattaattactatttattatgaaagcttttctttttgttgctcatagatgataggtgaattgaatatatagacataaaaatcttaaatgatggggtgggtaacattcaaataaatcaaattgaacggaaccgaactaattaaatcaaattcaattataaaaaattagatatctaattacaattgtaatatcaaaatccaattaaaaactcattcgatctaattacatttgtatatactaaaaaaattatttatatttatttatatataatataaaaaattaaagaatgtatactataattatattttgaattgttttcttaatctctaacacttgatttttttgtatagttagtttcatatgttttgatctatattattacttaagagtgttgttttaaatattttaattttttagttgcattaaacttgtaaagaatatatatatttatttagcattaaacttaaataaagattaatatttattttttacgtattttttttaatatttttaagttaatataaaaaattagatgtataattaattgaattagatccaattaaatttttaggtctaattgaattggatcgaataataataacaattttaaaatataattaaattaaatcgaattagaaaaaaaaaatagattgcattggatgcaaccctacctaaatgaatgcataataaaatgaattgttacatatggacacaaacaagattgtatacttatctacaaacattaaatttgcaaaagaagatgaacaaaaattagaatggatattcgggcttttaagcttttacatagggctgtgtattaaatcgctcaaatcgctcacattgtaaaagaaatatagtttgaaattctttacagtgcggtcgcggtttgaattttttctaaatcgcgcggtgcggtttagtttgcgattttgaattgttaatatgcagttcaaactgcaccctaccgcatattataaaaatactaatatttatatttttttaggtccatatgtgaaggacagcctaaagcccactaattattgtattgttatttttttgtttttcatatttactttcaagtcttatgatatttttgacaagtgttgcttaaactttgttgtacttgatgatagtctaattatttggtgatagtccaaaccgcagaaactgcactgcaccaaaccattttttgcggtgcaatttctgtagttttttagtttcacagtgtgggtacagtttggaaaatttaaaaaaccgcatgtgcaagttatttaaaaaaatgatcaaaaaccgcaccacctgcataacaaacacccttatttactatatttagaggcttgacaccctattaaaatatttatctaatagggttaattttcatttgacataaataaatatgataatacttacctaatatagaacattgagttaattaatcaaatattttttttgaaagcaataaatcaaatattatttaagaatgaaattaattattattaatatatttattaatgaatatcacataatattcaactcacaatatttattaagttaaaattttgattaaaaaaaggtgttttttttaatttataaaaaaaaagagtttttttttttttttttttgtatttttacgataatttacataaaaatttatatagtaaccaacagagcaacttaaagttagggttgtacattggtgggtttggacggtttatcctatatattttctaacccaatctaaagttcgggttgctaaaatttaagtgcaacccgcctaatttaaaaaaaaa

SEQ ID NO: 14151 - DNA, 7331 bp, Cannabis sativa
  modified_base (7271)..(7289): a, c, t, g, unknown or other
acttttgcagccataggtagacgacgaagaagaagaacaaatggaaatgaaattaaattttaaatattaaaaagaaaaaaaaagaaagaaagaaagaaaaaaagaagagagatgtttgttactttgtttagtagaaatggtaaaaaaaagacaaatattacataatagtagtagtagtagtagtagtagtagtagtagatgaaaatgaagaagaaaccatagttgggttggtttgttcctttttttttaacccttttgtctctgtggtgttcctctctctctctctctcaattttcaattttctttatttggccaattttctattttccgttcattaatttatttttttaaatagctgtaactttgccttgagagggataaaagtgaaaaaagagactcagaggaaatggagctctaattttgttgattgtaaagattgtggcatttcgagagtttgggttgttgtaagagttttattgtgaatataattttaaaaaactatgaaataattaaaataagtcattttaattaagaagtaatataaaagcaaaacataaagaaagagaatagaagcttcgtgttactctaataggggtgaaaacatgcaaattaatcatccattccttcatgtcatgtctactcgttttttttctttttctttaattattattttgaggttagattattatttctttgaaaagacttccctctctcaaaaaaaatgattttttttttctttcttggttttctaatgaacaaacattggtctttgagttgttatagtaaaatactaatcattcaagttgtgaaataatgatgaaaagtgaagcttagaactgtagaaagagaaagagggagggagcagagagcactgtgagattcctgggttgctttaatttcaaaagcagcagcttcttttgctcttaggaaagcttttgtctgattcgatttactttgaaagcaatgtatttgatgatgaaagcttcttctaaccactaccctcttcctgacatgtctcctctctctctctctctctctctctcgggtaaatatatgttcctaatttcttctctcttctctctttttgttggaaaaataaataaataataataagcagaaaatcatggggtcactttcttaattctaagttgctaaccgtatctcatgcattttttgtcccttgccgggaattcatgctttgccactctttggactttggaggcatccatgtatcagtgtccaacttaatcaaatcaataatatatttgcatttaagataaacttgaaagtaaaaaaaaacaattaagttggttgtaccaaagctttgactcaagaaaaagaaaagaacgaaaaaaacatagcccaaaaccggcaaactatggatttatattcataaccagacaaaatgatatttgacccttcagaaaagaaaaaagagaggaagaagtgaaatttatatatatatagatagatatccacaaccacaagtataatttttaattgagatggacaactacaagatacttcttctataagtgtacatagaatttgtcatgtgcagagatcaaaaagacaaaatggtactacatatttatatctccaagtacaaacaacataacgagacaaattaaaggataggcaaggaccaaaaacaacataagtgtactggtttccaaatactagtacttttcttgcactgccaagtattacaaactaaatacagatgtgtacagataaggagcagatttaattgcatcttcacaaagaagtagatgacaaggtataatttttacagtcagcaaggtagagtccatgtgtttgatattataaaatcttttagtaacatcttcttttggtgtatatagattcctttccctatgatttacaaaaaggtaagtttgatatgtgaattcatgacagtaacaagaaaacgttaccatgcaagtgatgatggcaagtcagaaagctgcatagtgttgatatcaccaataattgcaaggccgcctagttttcaccgcgttcaaatatcaaatcctggcattgcaaattgagtagcaaatgtctcgactcgatttcggaggtcactgatatccttattgttctgaagacctttgacaaaatccttggccattattccatgttccttctgcacaatacaggtaatctgagctgctcttagaagaaagtcggcaatagtctcaaaatcagcttctaagcaacctcttgatgtcattgcaggagttcctttaagaacacaaataataaatttaagaaaaacaactccagacaaaataagaagagttaaaagggaaaaaagaaggattactagctaaggaattattcaacagctactaggttgaaattccattgcatgcagactacaattaatacagttcttaatcgtgattaaaaggccaataaatcaagaatgtgtaacttgatgcaattacaattccttttaaaaggccactgaatcaagattgtacacctcgcacagagtaatggcaggaacacctactttaagtaccaaaattgtggtttaaaaccattacataactcaatatacttatgaccaactccagccacgatggcatatttggttttgcattcatcttgtattccattccaaccacaataagaataatagtctttataattatggaaaaatagttttggcaccaaatatgccatttggtgcttacattggagatgccctacgtactaaagtactatgcctctgtacccacaaagaaaagggaggaagataatactcaccaattctaacacctccaggagaaattgcaccactatcaccaaaaatagcacacttgttaagagtgatgtagcacatctcacagaccttctcatagtttttgcctgaaataataatcaaaaagttagaatagaataacaatcaatacataattaaataaaacagataaataagggggaaaatgcattgtgcccagccaaaaacttgggaggaaaagtgatcaaacataatatgcataacaattgccccattcattcaggaattcgaatgcagatgccacacggctaagcagttcaaagtgtagtaaatacctatgtactagatgatatgtcaccacaaacatggtaattgtttaatttttttactattcagaaagtaaaatttccagatatcatctaaaataacataacaaaatataaaagctacagcattttgggcaacttatttgtcttcaaacacaagaaatcacaataatgcgacaagtcaaaaaaccaacggttaaaagagagtgcttgaaagaatgcaatacaattattaaaaaaaattaaaaaaatggaagtatgaaaaccaaattaggcctaacttacacttgttaacaaacatataaacgttactcgaagcttatatttctttattccaatttgttctaaaaaattgacaatgagctagctaaatgaccccactatgttgaggtcactggaataatcatgaatggaagatccaaaagcaggaaagtacatcagaagaatcaaacccatatcctaaaacttaataattctttccgttttcctttttattttttgtcagatagaacctaatagttcattagatatgtcccacataaaacatgtggaccactttgaaaataacgaaaaagataagtagaatgtctatgcaattaatatttcagcatccaaaggaaaagcatcaagatatgctgcactaagagtctacaacccaattgagtaaacatttattttttccattcgaacaggtaaatacacatctttctttaaatatgtttgtttgaaaagaaaaagataaatttacctgctaatccaagagaagtcaaatcccagagcaacaaatgattgtctgtaccgccagtcaccaacctgcattttcttcttaacaaagaaaatgctaaggcctttgcatttttcttcacctgttgcatataagctttgtattctggagtagcaacttgttttaaggctatggcaagagcagcaatgtggttattgtgaggacccccttgtaatgctggaaagaccgcaaagtttatcttatcctcatcaaaatggatattaccctctccatgctttctggatcttgtgcctttcctataaaagataatacctcccctaggacctcggagacttttgtgtgtagtggatgtgacaacatcacagtaatcaaatggacttatacattcctgtaaataatagacacaacaacccaccaaattaataaaaatatgtaatgcattgtaacccaagaggaatgtctaactttttatcgagagtatacattgatacaagcatcacatacacaaacctaagaacaaaagaaactacagtataggatgcacaaccaacctcagaaaagtttatgctgatttcattacttgtcaagaaattccatttagtataagctatcagtttatagactaataatctaacacaaaccaagtattctaacaccaaaagattttcttatattgcatactaaaaaattacaaacagagttagactattcagattaaagctaatattctacataatcaagcttacttaattagaattcaaaacaaaaaaaaacaaaaaaaaaaaaagaagccaatttgaccaatacgcaatcatttaaatactatcataaaacaaagtggataaaaaacacattcacacaatatgttaaaaacgttaacatatccagaagcagaagacagcacaccttagcagcgactagcccgctaatatgagccatatcacacatcaatattgctccacatttatcagcaatgcgccggaacctagcgtagtcccactcccgtggataagaactaccaccacaaataagtatcttggggcgaaaatcaagtgctttctcctcgagcttgtcataatctatatatcccgtttgtggattaactttataagggagactttcaaagaatatggaagcagccgagactttcttcccacttggagtataataaccatgactcaagtgccctccagatggtgaatctaaccccataatccgatcactagggagcaaaagtccagtgtataccgcaaaatttgcagaggtacatgaatacggctgaacatttactccccacttctcagaatcaagatcaaaagcagccaaagcacgctcacaacaaagcaattcaatttgatcaatatgttgattgcccgtatataatcttgccccaggcattccctcagagtacttgttcgtcaaatggctacctagagcttccataacagctttacacacaaaattctctgaagctatcaattcaatccccctgaactgcctttgcctctctttctccatgatttcgtgaatctccgggtccgcaaccttcattgattcgtttccccagcaaggaatcgatttccgcctcccaccaatccccgattcaacgaaaacgcgtttcggaagattcttaggtaagaacgacgacccatctctcgccctcttcaaacacatagggtgtcccaaaatgctaaacttctcatcttccccgtactccacctccccattttcaaccctaacctcctcatccttcctatcaagcaactgaagcggaacagagactccagaagaagaagaagaagaagaagaactcaccgaacagcgaaacatattctcatcggccatcgtgggcgtcaccggagctgaagacatatgagtactaaaccccaacgagagactcggttgagcattggaaaactccatatgtcaacaacaaaaaaaaatgattttgaatttctttttttttttaagtatagcaacaacaaaagcaacgacaacaacctctgaagaaactacagcggaagtatcgaagtgaagatgaagatgaagatgaggttggaagtggggcctgagtagaagaagttgtttccatgaaaaagctttaagaaaccaaaaccctagcagagaaagatgaacctggatgtaatattatgttatgttttgttttttatttgaattggtagtgacacgtggtgaaattttataggttgatacggggatatttgacttggaacaaaagaaaaggtgtgaggctccatgtggattggataacgtctaggttcatttctctctccatttgtccaaaaatgaaaaatatatctaataaaataaatcaattactgaatgtcccatgaaaatgtctaattagtaattactagcttagaggaagtttcttcaatgttggaaactctacaagtgatgtggtttagggcaactctaatattaattatccaatttagcattaaatttttttcaattctaattataacaataaagtttacactatgatggtgtttggtaaagtataataaaattataaataattattgtaatagaaataatgtggtgtgtaattttcagtagcaattggcttcaacatgtgagattctataagaaagaattgggagagagggtttgggaaacacttagagtgaattgtatgtaggactgaccagaatatttgtttaatcgcgaaacatgcattgtttgcattgtatggcatggtgtgatgtggttaactttattcgtggtgcaattataattaaattttttactatcgtgagggtgtgattcaattaagcaaaacaccctagtgaaaggtaagaatattgttccgaaggctattttcactaggatgttggtcaaacagagtggtctaaggttctccttggcaatgattctaccttctctgcttactctgattgatcctagctcaatcaagatatgtgttgatggttcctttaaacatggatatagtgctctggcggtagtgtgttacattcttgatggtgatcctcgggttgtcactaaggtgtgtagagcttctagtgccttgaaaatggaggctcgtgcaatcttttctgcttgcaagtttgctcttgagcaggagtgggaagagattaccatctgttcggactgtaagcctttggtggatttcctttgtggatgtgctaagtgtccacattggagcatttgtgacattctcttctgtattttgagttctctattttaagtttgataattgtaattttcagtttattgcaaggtcccttaatggccaagcagatgctattgcagtttggactcgtatgtctaaatgctctcgtgttttcaatttcggggagctgccccctgttgtggtagtctaagtttcttcttcattgcatttctactttgtgacaaaaaaaaatgttaaaaattgcaatatgtattaagagttagtcccacattnnnnnnnnnnnnnnnnnnnttgtgatatataagatgaaagggctactcctcccattgccaa

SEQ ID NO: 14152 - DNA, 7111 bp, Cannabis sativa
actgctggtatcattttgttagttttgtatgtggatgatatcgttattactgaaaatgatactggaggcatctcttaagtctttcattcatactcaatttcacacaaaggatttaggggtgctcaagtatttcttgggagttgaagttacttagagtaaacaaggtattttttttgtctcaaagaaagtatgtactttatttgttaactgagataagaaaattgggagcaaaaccttgtaacactccaatgaatccagttgtgcatcttagacgtgatgggaaactatttgaagattttgagaaatatcacagattggttggaaagttgaattatctaactgtggctcgtccaaatattgcattctccgttaatgttgttagtcagtttatgtcttctccaacaattcatcattgagcaacattagagcaaattttgtgttagttgaaaggagcaccaggaacaggtattgtttacaaggatcatggatacacttagattgagtatttctctgattttgggcaggctttaaggtagatagacgatccacttcgggttattgtgtatttatttggggcaatcttatctcttggaagagtaagaagaaaaatgttgtgtctagatccagtctgtgtgtgtgtgagagagagagagagagagagagagagagatagtatggatttatcaacttttgactaagtttggatttaaaacttcagttttaacaaaattgtggtgtgacaatcaagttgttctttttattgcctcaaatcctgtgtttcacgagcgagctaagcacattgaaattgattgccattttgttcgtgagaaaattcaactaggactaatctccacaggacatgtgaagattggacaacaattatgagatgtttttacaaatgctataaatgaggtgcgggttaattattttcgtaacaagctagacatgattaacatttatgtttcaattagagggagagtattagaatatattagctagttagttagtttcctatttaatctctttaatttaggtagtttattattttctttctaattttgtatataaatacatactattttatgaaataaaatatataatttattcactattttctattttaatattaaattatttaatatattattaaaataataaaagaaaaaaaaaaaaacacacacaaaacatgcacaaataaaatttaacaaacattaccttgataatctgtaaaaaaatatataatattaaattagtaattttgcaattaacttataatctatacccaaaaaaaaactacactgaaacaaaatacacatatatatcggaaagttagttgaaatttttctttgcagagttttattactcttttatcatttaatttatttaaaatttattgataaaaacatatatatataaatatataaattaagtattagtaagatgcaatttgcttgtttgccagttgtattagaattgctattatttaattattaatttaaataataataataaaattaaatttgatacaattcaattatatttttgaaatatataaaatttaatttaattttaaatttacttataaaaaaaatacatctaactaattttattaaactaaaaataagtaaataagtttaaataatataagtaataaatttattataaattatgattaattaattgaataatataattaataaatttattataaaatatgattaattaattggtttaacatctaattcaaatttaagaagaccttcaaattttggcagtaaaactttcaaaattactgaattgttagcaaatttatagtgtcatttagttaactgctattatagattgcttatgtgtacactcttgtacacgtgtcaaattatattggtacagctaatattattattttaaaattcatttacatacaaaatcaaagagtaaatagaaaactacctaaattagacagactaaataagaaactaactaataagctaatatattctaacaattgaaaagtaacacatccatttgcattattgtgtattggattagatttaaactattgtgtagattgaatcagatccaaaatataaaattcacacttagtgctgattagatcattggattagaaatacagctctaacttcttttgttcattcatgttgcctaaatctttgtttgttatttaaaatactaatgcctaagagtgggattatatacaaactgcattttgattttctgcaaaatttaaatccttgatatgttcctgtgtttaatgatttctcttgggatgaattgaaagatatgggcattgcaagatggaacatctgtggttgtgggagcaaagaccaacagagcaaaagctgaatttccagacgacatgaatcggttgcttgatcagcttccagaattagttgaatcatctccggccaagtaatttggtcttgtctctcatactactgataaagaacaaaaactacttggcggaggatgctagctagctttcatttggaattttgtttgaggtaaaagggatccaaatatagtcacaaatcaatttgattgcttagataatcgacaagtaaacagttactgttctgaaattttgtattattgtaaccaggagtattctcctagtattaggacgatgatatttattaccagctacatatgcaactcaccgttgtaagttgtaattaccatacaaagtgaatacttgaaaagcataatataccagtatatttttggtaaattaaacgtttctctatatagattcaaagaacttggatcactcacagcagtaacaacgtcactttctattatttctatacgatgattaatattctttaggtaattggggctcatgcataacaaggagccaacatttcatcctaataataataataataatacaataataacaatgctccataattaagacagcgctgtctgttgatgtataaacactgagtctaacttaaactaagcaacttgcaaagcttcttcgctcttaaggtcaaacaccttgatgagaacatcttccacaacctgataaagaaaattccttgtgagtagaatggagatgactttttatgatttcattgaagcggtttgctatttttgattggtataaagaactcaccttatctggagtagaagcacctgatgttacaccgaccgtgatgggaccctctggtaaccagttctctttctcaaccaactctccatgctaccagaaaattcacaataaggaatttacaacaatcaggacaacagattagaaggaaccattgcttaggagttctgctaaactagtacataagcagaaaacaagaaataattagattgcaatggtagtcttatctgtccaaacttacatttagcttgtaggctatcttgtttccaggacctattctctgttcactgtcaatccaatacgagggaatacctcgttcctctgcaatctcttgtagatgagaagtgttactagagttccatcctccaacaactaacataaggtcaatacgttcctccaccatcttgtacattgcatcttgacgctcctaaagaaaaacataaaaaaattaactcagactacatgacacaagaggaatgccgtcaattaatcagaagaacaaacaaacaaagaaaacaaaatggtcatttgacagtaaaatgttttgctcgaggaaaatgaaatctcagaagtaacaaaccggacaagaatacatgaactgaagagaaaggaacttattacttgggttgcatcgcaaattgtgttaaagctttggaagtgttcattaatgttttcaactccgtacttttgcatcatagtcctctcaaccagtttccctgaaattaaagaatataagttaaaaaagacattgcaaacaagtagtggcaattcttcaagatctatagcataaccagctgcaaaaactaaccaatctcttcggtttcccccttgagcattgtagtctgatttgcaataccagccttcacaagatgtttgtcaggatcaaatcccttagaaactgcattcttaaatttctgcagacaaagcccaagaacgaatgttataaaactattgaaaaaattgtgtcaagaaaattatcaactaagtaatcaaagtgaataggcaaaacacacctccataaactcctctcttgttgagctggatccatcaagttgaccgccaagaatataatcacagacatacattgcctgaattgaagaccataaaggtttcatttaaaatctaaagcataaaacttgtttgtcataagagagttgtttacctctttcatgttctttacaataatgtaagttccagcaaaagatgcagtagctatagtctcctcatgagcatatttaccatgaataatggaagtgtattcacctttcttatgtttctcgactgtattccaaaccttacaaacagaagatttgtaaccaaacccattaataacataaaatttaaacagaatcccataattcaaaaatctctattattaaacaaaaaggttaccttggaaacccatgggcatgtggtatcaacaatttgaacattcctatcactcaaagccaacatctcatccactccagcaccaaaagcaggcaatatcacaacatcacccttgtttacaatctcaaattgtttcctcccttcatcaattggaatattttccactttcatttcctctagtctctatccaaataataacaataaataaacatataaattgagccattacgaagacgaagcacaaattctaattaaaaaaaaaaatcaaaccttgttgactgtcggattatgaataatttcgtttgtaatccaaatcttttcttcggggaactgtttccttgcttcgtaagcaatttggacagctcgctccacaccccagcaaaacccatatgcttcggccaattttaccgtcacgttcccccacctgtactcatttccattatccttcaaagtctttataatatcacctgaattttgtttcaagtaaattaattattcaattaagcaaacaaaaaaaaaaatcctttaatcataaacaaatcgaggaatcgaagcacaacaacatactggtgtactcgctgtccatgagttgaagggtctcttccttatggccaaaacctttccgattgtagttcttgcttcggaccaagttcttacggaacactttcgcatcgaaatcagaatctgctgccgttgaagatgactcgccggcgcatcggatgacgaaaggtttccggcagcggagggttccggttacggagagaggctccgccaaggcgaggtcggtacggattggaatccggcagagctggaaagtgatcgacatgggagcaggaaggagagggcacagtaagcacggattgtggagagaatttagtcaagggatcttgttaatggttgtgtgcattttatcccccaacgagtacgagattttgttggtttgtgtactcgttttttcaatgtaataataaatagcctaatactaatacgtaggtactctagtctaattattggaagattttactttggtgttagttttgggttacatgaaaggtgggcaagggaatggggctatctcaaattaaagtgtacacaaatatatattttacccctctaaatgtttgtgggatccactatattaccacctaaaaaaaatgaaacttacaaaaatactgtgtttttttcttaatctttattctttacattaatattgagacacgacatttctttcttttatactgttcaagtctttttttttttttttttagaaaattgcattctataccaactttattttatttattttaatttttacctttatttccatattctttgatatatacctacttttatagatgatgttcctattataccccttatataaatgtaaatcatgtgctacacttaagtagatggtaaggatctattagacaactcactcataaaagtgggtaaattttaataaaataaaatatgaaggtatttttggttaatagatagaaaaaagaggtattcctaaacttatcccttttttttttctttcatactatcaaggcccattatatttacttttatactgtgaacagtaacaaggcacaaaatggcgcctccttcctagttgaggacggacaaatcaacatcagaatcatagaaacaccaggaaaaaaccataaaatccggcgaagaaaaaaaaactattaaatcaaagacaaatcaagaacgaacaacaacatttacagcagatttttttccaacagaggtaaacacacctaaacccacagtattttaatttttaaaaaactaaaaaaaaaaatacacctagatttagatctaaaaatttaaaaaacttaaaacagttaatctgaaattgtttaattatacatggtattttataagaaaaatattcatatagatcatccctgagaaacgactaaaaatgtacaatacaaggttgttctaaagttgtttttgcgttattaacacaaattcattgctaattatagggatcaccacaataataaataagaacaccagaaaatgacatgtgtgcattattttgtagtgttattttactgttgttttaatataaaaaaaaaggtcacgtaaatgaaatattgtgaacaatgacaagtcatggaatctataccagttctgataacgagcaatggacaatgggaagaagaacataattatgtcaagtatgaggctagtggacaatttataccaaaagattgcaagtatgaagagctattatgaatactacttacttcattggggtgcgaaagcactagaacaacactgcaaatacagtaccaagcaaaagaaggaataccaccgataaaaatattcaacgatgccagcctctacttttacttgcaattgaagatcaaagaaacatatttccccacatatccattatgtgtcaaccaacagaacaacaacacaacacctgctgcaatcccaaatatcacaaccacaacaacaccctatcaagagaatgtggcaatgctcgaaaacaacacaacaacaatagaatcatacacagtggaacaccaattagaagaaggaggtaggggtgttcataaaaac

SEQ ID NO: 14153 - DNA, 8589 bp, Cannabis sativa
ccagtaggtgaagtttttctagatatcacttagcatagctgtggactctatctctgtaactgtaaaaagaaaaattatacccaattgcgctgtgtcaaaacttgcaataaatgttaaccgaagcaccaaaatatgtcagctaatatacaaagcatcattacatgtccagagaagcaaaaattatgatttatatcttttcctctattacaacttcgccttttgagatcgacccgttgggagattatgttagttttggaatttggagctcgtgtttggaattgggttaaatttttttggagtctgaaatctaaaagaattgatgttgagaagattttcctctatgcttcaattgtggtgaatacgatttagaaagttcgtaaagacaaagttcacaataatgttatgagtgacattttctattgtattaactctatttctatatgttatgcagattatgggtcttgtttgtttgcatcagcgaaggctgttgagtctcctgtatggtccccttttctagaagattgggtcaaaatcaactgcgatgttaaagttattagagatttcatgtgcatagtggctttggctagagaccactcaaggtctattttgtgggtggctataaacattctcaacttttctgaccctctcattggaaaagcagcagcgtgtttattagacatggagacaactatttcgtcaaatttttgttttgtgatgattgagagtgactctgagacggtttccaagacactgaagcgaacctgttccaattgagatattagtaactatatttatcattgtaaacaactctctaatcctttggctaattgtaattttttttattattattattttgagattgtgtaattttgccgcttattatgtggttaggtgagcttccactaaaaaagttactggcactattgacctcgcttctataccagataacatattatgtaatgatcgttaagtttaacacttggttcttcttttaatctattcgattttcgcttcaaaaaaaagttttgtaagagaaaaggtctaagtgaaattatgattagaaataatttcatttcatttgagataatttggatctgccactcctttctcataccctgtgggaataaataagctcctttaagtaaatatatgcttgcatggtattgtgaatgaatcttttaaaaacttttggaataaatattcacaactgaattagagttcatgagtttgtctcgcttccctctttctattgcacttttgctttttaatctactatttcgaaactacttaaaaatgcttcattaatcattactactcatcgctgcctaaccaagtttagttcaccaaaaaaaagtacaaaagctaaaaagttttttttttttggtcataaacttataaagatacgtgttgctttataaaccaaatcatcgatcctacatcctaaaccaaatctcttccaatctaagttgcttacaactttcagaagcctcttcgattgctttaatgctaaagcaattaacatttattgaattaattgcttatgtccttcagttcagagagatatttatgaaattcatagcattgataaataccaacttctgcagtacataagccgaaaaagaaaggctcatcagcttctcaaacaagcgttggcttttactcagaagaactaaattaacaagatcattacacaaggctcactcatatatatctttacattttaaatctctctctagtctctaccacaatacagcactgccaaaatttgaatttgatcagatcagaacagaacaagatgagaaaagcaatagacctcatttattgtggcgctaaaaaataataataattacaaaatgtatatacaagtagatatggaacaaggaaacattatgcacctcacatctctgataaaagattgcttatttttcgaagttccttgagagcagccattgctgttacttgtcctttgcctactagaatgtttttcgagaaattctccaatgaccctgcttgagtcgccctatcttgttggaataccgactcgattacctgttttacaaattgttagccttgtggtaatgccacagaaaatgaatgtaatgttttagtaatttttcaaaaccaatttttatcattatttcccatcatcttatcacaagactagaatcaactagaaacaaaaacggttacaattggtggaaaactcagtagtgctatcatgcattgaccagctaaaatatacaccataatttgtcgggggaaatttgaaatcacaataaatcatttcccatttctgaaaatattcatgtctttaaaaatctaactatttgagcttccatgtaacattatgtagaggtggcaatgataaaattattcctagaagatatactaagtttaaaaatgaaataatgatggaagttactgcaagggaacagacatatcctgccataaaatctaaaattgatcagattggatatttcagaaataagaatgttacctgaatatgttcaagcatagaatgcccaagattctttaaagtacccatcacattctgatcaacgacatctcctttgccagactttgtagactcccaattaccagacccatcatcctcagaaacagttgaagttttctgatgactttcttcattggcagactttgtagcctcagaattgcctcctttctcagacatcccttcaatagtaggattccttccaaacttccaaaaccattgaaatttacctgaaataggttttttctcttttaactctgtcactggatttcccagtgaatcatttttgcattcagatttttgagagacaacctcggggggatgagaaattggaagtggtgaatcctccgaaatattctgggcatgttcatcattctcgtcaagagataaattagatgcaacactacttttctctgaatcattttcatgatcattagtttcactatgaggacttgttggatctgagaaaatagatgaattttcttcactcccagcatttccgctcgaacatctatcctcagaaatgcagacaatctcctgacaaaaaccatcttctctactatgttctacttctgctgaaataatatctgtattgcctgaaacttcatgactacctacattgcccatatcatcttccaaaccaagttcccgggaaagatcttccagcaatcgtcgcctaacagatggcttagggttctttttgcttttcacaaaattgcttggacatgggtctgactccgttctagacagtcttaattttactttatcggtccatcctttcttctgtgttggaacatttttcttcaagctatcttttctgagctcttcttctctatggtgaactctccacttctcttcccagtaacttacagataccaaatttaatggagacgttggagaagaatcaattgattcactggaacctctcacaaccatagatttagagtggttaaaagttccattataagaggatgaagatgagatattactgttcaatgcaagagtctgcagagacttggctttctccaacaattttttcaaatccacattctcagggaaattcaataacctctgaagacatgaagtagcatgctcagtgccaagtaaggaagatctcaaatgaagtaacatagaaactgctacagctgaaataaatgctcctcgagaagaacaaaggaccccatatgagcctccatcatcttctccacttttctccaattttttattttctgatgcgaatatctcatcccaaattgtcaacagacctcctagcgaaaattcacgtccaaataggactcgcaaccagcggagtgcaaaatactgtggctcaacaccaagctccactagatggctatgtagagatgggtcaacaaacaacaacagatgatacaatgcagcagaagcttcaatcacagggggtaagccagattgggattcacgagcaggagatggagagaagaactctgccatggcaactgcaccattggctccattcatcaaagcatcaaacaggcaataagcatcatgctccataaatttctctgaaataacaatacccaattcaccttcagcaccataagggtcacttagtaatattattgtctgtatctcaggatcaagctcattaagacttctcgcttttgacacattttcatgggagtcaatgttatcttcagtataatcagaagatcttctgtaatcaaaattatatgtatcattgtcttgaaatgatagaccatcaaatttgtccatgaaatggtcttcatagactgttcgcacatgtgaaagacgctctacatcaacatgaagaacatatagaagaggagccaagagttcatgcattcctacaaaagaaagtttacgttaaaaaatcaagaagaataaaaaaaaactattacaaaccacgtgtcaggaaacaagttgacaaaaaccacatagaggtaataatatttttaaatgtaaattatataaatctatataatataagaaacaaagtcggtacttggatataattaattaatctaatcacaagaaagcaatataaattagaaagaaatgacaatgaagtgtgtccaaccgttgaagactaaaagagctatactacataatatacaaattaatcttgcaagtgatttccttcatgtaattatgtaatttaccttgtctgtaaccaaactcagaatgtctaaggcaccacaataacaatattcttcttaacatgccctggcatcctggtgtctggaagtagctcccatgttctgggtataacctggataaatcttggtcaaccattttctccagttccgcatttcgaaagaagcgaccccaagtgctatctgcatgtagcatttacaacaggttcaacatcagttcgtacattgtgtacttgttagccacctaggagttgtgaagagactaactactatcacatgcacttcttttcttcaaatttatactaaacaaagagtaatatactagccttggctcatgaggagacatcaagttaaccagtagttgactaagtgtgttctacagaatgggataaaacaatgagcccatgtgacaacctttggaacattttctttttaatcatcagtatttcgttccattttctcatttatcaccttgtcttcagattaataagacaaagctatttaaatttgcagatgatataaagcctaatctagaccatattcttcaaatgcaacatcacaagttcaaactcaaattctaacaatagtaatccccatcctccttccacaacacaagaagggaaagagaaacaaaaaaaccaaacgaaaaaaaaaaagaagaaaagtaaaccccagcaaagcaaaacataatctatgtggacatttaatacttgcacacttttattggtataattggcttccaatggtttaattaccatgcatttaatttggatgggtacaaaacaaaacaataaatattacctgggttttgcgacagtggattgtcaatgaccacatctgaagaactgttccctttcttcaggatatgtggatcaacaagaaggcgtcttcttaatccagcatatctggcataaaaataaaaaagatgaggaaatgtacaggcgaaattcatcgagaaaaatctaccgcaagaacacttctgataaaagtgaagtcaatatctgaaggatctaaatttaactgacaacctaaattttgctcgagttcgcagttaattctatgtagaatcttagtgaaaacaaaaagtaacaatgcttgtaggaaaatttggatcaagtggcacaataatcagccaatctgctcactcagtaaaacaaaaatagagcataccatttaatttctagcttccaaataaaaaaaaaatcagtttactcttagacatcgaatggacacaatgaacaaaatcaatgccaaagaactcaactggaaaaataatcacctttgggctctatctaagcacctttgaaatcaaaacatacatattcaacagttgaaacaaacactgtatagttttcaaggaaaaaaaatatcctgcagaagatataagattagaagagcaggccacaaatcccttcaagaaagtcacaaactaaaacagctctaccgagttggaaaattatcgtcctcataattttattaatatttttatcctattttttatatgttatccgcaagtttcttctttttgtttttggctggaattatccgaaagtttgatgaatgtataaacagctctttaatcttttaaagcagaattcgagctggaagttacctcctacgagaatcagctgtgacgcgacgaagatcgtcaatggaagaaggggaagaagacgacgatggcaaaatcccaagatttatacgccactttacgcttctaagtccattgaaacgacgattctcatccacagatcccttaagagaaaaggaattcgagcttgaagacccagacgattcagccaatgtcgactcattcggaaccggaatcatggcttttcttgcaatacttccaaagacctatattccctaaaagtaaaaaccaaaatcaaacacccagaaaatatcaacttcccacgactattttaagcagaatagaagaaaaaggacgaaatttcgtagaaacagataacgaatttaatcaattgaaaagaattttctagagagagagtgaatttaggggcaaaaacctggggaggaaacgagagagagagatttacgtcacggttaggaatgtcagattctctcttcttcctcctaggctctaaaacagagagaaatgaaaaccataattatcaatcataggaattaaaaatcatctgcacaagaggaagctttcatttttcaccaactttatcttttcagaagagagagagagaataacaagtttgtttgtttggagagaaaataaatgaaaaagaaagtgtggatttttgatggcatggaaggtgcggtgagctgtcgtcttctattttgctactctttctctcactaaaaacgatcactttcctaattattgaagaatgttgtgtcttttttgtaaaacttctatttttggtccccacttccctaaaaataaaataaaaggcaaagcaatatttttggataagtcacgttttatttatgaaaattaaaaaacaaatcatcaacttaagtttgaagtcgaactaaattaggggaaaatcataataaataaccctaaatcatacatgtttttattttaaaaatttgtataaaaataaccctacctattatttatattgtctttttcacataaaaaatcaatattttttttttatattatttttcagaataagaagcaaattacttaaaatttatggcatatctatattagttttgttaaaatcttttttatttgaaagttatgtcgatttttttaattttttttgagttgttgtgggttgttagtatataatttttttttacatgtgttaacgcagatttcgttaactaaaaataataagtctttacgtgataaatatattgtagaaatagtaaataacgattaaataatttcatgaattttacgtgatttagcagttaaatttgcatactccacgagtctatcttattctgatatttttctgaagaattgatacaatatacaattgatgatcttttttctctcaaaatctccgtcctttttttcgtaaaatctgcccctatttatagaaatataggttggtagttatttacacttgcgatcgatttaaaatgtaaccgttcatgaaacgtggacaattctcacgttttatttaaatgcatgtggaataatatcgaaaaactgcttaactactttttgttcttgtccttatagatggttaatgatgatttggactattgtatctcggttaactccgagttgttatccttgtctatcataatatggaaacaatgctaagtgttagcagatagttcgcctcgtcaagtttctttagttagaatcgcgaggtggttatctcgctattcataacccgaggttgctttgtatgattgtattcactctactttgaataaatgaactgtcttttttggttgtgtactccgaggcaggtgtgtgtctcgttaatataagtttcaatagtctcttatccttatctcgcttaagactatgtagtcagtgagttatgaatatgctctattaatccgttattaacgagtttttttttttgaattaaataatataattttattatatcaggcgagttatattccactgcaagacacgtatcactttctgaaatgtagccgaatttcggatataacaacgtgtgttggtatatagattttattgtacattatatttcttttttgttatatggtatattattattcttggatgatatttattttttattttactatgtataatagtgatatataattttgttagcataatacaaatattttaatgtatgtataataattttactggtatgctacatatattttattatttttttatatattttaactgtattatatattatttattttaattaatttttattttattatatacaatggtggtatataattttattatcatggtatatatattttaactgt

SEQ ID NO: 14154 - DNA, 3673 bp, Cannabis sativa
atgtaagctttttagtgttaaaacatgatgtattgtacattcttctgggatagggatattataccagataatacaacttcaaatgaatggatggggtattagaatgggcccttattcgaacaaaaacacacacacacacttatttgtgtggaagcacaaacaagcccataccatatgtcccaaatgggaaatgtataggaaagtagctgagaagagtttcagagaatgaaatcaaagccaacacaacactgttccttagcttagctgtaaccttaaatcattttcaacataacaacaaacacaagaaacaaccccataaaagctttcccgcactaactcttgtctttctcctacaccaaaaaccctcctcactcttcttcttcttctctctaatgcacccaaatcgttgcctgttcatcctccttttcttgaccctctatggctttcagggctcctcttacaaggccacagcactgggagtcaactggggtaccatggcctcccaccctcttccacccccaaaggtggtggagcttctaaagtcaaacaacttcaccaaagtcaagctctttgacgctgacccacttgtccttgaagctctttctggctctaatattcgtgtcaccgttggcattccaaataccatgcttaaaagcttaaactcttcaaagaaagctgctgagagttgggtacatgacaatgtcactcgttatgtttctaatagcggcagccgagttcgaattgagtatgttcttttctttttctttatcaatcttgtattttgcccctgtgagtacaatacactggggccattgatggtttgtttgtaatatatgaaaggtttagttcttttcttactgtaattttttcagttgagaagcaaagacacaagtgaacactatgaaaaaacatgccccagtagcttaagagtggatcatttaactttggtgtttttttcttcagttagttatacaagtgaagattcatgttacattataagctagttgatagtattatgatcattgtacacttgattctctggaatattatccatggttgattccctcagtaggattgtgtttctgaagttgaaaattgattggattattaagacagatagctgataggggatagagcttcaggtcccttttccttaaaacaaatcaatttaattccatgaattaaccagattaacattgaatggtgttatctagttgcttttgcctactgttttgttttgtgttcattttggttataggcatctaataagactttctacaggtatgttgcagtgggagatgaaccatttcttcaaacttatggagagcagttttatccttttgtcattggagcagccatcaatgttcaaaatgctttgctcaaagctaagttggagagcatggtgaaggtagttgttccttgtagctttgacgctttcctttcagaatccgggctcccttcaaaagggcattttcgagctgacattaacaaaaccatgattcatctgctcacatttctaaccaagcatagctctcccttctttgttaccatctcaccattcttaagtctccaccaaaacaaaaacatttctctcaactttgctctattcaaagacactgcaaaatctcgtaataacagccaccgagcatacaaaaacagctttgatttgagctatgatactctggttacggctttgtcaagtgtaggattctccagaatcggtattgttgtggcacagatcggttggccaacagatggagcagccaatgctacctcggccaatgcagaaacctttacaagaggcttgatggagcaccttcacagcaaattggggaccccattgagacctaaagatccaccgattgatacatacatacttagtctcttagatgaggatcaaagaagtatagctgctggaagctttgagagacactggggtctcttcacttttgatgggcaagccaagtatcaatttgatttcggccaaggctcaaaaaaccttgtgaacgcacaaaatgttgagtaccttccaccaaaatggtgtgtggtgaacaacaacaaggacttatctaatgcaagcgcgagtgcattgcaggcttgttcttctgctgattgtactgcattgtctcctggaggatcttgttccaatatcacttggccggggaacatatcatacgcgtttaacagttactaccaacagcatgatcaaagtgcagctagctgtgactttggtgggttaggattaattacaaccatggatccttctgtgggtaagtgtagatttcctgtcgaattatggacatctcattctcattcttttcagagggcatctgttcttaggactacaatcttgctagtggcagccattttggtaacgtgaaacattttagcatagaaaattgattagtatataagggcattttcttagttcaaggcccattcttgcaagggagtatctaagttttgtgaagcgaggattaaatattcatgatatctcccatttgaagcaacttttgaaatgacaaaaggagttttggtgatgaaacatcatttcatgtagtgtatatgaatttatgtatgtatccccttgaattggttagtatcgttttttatgattgtaattctttctttatattaaattgttttggattttactatgaaatttacagcctaatttctctctcaccatcttcttggagtaaaatcacaccatcttctaaactttcattaaagtagaaaatatccatagctagaaatgtgtacatatgacacttacataatgttttggatcaattctcactaactttcgttatttttaacttcaccctctcataaaaatgttgattattagttttggtttgagcttgtcgattaggctgaggtcatgatggtcgtacgtagcttgggaaagtagagtgttgttacttgttaatcattgataaacagacacaaggaatgggagatgggactcggaaatggtcaatgtcatcatgtattgtcttggagagatgggttggtaatttatttgtaagggaaatttgattttttatgcatgattttaagggttaattagttaggaaagcttaaactataggtaattgttagaataggctcactttatttaaatcccaaaactaccccgctcaaaattccacacccattctctctgttcgcccaacctaaatccagtcgtcccaaccccatatcgccccaacctagccatcccaaccccgatcgaaaccccaaatcgtcccaaacgtcagccacactcacacggaggagacccaccggcccacgacgctccctcactgacccacggcacaccaccaccgacccacgatacccacgacgcaccaccaccgaagcaccaccaccgtattttatttttttattgattttgtttgtgattttagtgttaaagatagattttgttagattgagggataggtctgatggggtctgatagggtcgaatgaaactgtgagtttgcgaggtagaagacattgatccgatgaggggtccgatgggtccgattgtgtctgatgtggggtccgattgtgtaaatgagggtgatgtaaatgagatatattttaggaatatcataaaagttgtcatatcttacaaatattaattattagggttatttgcggcaaaaccccctaaagtagagagg

SEQ ID NO: 14155 - DNA, 6708 bp, Cannabis sativa
aaaatagtttaactaataaatataatttatgtaaatatattatatacactattattaaaaaaaaaatatatgaatcggtttcattcggtttattcatattaattggacagtttagaataattaattcacttggacggtttgtaaatttggttgaacgtcactaaatttctctatgtttaatggaacgtgccaaataccaaacgatgtctaaaatgatgaagtggctatggcgtagttgtaaaataaggtgtaaaacagggacttattcgtcattcggacaaaccctagtgtaacagtgactcagaggagggagctcccatttataaacctcatcgtcattcttactccttccgcttcattttagttactatcgatcagaggccttttcaggtttttgtttttcctcaatctctcaaatttttttatttcttttctcatttaattccgctttctgtttgattgtcgagaaaatggactgcatagaattcatgatggagcatttccatttccatttccatttttcttttttttttgagctacatatgttgtttgctgatcgaatttcgaacagggaaaacataataataaagctggaaaaacctagaatgtgtcctaagggttttaatactttgatctctaaccaaattacttgaaatttgagtttatttatttatttaaacaaaaaaaaaaaagaaaaaaaaaaaaaaaaaaaagcaacgctggtacttgatttgagatgggatttccttaaattctcagacatgtaccttgatagaccttttatgtgatgaccacctcgaaaactcataataggttgggaatttttgagtgattaatggtgtgatgcgttatgctctgtttctgatgttatttcgggtttaagttgtgagtaatgacgtattttcaatctgtgttactgcttctctgagccaagcttctttgtgaagcagaaagtagaaaccaaaacgcatacagttatatgcgagctgggctggagactatcaccttagcatcacataatattttataattttaatggagcatttttgttttaatattgaaaattgatcatttctgggtcaatatttaaatagaactttgtgcttgttttttagtgaggtgtttttatgaattgtataaatgtagcatattttttgtttttttggactgtaattgtttaatcccctgcctttgaaaaacaaaataataaataaataaaataaatttacttcgtttgccttgccttttcattatgtgaggctgataggcttgtggcattgtaaactatagaaaccatgcttgcagtcttaaaattttcattgggggagaggttttctttgtatcttgttttatttagttcacttttcatgtgaatttcttatgggccacgattgatgctcttgaagataaaattaccgttgttcattccttaagtgtaaatgaaactaacctctttcttcatttgcaggtcaccgactcactggaaaaatggctgatccgtatcagcatcaatctgtatttcagaaaatacatgggaaatctcacctgatctctaggctttcccctaacatttatgctagaaattacaaagtagatgggcaaggttccatgccaacatgccagggcactggtctggcgcatgtctcgtacgtgtctcctgtctttgtggaagctcctgctgaaaaaggtgtagctggttttgctgtagatttcctcatgggaggtgtttctgcagcagtttctaaaactgctgctgctccaattgagcgtattaaactcttaattcaaaatcaggatgagatgatcagggctggtcggctttctgagccatacaaaggaatcagtgactgctttgccagaaccatcaaggatgaaggtatcattgctctctggagaggaaatactgctaatgttatcagatattttcctacccaggtaaatattcactcacatgtttttgctcttctcatcaatcttggttcacgtgcaagtgtcattgcttgatcttagtgaataatttacaacatagcgattaaaaaggggttcttaattcaagtctatttgtatcttgatctatataatattgtggaactgtaaacagtaaaaagaccgatgattgtacttgatttttttttccttcaatagaaaattgagtactcttaagttaatcttcatttgtttaatgttgcatggtaggctttaaactttgcttttaaagattacttcaagaggcttttcaatttcaaaaaagacagagatggctactggaagtggtttgctgggaacctggcatcaggaggtgctgcaggcgcttcatctcttctttttgtgtactctctagactatgcccgtacacgtttggcaaatgatgccaaggctgctaaaaagggtggggaaaggcagtttaatggtatgattgatgtttataagaaaaccctcaagtccgatggtattgctgggctgtatcgtggattcaacatttcatgtgttggaattattgtgtaccgtggactctactttggaatgtatgattctctgaagcctgttgttttggttggagatttgcaggtaagttacgatcttttcaatatatgcttgtttaatatttggcattaatttatttgagtgctccaggtatcatgattttcacttgcaaggttatgcttgtgatgttattttctcttgtttctaggataacttctttgctagtttcttgctgggatggggaatcaccattggtgctggattggcatcttaccccatcgacacagtgcgcagaagaatgatgatgacatctggagaagctgtcaaatataagagctcattggatgcatttaagcaaatcgtcaagaatgagggtaccaaatcactcttcaagggtgctggtgcaaacattttgcgtgcagtggcgggtgctggtgttcttgctggttatgacaagctgcaggttgttcttttgggcaagaaatatggatccggtggtggttaatgagcagcagcagcagcagcgatgatgacgagaattcaaagactgaagtggtgtagatgggtctcctcggagttgaataatttgaatgaacagtagtcaaatttatgttttcaattaatagagaaactaagtagatatcatacagaatctgaatttgagttttgagtgttatccttggattttaaagcagttcctgtgctatacctatatcagctttttcattcgatgagaatatttgaattcagcatctttaaattaacattctaatcaaaaggctctattacattttgtgtacacgttagcccctgaattgtcaagcttaagatttttctctggatttcacgcacgtttcttcacattttaagtcaatgttacaattgcagcctgaaatttaaaaatgtgttgggttctttattcaatcactcaaaatggatatcatacttctaaggggattaaagtttcaatccaacttctgcatttggttctggcactggcagtgtaatgttttattggtcttgttgtaattgcttgcataatgtcatattatgtcatattacatatttcaatttagttaaatatatgtaatgagttgttagattatacaagtaatttatcttataggatactactgggtacacacagtagcttatagcaatgctcagaaagaacattcgaacacattagtggaaattttgtgccataaaaaatactagggaaatttggtttctagggccttttgtggtagtgctgaagtcaactcaactttggcctttataatgaatcctttgagtttgtcttttcttcctttatgcggtgagtgaaatatcttattcacaagaaaaaaaaaagttggatagagacaaaaaacaaattcaaagaccggaatagattggtccatgaattgattttcaattagacaaaagttggtagttttgacaacagcacatatatcaagctactccaaggttgaaaatttgtagccatggcctcaagttctaagtactgagcatattttgtttattttgattctctgtgaagaaaccccatttttctcccaaagggtattatatatgtacgaagctgtctttctccttctccactcctaacaactgcagagaatacgacatggaaggaggtcagtccttgtcgtgcgcattgtcctcctcttcattctcctgtcttgtctactaccaattaaacccaacttctacttcttctttcaaacaacaccactcaaaaataatataaatatatcaaattcaaatcccaggccagttatatcataatatgtctcttgtttggattttgatatatatatcataaatatttatatacgtacacatgatcaatttggtaacggttaactgtcgctagctaaaacatgtcgttgggtgacaatttttcttcccgaccattatcatatctcttgcacaagaaaactttaaaagcttattaaattaaacaacatgattaaatacatgactttgtatactaatttaattaaaaaacatattctatctcaatttgaaaatcaaacaatataataataacgattaagatcaagatcaagatataataggactagctatctctttacataatagattcataaattcacattctcaaatatataaaactcatcaaaaacaaaaaccttttagtatatactaaaatggcttccgtttcatcaacccttctaatattcttaatcatcttctcttcttttatccttaataattccatggctgcaaaacaaagcaacaaccatcaccaccaccatcacaaccgccattcttcttcttcttcttcttcatcctcagacgactcaaacaacaacaacaacccaagactccaccaagctttcatagctctccaagcatggaaaaaggtaatctactcagacccaagtaacttcaccaccaactggaaaggtccattagtgtgcaactacacaggaatctactgtgcaccctccttagacaatccacatctccgagtagtggccggaatcgatcttaaccagggtgacatcgccggattcatccccgaagagttcggactcctaactgacttagctctcatccacctaaactcaaaccgcttctgcggaatcattccacaaacattttcaaacctcacactcctcttcgaactcgacctaagcaacaaccgtttcgtgggcccattcccaactgttctcctaactcttccaactctcaactttctagatattcgcttcaacgaattcgagggcccacttccttcccaactcttcttgaaaaaattagacgccgttttcgtcaacaacaacagattcaccagcttgaatttcccacaatcgatgataaacggttcaggaacggcttctgttttggttttcgccaacaacaattacggttcaggaaaaacatttacgattcctccgagcatagtgagtttcgccaattctttagaagaatttctcctctccaacaccaacttgtctggttgtttgcctcaggaagtgggatttttatacaagcttaagctgtttgacgtcagcaataatcagatcgtgggtcccataccttacagcatggctggtctttttcatttggagcagttgaatttggctcataacaagatggaaggtcttgttcctcctgggatttgtatgttgcctaaattagaaaactttactctttcttataactttttctgcgaagaagatgagatttgccggaacctgagtagtaatgataaaaataaagggaaaagagttgtttttgatgatcgtagaaactgtatccccgagaggcgtttccagaggagtgagaaggagtgtagtgctgtcgttgaacatccttacgagtgtcatgatcatgatgatcaagttgaacattatggttttggtggtgccggagtaggacctgcttttgctccagttccggcgccggtgccgtctttgtctccgagtccgacgcctacgtgatatatatgcatgcatgtatattaatgtaagcgcaggagagagtacgaaatgtgttttttctatactaaatattataattaagaaactagtaaattaattaatacataaggtggatcgagtctcaagaaatttggtttgttattgttttcttaaataaacgatgattgtttgttgtttttgttagtgttactgattgtataaattaattttcacgtgttccttcctatatatacgaatgaatatatatattgcttgtgtgcgtttatatagcttcttatatatattttttttgaaatgatatagcttcttatatattggttgtgctctgttttaaaatttagcgaggattgctattaggcatcagtggtgcctagcatcttctcgacatatcgcgttgcgatttgctagcgatacttcctaaaaactattatattaaattatatggacgtaatacttgattgaaccaatagcgatattgacacataaaaaagtactagatattgcattttagcatttctctttaaaattatacgagaatgctaaaggctacagtattttgtaataattgtcatacgagtacgaggtgtcgtacttaaaaaaattaaactagtactcgtttagtaaagatagtttaattttttttttcttaattacggaataaattagaaaattgatacttttttaatacaaacgaataataataaatcatagagaaattctgtttatgtgttgaaactaatttagtttt

SEQ ID NO: 14156 - DNA, 6828 bp, Cannabis sativa
tattattacaattttaaaataacatttacaaactaaataattaaaaaaaaatccatattttcttaattaattgcaaaaatcctaaatttcattatttttcatgaagaaaaaactgtgaaataaatctaaaatcttccattttagaaactttattatgaccattttgcccaacaaaacaaaattgtaaatggaaatgaaaacatagagaaaaccagtgtgcatatggcatctcttctcattattactcttcttcttcttcctcgattgattgtgtctgaactaaacctaatgcttttgtttcccaaattcactcaaaaaccttaaataaaaactatctctctctctctctctcttccgctgctccacagctgggtcctccggccaaccaccctacttcgcagtttctttaccctttcatcgctatcaggtatctttgctacttttaatttgtttatatgttttataaatgccctcattggacccttcgtagtttctcccctggtttctgggaagactgaagtcttatcatgaaaaagatagattcttgagttttcgaatcagtttcttgtttatgattatgggaaaactagcattgtttgacttctatgctgaagttttatcgtttgagcttgtttgattgttactcccatttcttcaatgttaggattgaagttggatttatgtatttattctatgaggcaaatcttttgggatgcgtttttggggttagttagttttatcatctaaggctatttcatagcatatttcatccatgtactgaatttgatatagatatatatatatatatatttaaatgatcatatacccaagtggtggaatacctgatagtataaatatgtagttattaaacttgatggccatgtcttttttcgttgtattttattttcatctttgtgttttttgcttctaagttatgattatctagcactgaacattgtattggatattgttcccttgcataccaataaatatttgcaagagagaagggcttctatcatggtgaatctttcggaaagatattaaatatttgcaatattaaaattaaagggggcgactataggtggtggaataagatattatttcatgaccccaagcacaacattattaaatggctttcttggaagtggtatataattttccacaccctttctattgttctttctgggaatagatagagcaatgttcttatataaagatgaaatgtgtcctgagcttgcattttttcacctcatcagcttaagtaggaaatgttcaattccttggatttcaatatagttcattaagtgtaccttattctctagtggtatcacatcagttaaccaattcattggcttcacttagtctatgtatctgtatttttgtttaacaaattgctgattttatggttgtttgtttggcttttctccactagtttaagtgataaatgatatttgaatgttcattctttcagtaatagtcttaacgagtaacaatcttcgatgtatttttcactcttgttttcagtagaatgaggaattgaacgagttaaaggattgacctaacatctgcagttgaaaattacagtagtacgatgtctggagcagctgtttcatcgacatcaacaggtactagccaaaaagttcctatgtttgcttcaaaggctggttttgtcataccaaaaaacaagttgtctggttcattggttcccatattccgaggagttaaaaatcctgggggcactgatactttgaatggagaaagtaccaaactgactccaaggaaaacaaagtggggacctgatctgactcaggatgcttctgttaggagggtgagagcttttgcttttcaggtatgttcttacttaattgtactttgcaagttgtgcttcatagttcttcaaattgaatttgaagatttttataatagggttatatgtatcagtccttgctcttgggctttataacaataaatctagagaattgctacccactccccaaaagaaaaaacaaattgaaatttccctttccgtattcttctgtgtgaatggttcacatagaagcttccccttccaggtgccactaagtgatattactacctgtgtggtggcacaaatttttccagactcgggttgatcaaattacacagcaactcaaatctggaatatcagagaccgggctcagtggcaactcagtgctagattctgaaagtccaaatcatgagttgtccagtcatcaaaatgccattgaggtaaagattatatttaacagttttctggcttaatttgtttgacattcttcaattgtcacggaaaaaatacgtgtgtgtatatataataaagtcttctgaatctgaccttaaattactgtttgtggacatagaagttagaagaattggagcttgaaaagcgggaggcaataggtatgtttacgcttttctttgattgatggaggatatattgtctctggcatggcttatgttttttgttgatgatttccaggtgaaatattaaaattaaatccaagttacaaggctccatctgattataaaccgttgatgaaagaggccagagtgtccatacctgtaagtatcgcttctccaactttctacgagtttttctaacttgagttcatggcttgtttttaaggattcatatttattagaaattccacataaaacaaaaatatgtaatttgatttgatcccacgaggtatgaggttcgagtcccacttggacacttataaaatatttctaagtccacaaatactgtaggttaggtgaggagcctagctcttttttaaaaaaataaaaaagtgaaaataatggtctgattaccttacaatcaatcttaagctgcataatagttgtaagcaaagacgttttcattgcagtgaaggaaaatattaaaaactaggcatctgaaaggaaggctaaatacttatgggtgactgatagtgaagtagtaaaatgtgggaagggtaaaaggataatacaaggggataaagaactccaattagattgtatttattggttttatcatcctagaaactatcatagatttacaagtttacaaccttatgccataatatatctattattagtacgatgtcaatatgttgttaaagcacgtaaagagggatttttttttttccatataagtttctttctgaatgtctcttaaaataattaagtttctatcagaattttcccattcttatgttttccagctgtttaagattaatgaatattctggattggatacaataagatgcatatgtaaactgttggattatcaagtatcctgttttttttttccttaatggagaattggtattatcttctgatgcttccatgctatttacactgtttctcaggttaaagaatatcctggttataattttgtttggctaatatttgggcctggaggtgagaacttaaaacgattggaaaaggtaagaaaagtaagtttttgagtattaaaagaggagcttttattagaaatttcattatttcactagtatatatatactgataaattatctccattacatctttgggttgggaatcaggaaactggagctaagattcaagtctacagaaccaacgtagataatgaacagaaggtatcttttttacaaaagcagaaaatataaaattattagagattagtcatcatttcttactatcttcactcaatcattttacaggagcatcttgtttttattgtgtgtttcattctggtgttagcacttgctttatccataatattttcgattactatatgcagattgagattaaacagtctgatgggaatgaagtccacaatacctacgaagacttatacgtccatatatcagctgacacgtttgagaaagtagatgctgctgttactgtcattgagctcctaatcacctcagtaaaagtgagttcacctcagttgttattttacaactgatctgctgtgttttagcttccagtcatcttaaccattctgttatatagtttcactatcattactcctgttatagttggattgattgggactatacttttcttttgtttagggtaacttggcttctgcatctgcagcctctaactcagcttctgcagctgatgcccatgtttctttaggccaggatgtggccacttctaacccagttcttaattctgcaatgcaatcgatgcaaggacctacatcaatgcctccacaaggacagtttcagtaccctggtcaatggtttcctggaggcccaccacctaacatggtgttacatccaccttccggcttcaatccaccaaattcttcggctcttggtctgaacacccctgctcacatgcattcaaacatgccttcactgtttggccggccaccagttcaaggtggattcaactccattccccaaaacccaaatcttgtttcccatgaatcacggccaccagcacaagttttacaacatcaatacatggttcagacaggtcctggtccttttgagccgagaaatccttctttgatggctccacagttttcctcagttccagcaagtaatgctttggttccatatccatctacaggaagccaactttcaccaatgagcttcaccaggccgtcaatgccttcattaccacaggggtctcaacctgccaatattccaccacctgcaggttttggcaatatggctccaaggatggttccaacacatttgcatcctgtagtttcaccacatgcacctgcacctatgtatggttctcttgggaaccctactttaggatctgcatcaaatcctccaccaggcccatctatgcaatcaggaattataaattctgtaaatgcagcaaattttactcctgcaaaaccacaattgccaacaggtccaagttctggtagttttacttttcaacctcaccgtccacaaaatccaccctctcaggcaggactcagaccgaacactcatttctctcaaaatgctccacctgccaattcaatattaccaagtccagcatcccagcctttacgaatgccaatgcctaatttgtctcaacctggcaaccacgggttcgcaaggccacctggcaaccacactggccaacctcaatctcatatttctggcagtccctttgtcagagatccaactgggatttcagttccttccaggcttccaacatttccagatggaagtgcccttgcacctaggaatcaaatgatgccagggggacctgggccgtggaacttcaacccgtctccccaaattcctagttttcctggtcctttccctcccaggccaggaaatcatggccagcatcagaattatcctgttcgagcaagtcactcctttgcttctggtagatcagctcaagctcctggagaacatcaactttatgatccattctcaccgacatcaatgtcaattacaccacaacaccagggaggattccctagaaggtgaaaaaaccaggacaatgagatttaatggtcttgtttgaatgagaaaattagattagtccaacagtaccttatgtgatgctttctaaacactgatatgatagttactggttgataaattgtaatgcaattcctggagtaaatgttttttgttttcttttcaagagcatattcaccttattgtaatttactggtctagtctttgaatccattaggctctattaccatttgacttgctgcctgaccaaaatcatcttttctgaattctgattacttacttaaatgtatgtggacatattattactttggatcatttagagatgtgcttaaacaaatttcatttacaaaattatcaattactacttaagcttgaacattgttaggcttatttgaaacaaaaatgtccaacctgccccaacttttttacttaggttccgaacctctaatttttttttttttttttttaatttcattagttctatttagtagaatttaaaatcaataaggtttttttaatctttgtttgaaaaatatgatagttttaggtttaatcactttttatggcatattttcagacttttttatgcttttgtacatagagagagatgcaaaatgactctaaatttataaactacataaatgtccatcttttcaaataggggaatttacaaaaatatggggaaatttttttggggtttttaaaaacatacctcatattttttttttactatattaagtttttaaaataatgttttaaagttttaaaattacaaaaatactacatttcaataaaacaaacaaaaaaaaaaaaaaacaactaaagcaactaaaaaataattatagagcacctaaacaacaacaataaaaaaaaaacaactataagataacataaaaatagctacaagtagggtagggatgcacatggggcggagaattggcaggaagtgctccatgcattcccatccccattaagaattttaatccctatccttgcttattctccatcggggacggggcaggaaatcccctaataaaaaataaagtttataataaaaattaaaatatataaaaatattaaactacataaaaattaaaaaattacattaatttttattcaataaactaattattctttaaaatataacttaaaattcataaacagatactaatatactaataaaaaaaatacaaacataaattataattctatgaaagtttaattcatggaacaccttcatatcataattccaagcacaattctcatattctaggcaattccctgttcacttggaagatttgattggagttaaacaactaccagatgaacctatcagagactatattagtcaatttatgactgaggtcatagggtaaagtggttgaccgaggaa

SEQ ID NO: 14157 - DNA, 7146 bp, Cannabis sativa
aatattttatagtatcgaaaataattattttatgtactatatatggtgtttagcctcacttaacttaaattaattagcaatatattataaaaattattatattataaaagacttaatacttaattataccaattaccgtattataccaaagttaacttgtagcaattttttttttgaaaaaaacaaaatataatttaaaatttttaaaaatgaacaccgctcagatctgtgtagagagagacccaacacaacaacacaacactacagaagaaacaacacacacagcaacctctttctctctctaaacctctctctttctctctcctcggagcttgaagaagataaacctctccctttctctctctataactacaatgccagctagtgagacagattttgatctcagagtaagacttgtttcattaccttctctctctctttcaactttttccttttggtttgctgctaatcttgttctttatctgtttcttcatagccgtcttctcagtccgcctttggaatggggtcagttcttttctctatctctctgtactgtatatatgtttgtagaaatgttacttcatttgtgatgcttttgtttagggttagaaactgtaatcttgtgtggataaagtaggtttttgatcgcttttgcataatgtggatttttgtgttgaattttaaattatgtttcagagagtttacatttgctgatgttggtaacttggagcattgcatcaagtatttgaatcagactcttgttacgtttgggtttccggcttcgcttgatctctttgcaaatgatcctgtaagttcttgatcttctcggagttgattttgaattgtttggagggttttgaattaggaatatttattttgttgtgttttgtaggtttcagttgctcgtacttgcaattgtatgtatgctttaattcaacagaggcagcgtgatgttgaattcagggaatctgctaatgaacagagacaacggtataattttccagatttcttctctgttgagttgatagttttactataaatatggatctaattgaacgtaaattgacacaatctccttagattttcggttttgcattcattgtttgggataataatatcattgttgcatttccttttacagattgttgtctgacattacaagattagaagctaaagttgagagacttgaagggcagatacaagttaaagatagggagatagcaacaattactagaacagttagtgcctttgactattttaaagaaggaaattttgctgtttttgttgtgttatttatgtttttgaaatgtgtatcaggaagctaaatccactgccacctttaaggcccaaattgagaagttgcagcaagaaagagatgagtttcaaagaatggtgattggtaatcaggttagtatgtttggatatttaatagttagcttagctcattgttgtattttggtagccattttatgacaatgtgagacaacctcttaatggtacaataatgttgtttgttaatgttgctgaagcaagtaaggactcaacaaatacatgagacaaagaaaaaagaaaaagagtacatgaagttgcaggtattgtatctttgacttgctcttataaactgaattacttgttatccatttttttcttgtttttttaaaaaataattttattcaaagtggaaatttacgagtttttactttttactgcaggagagactaaaccaagttttaaatgagaaaaagaaggaatctaggtcaggcatggagataatgaatttgcttcaggtatatcaaataattcagcactagtttcagcactagtttcatattttgattttactcaccattggattttggtggttttgttgattttacacagaaagaaggcaggcaacgtggaacatggaatgggaagaaggccgacaatgatttttataaaaaaattgtatgcaatatgaaatatttctgataacgatagccccatcttgattgaattctttagttttctgctgtggctgtttttaatgggtgggtatacaactgttaggtggatgcttacgagacaaaaaatcaagagttgatgcaagagaatggtgatttaaaggcattattacgatcaatgcaggtaatgttggatgtttccttattcttacaatttgtttggttagtttgactcaagtcaagttgatacttttaatattactgttaagctaatttagttttatgcaaaacattcacttgtagtttgttcattagcatagtgtctagaaatagaatttgttccaaacattttctatggatgaggttaggtaacatgtttataatagttggcttccagtctttgttgattgggaaagcaatgggggtaaacatgtgttggatgcaattgttatgaaattcagtcccctttggctgatcctgttatcacttgtaattggtgcaattacagcaatttgtttccattgattgtgggatgctcatgctttcgtttttacctgttgtgtctctttggtaacttgtgaagactccaaatgttacatgtagctagaatattaatgctctccttggctaaatcctttggctctaataaaacctgagaccccatgataatttcatgtcaacaatgttttttattgcttctcatagaatcagtttttttctttttctttctgggctgagttatatcataatcattgactttcaggtggatatgcgagattttataaatgctccaaatgggttgtctaaggtgtctgcagcagtaaatgaaggagcggatgctgatcctgctcggtctccatttggtggaaggacggtatggtaaaatgattattttaaatcatgtaatgttattatttatcagtggtttatatataacataaaataaccttttcaggatgtctttgatctgccgtttcacatggctagagataaaatagaagaaagccttcgaactaagatggcttccataaaggtatttcactctctatttctacatgttcacttttcgcatcctctgcttgatgaattacagtttatgatgcgttggccattgttaattatttgtaggaacgcatggttcaattgcaagatgcacaaaaaggagcagaagttacttctgaagcaactgaacgagagcttgagctcgaagctcagcttgtcgaggcaaggagcataattcaggagcaggtttgaatttaatttggttttaatgcattcttattctactttttcgtagtaagacaaactctatcagtttgttattttacctttgtgagtttctgttttgataattcacgtctatgtgtttggaaatcactagtcatcgatatttagatgactcgaatttccaacaagcttttatttttaaacgagttttgtcatgtgtgtaatcactgatttttgctaattttcttaattgcaggcgtctattatgtctaaacatattgcaaaatctgagagaccaaggtaaattttcgatcatcgatccattgcttaacacaaacattaagtaattttatgaatacttattatgtaaacccgcaggaatctgaatggccattttaattctagcagggaaggtatcgtctcttcacccgccgaggtatgaatttcaacaaaaacaaatttctctcttcattattatgatttgtttgtatgacataatatatactacttatgtgacatgaattatgatgttatgatattcagggggtatgcaattaaatgaggctgatgagttttggccaatatggagttggctaactgatgagaagatgaatatatggtatgattatgtgtatttgctattatgatgagcaaatcaatatgtctttagtatttgtatacattattattgatcctgagtggaggaacatattaatcatagatttgaattagcgtagagtgcaatatatcctcttatgtaattattcgtctagctagcttgtcttaattatatttaattaatatatatatatttatatatatatgctttaatttgagtttgttttcttttggttcgtgttatgcactactactaagcatatgagattgagatccaattcaacggtttcctaacataatatgaatgtttgaataatccaactaaaggtcaatccatgcatcaggtcatcatagaggtcaaatttataactaaatattgctttttttttttttaatttatttaataaatgatcatattattaagctgttgattttaaataaataagaaaaaaagaatcaaatagtcaaatcttagttttcgtggaaaatggaaataaataaatcaaactcgtctactcctatttcattttatgatatttgtgtacttttggttgggacagaagagtcgcacgaactcattcaattataagaaaataaattttatgattcaaaattttaaactatgtttatcattcaaaatttgttaatgttatcctaaaacatctttttttttatttttttatttttttttatatgatagttactataattttctaaaaaaaagaaataaataaaatgaacaacaatgatgctaattaaatcaaaataagttattgcaacttcaacttttgaataatattatggtgttgaatacttaaaagggtgattagttaagttgccaggtagctggttattaatttttttttaaacaaaattaattggttgagatgaaatggtggggccatttaagctgaggtgtagctaacattgtagatgacctacaaacaaaatattatatgtgtggggggtcattttttaaattattcaaaattttaaaaatcgtgaaaaaaaaattatagctacaaacacaattaatgaatagttacatagtaacatatacaaaaaattatagtgaagaccctatttttacatgtgatccataattggtatatactagctctaccacattaaaataaaattagaatcttcttatagttaaaattaacaatgttaaatgttggggagttcgttagaatttctgactcaataaggttttctattttttttttttttttggcttctttgtaaatttgttacgtaaaagtaaaatcaattgacacaagtaagtagtaacatcaataacatatattcaaaatttcatgcaacaaattctaattcacagaaaatatgatatatatatatataatacattagatcaatataaaataatacaattacaattgatattaattcattcaaactcgcttggcaagtgtaaccagaaaagacctaatactccatggactacaactcaagtttgccctagaactactactattcatcataggaggataccaacccgggctttgcaatctcgaagattgtctagacaacgaagaagacgacgaggaagagctcgaatccctagctggagaagccatgaactcgctatcggagttagaaaactcaccaccaaacctctcatctttaaaatcaataatattattattattattatgattttttttgttgttgtttttcttccaaaacctaagtactacaagccttctcctcctattagggttagaaggttgatcttgaatattatgaattatgcaaggctttggaagccctaagctgagcaccgcgggtggtggacttagaggtggtagcgcctcttctttgggcggatctttgggtgttcccggctgcatttcccattcaaatggaatccccccggtgcctgtgctccggtaatagtaaattcgcgatgaacatcctaccgaagagtttcttgaaagactattattatttttcattatgttgaacaaatcttgatcatgatcatgatgatgatgatgatcatacacttcttcaatcttctcaaaactcatttttttttctcaatctaaaaataataataattacacatatatgaataatccttctctttcttttttcttttttctcttatatatagatcaagttcttttttgggtatagtgaatattagggtttgaggacaaatttatgttgatatatgagaggtgtatatgaaagaagagaagtttttgaatatgtgtatatatagagaagatttggtcatactcatactacgtgccggttttgaaggattaagaaggagttttggggcacatgatcctctttttaattatatatattattaaattattactaattaattaatttttattttttttggacgtgtatttgatgttttgggtaatatattgagttacaaataagtgagaaaaataattaagataagaaaaagtgtacgtataactataagtatcttttttattaagctattttatgttgagtaatttagttatatataatataggaaaattttataattcactctttatagaaaaaaattttagtctaattttttttatagtagtatttattgtagttatttatatgggtgtaaaatagattgtttgaacattaatttttatattatagattattctagatttttcaaaattttacagaataccttaaataagtataacttataagattataaaaaaaaattaagataatttttttttctaaatgtcaaaatagatcggtgcacttttatttttttttagaagtgtatattataaaaacaccccataataatatataagaataaatatatagctaggcggctaatattgcatgtgtaatattgatcgattatgccttaagacaaggcaatatatataggtagctagctttgcttggtatttaccacttagaaaaaaatatataatcaatcaaaacaatcaattttagaccaattagaatatgccacgcaagcatttttaatagtgttaacccctatatatatgtacttattatttataatttatttatttatttttaacagatcattttttcttgtgagatcacatgatgcagaaatggaggctttctcattttaaagtaacaaagtttttattacgaagggactcattcattgtattacgatataattaatactactgcatataataaatatatatttattagttgaccttagaacgtatatttttctcttacgacttataatatatagttctttatttatttttttccaacaactcaattatatatattagaaatgtttaatatattaccaacaccatcttatacgtgtcaatattgttattgatctatttag

SEQ ID NO: 14158 - DNA, 6555 bp, Cannabis sativa
aagttaatgttagataatactgatacccgataataatattgtggtaacaaacaataatgcttgccttaactctggtactttctcttgatttttgtgtttatttgtcattttgtatttattttctagatgggagatcataaagagagagctatagcttttataattaactttgcaagcttatatttaaatctcttagaataataataatgataaaaataaacatagaataaaagagtattaacaaatcaaacaataattacgatacttgcgtaccaagaaaataaatgaataaaacagaatctcaaagaaagagattcttggagaaaacaaaggtcatttggggattgaatcttataagcttatacataaataaataaatatgtcattatgcggtttatatacattgattcatattaaatattatgagaaaaagagattcttatattattatatataaatattattgtcaaaagaaatatatataaatacaaattataaggttcgaattaatttgtcacatgcgcaggcatgcattgttttcttgagtctgtagatggtgggcatctgtgtaatattataaacatatttacatttataattatttatttatttatttttcattgggggaagtagagatcttttctctagtactttactagtcaaaactggaggcattggagctgcagatgctctctgcaaccacaggttcaagagttttaaattttcattatatataaatatatatatatatatttaaacaagtacagttaatgtaactacaaagaaataggttatatattcaacacaaaattaaaaaaaaaaaaaagtgaaatgatttaagtatatatataaaattaataaatataaccaatcttaatcaatcaaaaagtgatgattccgtgttcttcgcctaaatatacgctttttaatccttatttttttttattagtatagcatatatcgtgtatatatatgtatatcattctctctttaattatatttttctatatttactcctttagcatttgctcctgtggcaacttatataagtacaattatttgctttaatatgtttcagagagatcttttatttaaatagatatatttataatatatcacttcatgcgtccccttaaactttatattctcgaaaaaataggcgttataatgaaaagctcttaatggttcataacttttcattacactaatttagagagtagatcgatttcttcatcataaagggattaattataaaatttgaagtgttataaacgcaatctggatatatataatacatatatatatacatatattaactaaccattacatattgtctatgacataaaatctgctaacaaatccagcaagagatcgatgtattagaatattatttacttatgattcaatgatctatatatatattagtgatatacaagaattaaatatgtaagtatttatccatatagcaattaaatctctatacaattcattattaatgatcattgtcggataagagttaattgtcatatatattaatattattactgtgtgacacacaagttataaattaaaatgaatttgttaatgagagagtttaacatgtgaatatgaattgaataagcctataacatataatgaaaataaatttgtataatatatgcatgttaggtactgcaactctttttcacatgtatgtacccttatatatatttttttccgaaaaaaatatatatttatgcatgcatatatattctctctctcagaattaccgagctaacaattatatatatcgttagaatcatatatgataattcttagataattataatatagatcaggaaaagatttttatggaataacttaaacatcaagagaaaaagtctattacactcatttgagcttacacataatacacaaagaccttattagacctattaatgtttgacgtctctcacaatattacatctcataattcctactatattttaaggtaaattgacaataattatacacatcaaataatattgagaggagggtccccctttcccctaaacattcgatcacaatcaacaaatttggatcccaaagtaataaaatcattctatatatatcgtgtacttgaatgaattaaaggaaaggatccactgcagagaaattaatctaaattcatattgtgtgtatataattaatagatatttataaatagttaatcttgcttataattatatataaaattataggggtagaagaaattaatattacaaagatttagaaaatttgcgaaccagcttaaacgtgctaccctttaacccaacaagaaacacccacggatccctataaaccgcatcagaaacgacgtgtctcatcaagctaccaagtaggcccctaactccgtgctaccgtagggaacattagccgcgcacactgttctattcgatccccgacaccacacgtgtgaccctctcgcagcatcaaaattaccctcaaattcctcacgacacgtggcgcaatgacagaccttgtacggcgaaaacgtggacccacgccactgcccgaacaacctataataataaagtaaagtgttgatgagtgaatcaaaagtcaaaatattggtcggcggattcttctcaaattcacatgcacagtcttatatataagccatcttaataataatttgtgtgcatattttggtcgtccccgctgttttcttcgttttaattaatatataaaactcgctaaaaatatgtatacgtacgtgtggatatgtagatatataaatataaatctatatatatttcacctataaattgtttgttacattatttatacgtaagtgtgtaagtaaaattgtcgtagattgttgttatacattgggagggtcccagaaatttccatgcagtacgaggtgaactaaaaattctacttaacacattttgggtcattggctttttcaacgcatatatatttatatgatgtgaaaccaaatactttgaatagaatttcgattcagtgggtaatattattgatcaatacttttgattattcttttcctccttgcacatggctttcgagtgcatgcatgatgtcaagtattgtaacctctgatgtaattatgtaattatttaaatattatatatatgttatgtacgtacctttgactgatgattttgtttctctcccactctttgctttcttttcgattattaatttatgatgttcttgtttagagagttggtgtgaataattaatttgcatttgagttcaaaaacaaataatattatacctatatattatctgtacccttattgttctatatagttaattaatggaatgtatttttcactcataattctttgtactttgaattgacgtatatcaattgttattacatatataatataatatgatccatatactagtacgcacttcgatatttgtgattcttttattacatattaccaccgattttaatccgtagcacatgagaacagagtatttatatatgaatgtcattatataactctgttgaaagtatgactactaccttcccggcactaattaatatatttatgaatttaaatgataatttgatctttgggaaagaaaaacatcttctataaatatatatatatcctatccactatggtaaaaaaagatcgaaattttaccataaacctacattccataatgatctcagcaatgtttttattctcttacgtaaatgaccaaaaacaactgctacttgagaaagatataataactcaagttcatgcataaaacttcaaatatatatatatatatatttataaattatatatatgtataggtggttcaatagaaaattttgaaagcatgaaaaaaaagtatgtagacgtactttttgacagaaattatgccatgacatataaaatatatattatagatacaattattgtgtgtttgtatatgaatattataatgtagcgtatatgtatgaatagttacaaacgaaaactacaaaagcagacaacttcacgttcaccccatcacgcttaaagcatagaaagtccaacttagtgcataaaagtatatatgctacgtgtttttggagggagggagggtacgtactgtcattgcatatatgctcaacttattgatcgtattcaaacaccctatactatgttacctaataaaactagaaagaaaaaagggtagaactgagagagataaaaagtagataagttgaatagcacttatattattccgtctaagttgaaaccacacttgatcagcacaaccattaggtcattatcttactcgtgtctttcagcaaaaaggataaaatatatatatattttttttttaaaaaaaaaaaagtttgataaagcgtatacaagtaaaattccaacttcctccataaacaaaaataaataaatatagtaaattccaagttgaataatcttaaaagaagaaaaagaaaaaagacaataataattggtaacaccgtacacctaaacatgtcacgcaccaaagcatttagatattagtttggaaatgattgagagctggtccatattggtttctaactcattcttggttgaaaaatagcactaaactatatctgaaatgacccacattattaattcatgatcacgataagttacaaaccagtgccccccacctgcgcgtgcatatatagccaccaaacttaatatatttatctattttaatataatatatatatatatatatttatcaatatgcaatttaggcccactgtttgacaagacctagcattaatgtgttgacgacccaacttggctgtgagtatatatttttgagttgatagggcttaattagcttcatcggctatatatgtatatatatacatatacaaaattatatgatacaggaaaaacgcgtacggcgattaacaatatatagaagatcagacgatgttctatttgacagcaaataactagccaattaccatcaagaaaattatttcgaagtaactattatggtgggactcaaattttgatgattgataatgatttttaggaccaccatttttattttttcggtgctgctaattgggtatatatatatttatatagtacctcaccttattatatctttttttattaatggtcacattttgtggaaaacatactaatatgtcccttgtccacatcttgtcattgaattttaatttagctttgacaaacaaaattaaaatcatgataatgaccctctttatgttgtgtaccaatcgtgggttaagtagtttaaactattacctataatttgattctcatgcggtttatatattcacagtttgtgttgatgatcctagtacacaattaagtagttttcgtattaaaaaaaaaaactattttcttttaaataattatcatttttagcaattcatcacctttaaattgaaccgatcatgtaataatgatggctcgactagtcgaagatcgatttttcattgacttgataagcactttttgttttgatctttacttatatggtgatagatatgatttgatgttattttattttatttatttattaagtttgttattattacaaatagccaagttattattcactgaaagtaatcacattccaaacaaaaagctagcaagatatataacagtattataagtttgggctttagagacaatttttaaggtctttgagcgtcggttttggcgaaatttgctactgatgctaatccaaacgatgctatagggtcgaacaaccgacgctataatgtacactatggcgttagttatttcataataattgacgccatatattccaagtgacaggcccctgcctacaagagaagacccaccattggcgccttctactgaaggaaggacccaagagtgatagccccctgaaacaacaattggatctcatctctaattctacactggagagacaggtccatgagttggcgagcctgcaattggcaagccccatctggacatgggagaagatctcaagttagctagacttagggaagctgcaggccatgcaggctaactgaagaactacacactgctgattgtgatgtttttgctcagcaaagacgcaaattcttgagatggatggatgaccaggagtacatcctttgatctcatcaagcagagttagatcaccgcaaccgaaaggctagcgatctaataagatggttcaagcagagaaccgatagaagaggccaagatctccttagaaatccgctttaaggaagacatgttgataaatcagggaggatctattgacatgctgattaaccagctccttaggaactaggacagatcttcccttgccagagggaggacaaacctttccttaaaggtcaaatgacaaaaatagccaaatctcagcaaccagcggcatgagaggccgaccagggatctcgagctctgcgacacaccccattctacaaccaatggccgaccagccatcagcaggagcacccttggccagacagagtacaacacttcctccccaaggggagcacggaacccagaggtaatgtcacgacccgagccctag

SEQ ID NO: 14159 - DNA, 8684 bp, Cannabis sativa
  modified_base (982)..(990): a, c, t, g, unknown or other
ttttttttaattttaatcatagatcctgaattaatctacatcacaaatagaaataatgtgtgtttattatattgtatatatatgtatatgcatgatgaatggtaaatgaaaatgacattttaataattaagaagaggagagcaatatatagcaaagatatatttatatatattcatacatggagtgaagaaagaagaatagcattattaattgccatgcaaatttgagatattctaattctctcttccatgcaacattattgaaattaagcatcttcttatcctcagtttcatatagcaacctccattttatttaattttatttttctttcccatattattattattattatattttattttattcttttatttttcctcctaatgacttatctcccaaactagttgcatgcatatattattaaagcaacccttatactactattcctctttaaattaactttctcatcactcatttcccacacaccctcaaattttatgtaccatataatagagtagtattctcattataatctcattccatttgtgaaccaaccaaaagaaaaaaacttattgtgacaaaacaagaaatataacattgtttggagaatgaatggaaaaaagggtagtattgagattgacattccttcatcagctgccaaagctagtatcacttgtaatagtaataagcagcacgaggcgacaggggcggtggcggtgggggcggccggcaagaggtctggtggtggcgggatcttgaattcatgtgaaggttggattaagagggtgtgggaatttgctaaagaagacactaatagagtaatatttgcacttaaagttgggcttgcagtgttgcttgtgtctttgcttattctattcagagcaccttatgaagtctttggtaccaacatcatttggtccattctcactgttgccattatgttcgaatacacagttggtatgtatatatataaatatatatnnnnnnnnntatttatatttatatatataatatgactttttattaattgcaacaacacataaagtttctaatatgaacattacaaaaaaaaaaaaaaaaatcttaattttagtgactataacttataacaaaaagaaacaaaacaaacaaatttatacttatgtgtcattaatttcgtcacaaaactataatttattgtgataaagttagaatttttttaaactataagtaatatttaaatatatattgcgactgaaaaattgtcatttgatttagttctgtactaaaatgttatgtgttttgttgttatcaatatcatcaagtatgattatttgtttttaatttttaattgtataggagcaacatttaacagaggatttaatagagctcttgggagtttactagctggaatcttggccattggtgtagctcagctagccctttgtgctggtcgagtagctgagcctatcatcattggcattagcatttttttagttggcactataacttccttcatgaaattatggccatctttagtcccatatgagtatggattcagggtcatactcttcacctactgtttgatcatagtttccggttaccgaatgggaaatccaatgcggacttccatggatcggctctactcgatcgccattggaggagttgtggctgtactagtgaatgttctggtttgtccaatctgggctggggagcaattgcataaggagatagttaagaatttcaactcggtcgctgactcgctcgaaggtacataatttaattattaaaagtgtgtttggtagattgtacttagacgatacaattcaatataatactatatacaaagtaatgatatgactatgtgttttgtgttgaaaatcaaatatagaatgtgtgagaaagtacttatcagaagatggatcagaacatgctgagttcttcaagactgtcatggatgagttcccagatgagcctgcttacaagaaatgcaaaaccacattgaactcctcagctaaacttgagaatttggtaatacttaaacttcttttctcaaatgtttatactaaatataataatgaatgacatgtagtagtagtactactcattattaggccatgtttgatttggcctaattgtaattgtaatgaaatcaccattacaattccattattaatttggtttggttttgaagcatttacaatataatcaacaatataccatttatatgattatgaataagcattacagcttgacactgtgtaattcaagtttgatttttaccgtatatactaaatcataccgtctgaatttttttggctattaaaaattttgttggaacatttgaaattattaaatttaaaaacttttgttcaatttcaattaattttacgaactccgtgattgtttatgtactaaatcatgtttgccaaactttgatatttattaaaccatttcttgaaattggataaaaatccttaaatccaacaatctcaatagtttaaaaggaatttttaatggccttgaaagttcagaaacataatttgatacacgtcaaagttcaaaagaacaaaaattttaattaacttatataaaaataaaattatccttatacctttaatttatacccttctattaccccaaagaaaaattatagtaagaatatttttgtcaattacaccactcattcccattaccattacaaaaataaatcaaacaacataatactattcttatattatcattactattaaaccaaatgtcacctaatagggttgtgatgttgtgtttttacttaagaagattttatgtctgattttggtgttgatttgatgacaaaattaggctaattctgcaaagtgggagccaccacatggtaggttcagacatttcttctatccatggtgtgagtatgttaaagttggagctgttttgagatattgtgcctatgaagttatggcacttcatggtgttttacactctgaaatccaggtatcttttcttttaattgttctctcatataagcacatattctatttggaactctcactctcatataactttaataattagagaagggatattcacaacccacttgaaaggaatcagaaaccaagatgctgaaaaaactaaggaatctgagattttttttagtaaaaaataaaattaacaataatcccaaaaagaagaacaaagaaaagactttctttgctggtttagatttctcatgacaagggagagaatattagagaagggaattatgctcttttttattctcaaattggagaggtcttatggtggggtgtttgaagaaggaatataagtatagtttaataggtaaataaaaatctctgaccagaccagacatatccatgttctgtttgttctctgtcccaactcctaacatgagttttttttacttttaaaacagaataacacctgtggaacaatgtttcactataggttgtgttaaacaaaagatcattattcagtttagttagctcattaattaatcaagaaagaaaaaaataaaacaaatgaaaggtacctatgttttattatcatattttagccaaaaaatattaataatataaaatgatcagactgagacaatgaaggaaaacaaaagtttcaaactttgaagccaagggtgaatgagaaattactagtgttttttagagctcagatcctttgtcaccaagcttttgtcttttgactataaatatatgtatatatatacatatataaatttatatctgaggttttcaggttctgagagtcatagcaatactcacatgggaaaactgcatagctagctttctatattctctcaccttttcaaggtatgcaaaacttgaaagttattgtgtgcatcatatcccttctcctttccggtacctttttgaagatgcactctacttgaatcatcatcacaagcaagcaacatcagtagagtattaaatcccgaaagagaatcgaaaacttagaactaacaaaagttaaaatgaccggaaattcatcactcaatttatttgtttatttatttcggtttcatactcttaactgtaacacaatcacattgacatcataatcatcctaacaggcaccgtacaatctccgaattgcattccagtccgaaattcaggatgcaacaaaccaggctgcagaattaatcagagtattaggcaaagacatatgcaacatgaatcgaagcatcaaaacttccttactcaagaaagtacacagctcggccgtgacactgcagcgtgcagtagacttgcactcgtatctcctcacatccccctcctgctctggtgtccttccttcagtatctgacaacgcttcaaagccgctccccaagctctctcccaccatgtcgtccactcccgtcgacataaaccagttactggcctgtagtgaatttgatagcaacaacaacaacaatgaaatgaactcaaataatcagatgctgcagacacaaaactcaacagtagttcaggctgaatcttaccacgagctgatgagaaagcaatcgagaaggctgcattcctggccttcgagacaattagatactttttatgaagaagacggggccttgaatacagactttttaccaagaatgaaagctttagagagcactgcatcactgtcactggtgaacttcacttctttgcttattgagtttgtggcaaggcttgaccacttagttgaagcagttgatgagctttctaagttagctaagttcaaacatgacggattacactaacaaattttttccttatttaaaacatgaaaaatcatgtattaattatgatcaagatagaaaagaaaagaagacaaaacaataaaatgtaaaattactaaagcaaggtttttgcctcttgttgatgttggttggttctttttcttattctacataatatttctatacatatatacacgtgtcacaattggtagtcaccaaacttattgttctcataatcagtggtggacataattattagtgttatacatcccaaaaagtcaagattgtaagttcttattgatgacttcaaaatgcagcagcacagtatattcagttttttgcagacttttaacaattatataacaaccactaaattatattttatatttccattttatttaatttaattttcttttcaaacctaagcacctattccatcaacactactagtgtataaggtaaaaaaaagctcatcattcctgcagtagaaatttagaatttcacttttttttcaactctttcaaatagtaatttctagttggtatcaaacttgaatacgactctcattatcacccaaccaagaaatataggcaaagaattatgacacttcttttttaacaaaaataagattaccattaagtaataatcatattagcagaatagaaagagaattatagcaccgaaagataggctttattattaatataaccagaatgtctgacaaactgaccgaccttacaggtgaggatgcaacaacctgtattcacaacaaacttgactgtggatttcttttttataaatatttacaagaaagaaggaaatccaaagacccaaccaactaccttttgattttattcactgtcactctagactgtgaaagcataaatggttctgcccactacgaaccaatgaattgacaacttagaagaactttaactaatatacgaagacgccaggctgactaaaaagaaaatgacacggacatgccaggaaaccaccctgtcatacatactatggaaaaacctaacagaataaagatgagagaaggagcagagatttacattacatccaattctgaggaataatgtatgatttcattggctcgatggaagcgtccttgacacctacgttgctgctgctgctgctagctccgagaacagaactcaccttgatgaagtgacttccgccatgcactctaccttccccgactgggaaattacttggaccaccaaattgattcaagccaaaacctgtgctgcctgctgaagtcagctttgaaacatctatgttcatgtcctctgggacaacctctttcaccttgtcgagtttggtttcttgaactaaagatcctatggttgcacctccatgaactctcttgtcctgtaccaggccgctgtggagtgcacataggcctgtttttccccttgcaaatgagttgcaaggactagcacagctgccgaattctgatcctggatggccccaagagcatcgctttcctccaccatgagccttgcaataatcagtgctgccttgtgcactcttgccacacccatcaaacttgcatcgcttaccccctccatggcgaacacagaagtcagtccgtcccctagcacttttagtgcactcaggcatggcacaccttttacctcctccatgtgccacacagaaattagtacccccatggacactctttgtacaaaccccgccaccttgaaaagcacatcttttgcccccaccatggcccttgcaaaaaggagtgcttccttcagctcctttggtgcatcctgcagcagtgcacctttttcctccaccatgagccttacaatacatggtgcttccttgtgctccttttgtgcatcctgtagcttggcagcgtcggccacctccatgtgagatgcaaaggcccgataagccttctgcactctttgtgcagttttctttttgacatcttttgccaccaccgtgcctaatacacagtcccgatttgcctctggcagctcgagtgcaaccaccctcataactgcatctccgaccaccaccatgagcaatacaataatctgtacgtccctctgcactctttgtgcaaccaagaaattcacaccgccgaccacccccatgggccttgcagtacacagtcctgccctcagcacccttgtgacaaccttgtttctgacacctacgacctccaccatgagatatacagcggccagaagcacctctggctccctttccacatccctcaatctgacatgtcttcgaactagtgctgcgatgttgagataattgctgctgtattgttgacccagaagtacaggtgactgagctttttggtgtgcttaatacacttgatgagaggtccagaacaatgggagttggatcaactttttggggaacctgtttaaataagatggcatcccctgcaatggaagatgttggcaatggtggcacaataatcccttctttccaatgacatgatgttgatccttcatctgcactattacccatgaaagctgatagtggtatctctactccagactgaagtgaactggaactcggatgaacactagtgatttcagattcacagaaaccagtagagagacttaactccaagtcaactttgggctgcacctccactgctttcaaaattgaactagcatgtttctttgggctgggcaacttttcattgccaagatgtagagaaaagtccaattcaagatccattgaggattcctcatcagtttccttagctgaagacattgtagtgcaagcagttcctgaacttcccttgctgtccgaggaacttggagaacggccaagcccaagagacagtgacgagccaacttgctggcaggcagatggatcaatcgaactccacttccgtttagttccctttgagtttgacataaaaggaatggagccaggggaattaagacacaagatagtatctgcatgagactcggctccaactaccctaaattgcttagaacccaaaatcccaaatgcatttgaagaataattagcagcaaaccccatgttctggaacctatcatccatttttataacttaaattcaatattacactaacctaaaattaattgcaacagaacagtctacctgacttccgggctagaaaaataatatttacaaaactagagttagattgtctctaaaagagtacatcccacccccgctaacaaatcctgaggtatcccgacgatccattttctgtaataaaatccaaaaccagactttcacggattattagcgagtgcacataaattcaatgtaacttgatgtcttcacagcaagaaggcagacaaacatcctgttacacccaaaaaaaaaagcacattatcagagataaactaaagaaaatgatgaaaacataatggaagaaaatcacggtaaaaaaaaaatcttcttttaacgacaacaaaaggagagctcagctgctcaacaaaaggagaaagtggaagcattattcacatcaataaactaaaaaaattgctttgcaagacaacgcaaaattggctttaattaaactgattacgctgcgaaagctaaatgtcacacattcttccctatctcatttgctcacacatgacacaaaattaattggtttacgaactcaacagccccaattaattatcacagttaagaaacaaatattaagagattgtcctcaaaacaagtgaaaagtgaactaaggtgggaagattatttcaacctccatccccttccaaaaaaactaatttagtccataaaacagcatacagtctttaaatgtcctcactttctctttctcctttatttatgacggccaccaacaactgaaaaaggaccatgtacatctaaacacaaaagacatagcaagcacacatccatatgtataaatatattaacagatgtcgtcagaaataaagaagcaaattaatacatctttagagagagagagagagag

SEQ ID NO: 14160 - DNA, 19478 bp, Cannabis sativa
  modified_base (18879)..(18883): a, c, t, g, unknown or other
accgttcttaagggtttggtttgatttgagaaatttattggtctagtttggtttcaaatattcaaaaagcctttatactggtttagttcaaaaattaaaaaaattcggaccaaactaattcgtgaacacccctaattacacttaactcttagggataagttgaagaatatctctttttttatctattaatcaaaaatactttcatattatatttcattaaaatttacccacttttatgggtgagttgtttaatatactcctgttctcccttttaagtgtatttaattggtataatcatctataaaaatagtagatatattttaaataatatgaaaataaaagtaaaaattaaaataaataaagtaaagtacacgtacaatccaattttctctaactcttatgggataaaaaaattaaaatttaccaaatgtaaaatattaaaatttataaaataatctcactacatgcaaatctactatggatttgggactaaacaagattattttactactaaaagttttcgttaagcctatcacaaaacaaatttgaaagtgtaattggattttctgattgagagaaggtacccaattaggttaggttttatttgagtccttaatttgcagcttcttctttttcttttctcatcactcaattgcattaaagccatagactttatttgattcgaatgaaattggaaacaacccacatcaccattttactttaatatctctcattttcttttgaattgatggattggcagagtgagtgaaaacagacatggaagaagaagacaacaacaacagcagcagcagcagcaagaacaaggttgataagttcaaaattgggtctttaccaactctaatgtacatacctgacttcataacacatgatcaacaaacccttcttttgaacaatgtaagataatgccttttcccctttctttaatcttacatataatcattatatatttgtcatttgtgttttcatgttattctctttatttatttaagatcaatggagctcctcattcgaagtggaagtccttgaagaatagaaggctacagaattggggtttgtttatattaaatcttactttaatttgagttcttttgattttgttattcatggatggttcttccttcctagcaggtggtattgtgcatgaaaagggtcttctagcccaaccatgtaagtggcaaaatcattagacatataaggttatgatatattaactgatttttcttgttgaatttgaagttatgcagtgcattttaatctttttctaagtggaaatatgaatttatggagtgcatcactaaattatacctatttgtacaaatagctccgcgattagcgctagttaatacataggttccaataagcatatgttgagttggtacggaaatgggatccccaatagctggagacaacagatttgtatgagaaaacataactgtttgagcctctaaagagaaccagcaaatgattataaattctctttttcgaatgctctaaatttatgtttgtgtgtttctgttccttagttgttatattatacttattacttactgtgaaatcaatgaggttttcatcctttaatcttgtttcctttcctcattctctgtttattactcctcatttcccttgccctattctattctcttctctatcttgtttaaatctgtataatttgttcaaaagtatagataataagatctcatgctcaactcattgtgaagttactcttgaggggattattatgttgtgttcaaccaagcacaacctaaatcttgtgccatattttatattcaaaggcaaatggatcaaagttagaacacatttcctatgtattaacttaaggcgcctttatttgcatccatatacttctacaggtcacatacatttcaattcaattcctcagatatttccgttgtgtcccgagctgaaactgtaatggggacacttatgtaggtgcttagctgctaaaatttctaggcaggattttcaagtttatctgtgaatacacaattgatttacttttactttttaagttcattacatctctttgatatgtgtaaattatattttgcttctcgagttaaactcgatatgtgtaacctctgttgtttaaagagaattttctgatttgaaaaactgactctgccacagtgccaccttggctagcaaaggttacactgaaaatatgtgaagaaacaggattattccctgcaccgatcaatcatgttcttatcaacgaatacctccctaaccaaggaatcatggtaggtcatttcatacatagtttcttgtgagtttcaagtactttttctgttagctatttgaattttatgatgcatattgatgaatcgatggctggctggaaagtctccttgagtttctccggccaatctaagtttgtatctccttagaaaaagttatcctttttattttgaaaaagagatagaggccgttgtcttagacgggccctacccgatatttattgaaatcccttactttgtggtggaggaaaaccatggttacaagagtctaagcataaaactaaaacacgcacaaaagcaagaccggacccaataaaaacagtacttgttagttctgaaagaaaaattatatcaaatttctccattctctagttaagtctaagaatgagaagtggtcaaaatatttagtcttgaacacccaagtggctgtccaaaatctaatggctgtgtgttgtgttgtgtgcagccacaccaggacgggccagcttatttcccggttgtggcgattctgtctcttggctcacctgctgttatggacttcactccccattcaagattgatggaagaaaaccataaagacgataaaacgttggacaatccccgtcctttttcggtcctcctcatgccttgcagcttactgatattcaaagactcggcatattcaggtggtaacacgatgaatatatactgaatcttgtcattgtatgttttagtgaacattcatattttgactgacccttctttttgctattatggttagactacttgcacggtataaaggactccgaattacaaagctttaatggggtaagcgcagtacttagctttgcctaagttgaataggtttttcttctgaatttggcttcttctcatatatgtttctatttaattgtggtcttattcaggttgtaaatgaagttgaggctttaaattatcaagagcaagattcagaagaggtgaagaatattcatagaactagcaatagaatttcactaacttgtagattagtattgaaagttcataaaaatttgttcaagttttgaaatttgaatgcccatttagtttaggcaaaatgatttatatgtatgtatttatgtctcaaaacaccattaattgtggccatgaaatgatgcacttgcttaaacttcttgattctatacttatctttcattattagatcaatgatttaatgactcacaatcacatctttggctttaaaactaagtagattgactatgtaagaatcgatcataaaagtaacatgatcaatcagtatagtatctattgagtaacttgttacgcaaagcttttcttcagttttacatcaactttgacaagattttcatatttgtacaatcctaatttcttctcaataagcctaaacatttaatcaatcacattatcaatctcaatttttgacaatgttttctataaacagattttttattttttacacatcacacacaaaacaaattacttctatacttcatatacgattcgcaatttgacacaaaccctaacttggcctcggccttggcattggaactggacttgatcacttgccctggtctcgacaccagaccccaacttgaccctgaagcataacccaccatcttagagcttcgatgctttgatcaaagtacggagattaaacaacaagcaagtaacccgtaacttttttctttcttcttcattattttcaacaatcatcgacatcatcgatgacgcatgctccctagtctgtgaatttggactcaaacccgaactctgacctaaaccctggccccaacacctaacctcgaatcccgactctaacccaaccctatctggacctcaaccccaaacccaacttaaacaaaaaaaaaaaatttacaaaacacaaattcgtttttttgtttttaaaatttattatatgttcaagtaaatattaaaaatcccatactttatgaaaatactcttttcatttattttgtttagaaaaataccatatatattttttattatagaatcgaagaaaaagaaaggaaagaataggtcgaaatacggaattggaattgatataaataaaaagttaaaaataacaaaaaaaaaaaaaaaaaatcataatatcaagaagacgaagtccgtctcgctcgtctctgaaccaaccataaccgaaaagaagacgaagaagaagacgacgacgacgacgacgacggcgacggagaagaagaacaacgaacgacgaacctctcttcaccttcaatccacggctccgacctcgatgcattcagtttctgcaccgcttttccacaacctcattcattattattacctaatctaatctctacttctcaagtgagtgttcaaccctttcttttttctctacatggatctactttctccatttttgttttctattcaattcaattccattctttcaaattatatttacttttttctgcttacacctcgcaaatgctgctcctattgtctctcgagactctccccctgttcgttttggaaaccctagatttttggtgattcaatggttgcatttatttgtatatgtagggtttcttgaataagaagaagaaggataataattagtatcggaatatacttacgtaccttgatagatatagaagtggtgtgatgagctataatggcagctcaacaatcttctcgtcttcatcgtctgctcactcttttggacagtatcctttgcctttcgatgctttcttgtttatattataggtcattgtctttgttcttgttgttctccgtttcaatttctttcccttaaccaaaaaaaaaaaagctggttcgtcacagtccacaaggttcactgctgctcgtcagattggggaaatagccaaatcgcatcctcaagacttggtatctcttttgaaaaaggtattgtttattatcttatgtacaatacaaagctcaaggtcgaatgtttctttgtcttagtagttttagtgctgtgtgttgttgtattaggtttgtcagtatcttcgtagcaaaaactgggatacgagggttgctgctgctcgtgctattggggctatagctgagaatgttaatcacacatctttacctcaacttctttcttcattcaaatcaaaattgtctgactttggaatgcctggtatttctgaagatttgcttgcattgccagattttcattccaacgttgctggcatctctttcaggaggtcattttttgtttttgtttttgttttttttttcaattgtaatgattctttaatttcatattgatgttagtttttgtctacaaactacagctttaatatcaacaaagtgctcgagtttggcgctttattggcatctggaggacaggtagttttgaaacctacattctgttgattttcatgtggtgctcaatgacatttgtatcaaacccaaaacttatactattaagatattgttgttcctaaatgctctcctgctcttggggatgaagcacatctgtgattgatctttttttattgtttttttgaaaaaagagaaagaggtgacttttcttagactgacccctcccccaatatgttattgaaaccctcacttgaggcggaagaataccatggatacagacgctttagcacaaaacgaactaaaacaatatagtaccaaaacaatacaaaagtacataagaagctcaaatacccatagataaaattaaattacaacaaagatctccattctctacataagatcttttttagttgtttgtgtatgcatataattagaccttctcataccacttttgaactcaggaatatgacattgcgtatgatagtttgaagaacccaagggaaaggttggctcgtcagaagcaaaatcttcggcgacgtttaggttagtagtttaattattttatggctttagtctttacacgagtgttgtggagaaaacgtctatcaaaacttttttcttataaaatagattacatgtctcaccttctgtggtattatttgtcttcgggtgttaaagtcaagctcattgctacttgacgcaggcttggaagtatgtgagcagttcatggatgtaaatgatatgataagagatgaagaccttattatgcagagctctcatggaaatggaataaatcagagagtttatgtaccacataatattcagcgattagttgcagatatggttccaaacatcatgtcgagaaggcctagtccaagagaaaggaatcttctcaaacgaaaagcaaaaattagctcaaaagaccaaatgaaaggttggtctgaggatggcgactcaaggatgttgggtgtacagaatgtgactgtgccaaaggtcctaagtgccgattccttaagttctagtaaggtatttatgccaactaatctatactttttatttttttccttcctaatgtattgtcaaccaaaactttaagagctattgactgtcttgacacaataacatcagattatgttgctcatttagttggaaaatgatatgatttaatattttgtgtgagccatacacgtcttgttttgcttctcttttctattttacatatataattgtaaagggaaaaatttgggttcatcaatttgtggaatatataaccgtatggaaaactttagagttatatgctatgaatctttttaaaaatttagctttatttcctaccctaatctccaattctgaacaatacataaataaatccttgttttatttgttagccaagaatatgtggatatagtagtccgtggcattatctacctctagatagatttctatgagatctttccttattagattactgtgagttggttagttttaaacagctcagtagcagagagttgtggactgaatacaaggtgttttgttaagtgtgctcaatgagggccaaacaaataaaggtggggggagtgaaattgaattgttaatttgtcaatggagtttgatgtgggtggagtggcattggaagatgtgagaagtgggggtgagtaagctttcttcaaaatgttttgaggaggttcgtagatgttgttggcaaagaataaagtcaatcatatagaaatgttctttttgaggtaaaaggattttcattatactatggtattatgaaaaatgttggtgctagaaggttgagggtgagggatagaagaagttgccaactgttgtgagcagggaacttttgggatataataagatgacatacagacagatggtcaccaaaaagacaacatttaaagaggtggtctttgaaaagaaaagggtgttcacgctatcaattcattttctagaaacaatgtggagaaaaatgttgatcgaacagaagtcgccaagaattgggggtggtaatggtggtcaatagataaagcttggttgtgatcttaatcttaatttactataatacgtttgtctcacttctgataacgaagcatcaacagtcattaagcacatttctctaataatactattgtgattgagtatgctgattttaaacaaatagttgaactcttaaatgtagtgccattgtggcttggtcaacttaatcaggctcaatgaacccattattgatggttggagcttttagtaggtttagtcatattttactttttaggttatctttcttaggttggaaaattaacttgacttttcactttctagccatgtaagagtattagaattttcattttcatgtggcctttttaaattattcgtatgcaggcctctatggatgttaatgatgatgaagacggctcggaccatgacaaagatggattgtggcctttccatagttttgtcgagcaacttctacttgatatgtttgatcctggtatgcctcttatttgtctctcattgttgattattaagagtatgcctgcacttttaattttttgatgggaatggtttcacctgcatactctattgcagttaaaatgattataattgtatgggttgttgttggtcctgatattacattgtgtttgttgggagtattaccgtttattatagctgacatcaactttaattattgccaatcgttactatggctgttattatcaatatccactatagttatcattataattatttcttttgagacttttgcagttgctgctgctattgatttcttattttggctcaatatcatgtcattatttgtttatcttctaaaatgatattgtttgacctttaattccagtatgggaagttcggcatggaagtgtgatggctctaagggaaattttaactcaccaaggagcttctgctggagtatttatgcctgacttgagcttggatggtgcacagttttttcaactagaagatgaatttgtatcacatagaatgaagagagaaagagcgattgatttgaatatacaaggtccaactgatgagtttgaaccgaacatgaaaatgccaaagtttactgatgtgtcgtctccatgggtggatacaatgtctgttgccaacatagattgtaacactgacatcaatataaaggttgaagatgatagtatctgtgatctgcccgctgagcccgttactgagttctctaatgttagcactgttaaggtggaatcagattctcaccttgatattacattgcattcgaaggaagaagatattacattgtattcaaataaagaagatactgcacagtattcgaataaagaagagactacactgtattcaaataaagaagtaactgaaacggccttgttcgaggactcctccagcattaaggaaacagatgtgatgagaaacatatctgaaaattctgagctgatgaactggattaaattggctaggcattcatggcttaagaactgccaatttcttcaagaatgtgcaatccgtttcctttgtgttttatcactagaccggtatgctctttgtttaaaactttagctcattgttttaaatgtattatagttattatagctgtttttcccttatcatgctttctgatctgactcttccatgccttctgtaataatacattttacttttgtgttgatcaattgcagttttggagattatgtatctgatcaggttgttgcaccagtacgggaaacctgtgctcaggcattaggtgttgttttcaagtacatgcatcccactctactccatgaaacattgactatcttgctggagatgcaggtaaatttcatgtaagctcatgcgtttttgttcttaactcttaagtgcaggcttctgtgttgtttgatgttccattgagaataattattatgcttctgatatttatttatgttcagtttagaccagaatgggagattcgccatggaagtctgttgggtatcaagtatttggtagctgtaaggaaggtaaatatttgtgtctccagaagttagtgataatgtggatatgctagatttaaagttacttcaaacattggttgatatgagacatcatgaaatgaagtcactattaaaaaaggaatttttgagtaaggttccgttgaatcttttgttgcctgtaaatttgcattaagtataaacattagtaattgaaaataataaagtaaactgaagcatgcatctttatgacagatgccaactttaattattcatctgagttctgggtagaaaatttggataatggttctatcagtagagggaattagatgctaatgactatccatagatttatactaaactggaggcaggaggatatcaaagctgtgtacaacggccattcttactattttttgggctgtatggcttgaaaggaactgcagaaaaatatgaagggagggaagaatcagccgaaaggctatgggagaagattaaattttgggttgcaacttcggtttagaaacccattgacttcaaggggatatcttttcagatcttagtggggaatgggatttgtattttgtattaaatgggttaggtttgtgctaagatcttgttttgtttttggttgttacgaggtcatttctgatctctattgctttgtatatttttgttatacatccaaattgtttctttctttaaaaggaaaaaagaaaattctgctgatacgttagggagagcaaattagcagcctagcaaggtatagatctccgtagagctacccccgtgctatcttttttcatatttgattgataaaatcttgaattactgaaattctattgagtggtttacagtttaataatttagcattcaggtataaggaataagggatgcttacaagaatgatgtcaatgtgtaatcgagttttgtgtgtaatttcctgttttattttttttttgttaatgaatttctctgacttctctattaggagatgcttcatgaattgcttggacgtgttctccccgcatgtaaagctgggctggaggaccctgatgatgatgttcgagctgtggcagctgatgctttgattccaacagccgctgcaattgttagcttacagggtcagacattgaattccatagtgatgttgctatgggatatattacttgatttggatgatttgagtccatctacgagcaggtaactttcatcaatttaatttcattattcttttctcttttgcttctgatttctgctgtattattgtatgtatgttatgtacctagcttactaaaaaaataagacagaatagaaattcttcaaatccctgagttccttttgtgaatactctctttttttcttccttttgcttgaatgactggttaattaatactcatgcttggctgtgatattatttttcttttctaacgcttcaatacttttaatagttcgtaatttttaagatttttgaagaacttgctatccacttgcagtgtgatgaatttgttagcagaaatttattcccaggatgaaatatttcctaaaatgttgggaaggtcgaaagatagccaaggatttgatctaaatgaggtaggctgcattgatgatactggaggagtgaatttgcaggagaatccttttatgttagcaacattggctccacgtttatggccatttatgagacatagtatcacatcggtccgttattcagctattcgcactttggtaaatttttctatcctctatttattattgatgcttggattttgttttttgagaaacataaacaagggtagttttgcctagaattttttgacattcttttgtgtgtttctccattttaaagttgtgtcaggaacctacattttttatgttctctaataattttctgcttttttatttcatttgtgtaggagcgattgcttgaagctggatataaaaggaacatttctgactctggtagctcttcattttggccttcatttatactcggtgatacccttcgaattgtcttccagaatttgctgttggattcaaatgatgaaattttgcaatgttctgagagagtttggaggctccttgttcaggtatttagaattgtcttaacattattttcaatggtttatatattgcttactttaactaactggactcattcaatttactttatattgtttgactctagtctccgaaggaggacctggaaattgctgcaaggtcgtacatgtcttcttggattgagcttgcaagtactccatatggttcggtattagatgctacaaaaatgttttggccggttgctcttccacggaaaagtcattttagagcagcagctaaaatgagagctgtgaatcttgaaaatgagttttatagaaatatctccttagaatctacaaatggagctattccacatgagagaatgggagaggcttccattaatcctgttaagattgttgttggtactgatgtggaaatgtcagtgactcatacccgagtggtcacagcaacagcattgggcatttttgcgtctatgttggaagaagggtctacacaacatgttgttgatccattatcgaatgcactgacctctctttctggtgtccagcggcaggtaataatgcgtcattggatcggacagttatgtcctcactttctctctcctcacgtttcctttaataattcacaacttcattctctgcaggtggcatctatgattctaatttcttggttcaaagagataaaagtcaggggttcaaatgaaaatcaaggaactatgtctcgatttcccagtcatcttagaaattggctgttggacttgttggcatgctccgatcctacattccctactaaagaatcacttctaccttatttagagctttcaagaacctattctaagatgcgtggtgaggctagtcagttattacgtactatggaatcatcgggtatcttcgataacctgtcagcaattacaaagcctgattgtgaaactttgagtgcggatgatgccataagttttgcatccaatgttccagccttgtgtaatgataatatcgggagtaaatctgttccacatcttgaggatatggagtcagcaaagcaacgacttcttacaacttcaggatatttgaaatgtgttcaggtactttcaagaattgattgttattaaagttaatctattttgaaaatgttctgtcttattcaatattcttgtttttgctttctggaatgggtatgcagagtaatctccatgtttcagtctctgccctcgttgctgcggcagttgtttggatgtcagagcttcccgcgcggcttaatccaattatcttgcctctaatggcttcaatcagaagagaacaggtagttactttggatacaagttaagtagaatttgttaagaatgatcataatatttcccatattttaacttattttatttattttttttgaaggaggagaaactgcaagagaaggctgctgaagcgcttgcagaacttatttattattgtgtttcgcgtaagcctagcccaaatgataaattaattaagaatgtatgtactctaacatgcttggatccttgcgagacacctcaagctgcagttattggctccaagggaattattgacgatcaagatcttctttcatttgggaccgtgactaataagcagaaaacgaagggtcagatgattgctggtggtgaagatcggtcaaaggttgagggcttcattagcagacgagggtctgaacttgcattgaagcatctctgtgagaaatttggtgcttctttatttgataagcttcctaaattgtgggattgcctggcagaagttcttaaccctaccactaacgactcctctttaactccaaatgagaatcaagttacacaaattattgactctgttcaggatcctcaaattttgataaacaacatccaggttaattcagtctttctttttagttgcatcgtgttctttaatttcattgtgaccctgaagatgtgacgctacattaggaccgcttacattttgtttaactaaatgtttgtactaaggtggcgtttggttgggaggaatgagaataagattaggaataagaatggaatggaatcaaatttaaaattcataaaaataattgataaaaagtttaataattttttttttatcttgcattggaacggtcattcattccatttcaaaacagaatagtcattccaccaaaatgacggaaaaatcattctattagaatcacagaatactttattatgcaaccaagcaaaggaatagagtaaaaattatttcctttccaattcatttcattacctccaaccaaatgctgccacctaagtgttgtgtttctggtttttacattttcttttggtaccgacaatcgcccaagtgtacgcgtttgttgctgctgatcctcaattggcatttgaacatatgtttcattatcactcatttgtttcaatatcttgttgtgtgctgcttacgtgttcatttaaatgcattccttttgttgtggactgcggtcacaattagcattttgctgtatagtggttggttctaacctgttctgctgtggtggtagaatagctatttatcttgttgcctcattttctcttttgtttctcatgtgcaggttgtgcgttctattgttcctttgttaaacgaggcacttaaaccgaaacttctcacccttcttccatgccttttctattgcattcgtcatccccacatagctgttagattagcttcttctcggtgcattacttcaatggccaagtcaatgacagtacatgcaatgggagctatagttgaaaatgctattcagatgttaggagataattcttctgttagtgcaagacaaggtgcaggcatgctgatcagtttgctcgttcagggattgggtcaggagcttgtttcctattctccattgttagttgttccacttttaaggtgcatgagtgattgtgatcagtctgtgagacaaagtgtgacacatagttttgccgcccttgtacctcttcttccattggcaagaggccttcccccacctgttggactaagcgatagtttctctaggagttccgaagatgcacagtttctggagcaactacttgacaactccaatatcgatgattacaaactctctactgatttgaaagtaacactaaggaggtcggtatcattatcaaatggagtgatagatgcaaagtgttttgagcaattgtttgacaagttaaatgcatattcattattacaaatttcatgcagttactgatttgagtgacatttagcatgtcttcatgctcttttttaaaataaaataaaaatagaattgcatatcatcatgttttttttttcttattattatttcttggtgagcccgtgggacatgtaagtatgtgtagattttctctgatatttaagtttctaactctctctatttaggtatcaacaagaaggtataaattggctggctttcttaaaacgtttcaagcttcatggaattttatgtgatgatatggggcttggcaaaacacttcaagcatcagctattgtggcttctgacatagttgagtgccgtgcttcaaataacaatgagagctgttcaccatctctgattatttgcccgtcaaccctggtcggacactgggcctttgagatagagaagtatatagatgtttcggtcatatctactcttcagtatgttggttctgctcaagaccgcgtttctcttagagatcattttgataagcataatgtaataataacatcatatgatgtgattcgtaaagacattgatcatcttgggaagcttctatggaattattgtatcttagatgaaggacatatcataaagaatgcgaagtctaaaattacaaatgcagtgaaacagttaaaagctcagcaccgattgattttgagtggaacaccaattcaggttggttaccggtttgtgtgtatattttgtcgaaatttgaaaacaaaaggtttctgaagttttgatttttaccttttgttgcagaataacgtcatggacttgtggtccctttttgattttttaatgccgggcttccttggaactgagagacaggtgtgctttgacaaaacattattttttttgacaaacctattttcggttgatatttgattttattttatggtactaccatgtcactggacagttccaagccacttacgggaaaccattagtagcagccagagatcctaaatgttctgccaaggatgctgaagcgggggcactagctatggaagcattgcacaaacaggtaaacattctttttgacgaaaacatattttcaagaaaaattatgcatctatgttgttggtttgtaatagttgagaaagtagaagacttttactgaagaatttccaatctaataataggtcatgcctttcctccttcgacgaacaaaggatgaagttttgtctgatcttccagagaaaattattcaagacagatactgcgacctgagccctgtacaattaaaactttacgagcaattttccggctcacatgtaaaacacgaaatctcaagtattgtgaaatcgaatgagtcaggagatacaggagaaggaagcagtgtatcaaccaaagcatcttcacatgttttccaggtaaaagacggctgtttatatcgtgtattttggttgcatgtctaaattttagacaagttcctctgttgtaatgtctcatactcactcttgcatgctaatctcgcaggcacttcaatatttgttaaaactttgtagtcatccattgcttgttcttggagataagatccccgattcgattgaatgccttttttctgagcaacatgctagttccgacacaatttcggaattgcatagaccttgccactctcccaaactcgttgcacttcaggagatactggaagagtgtgggataggcgttgatgcatctaattctgatgcttcagtgggtgtcggtcagcatagagtcttaatatttgctcagcataaggtgtggctcactctttgcaccatttatttcttgatttgtttttgcttgttattcttagttgtacgtgtacctctcttatccaactatgtcatctcttctaggcctttctggacattatagaaagagacttgtttcagacctacatgaaaaggtaggcctttctggacatagtatgttttttttttccgtaatagttttcttggtgaatcaatattatggtagcttttatttcctttttacggactatagtttttacatatttttttttgaagcagtgtaacttacttgaggttggatggatcggttgaaccagaaaaacgtttcgacattgttaaagctttcaattcagaccctactattgatgtcttgctattgactacacacggtatttacatttagatatacatttttttatatataggcttgcgtcgtataaaaggcccacttaggaagtaacttatattctgtttgtagtcggtggcctcgggctgaacctgacatcggcggacacacttgttttcatggagcacgactggaatccaatgcgagatcttcaggtaattctgttgtggcttgtacctttttcgtaataatttaatttgctcggtaactaacatagaggaggtacttaattgttttccaaaatgtttattaaaatgtccaggcaatggatagagcacacagattagggcagaaaaaagtagtgaacgttcatcgtctgataatgcgcggaaccttggaagagaaagtcatgagcttgcaaaagttcaaagtttcggttgctaatgcagtgattaattcagaaaacgccagcatgaaaacaatgaacaccgatcagttactcgatctctttgcatcagcagagacttctaagaaggtatttgttacatttttcttgacatccaaaaataaatgaaaacaagttataacatttttttaaacttttttgtatcagggaacttctgtattgaagcaaacggataataagttcgatggagatgtgaagttaccgggaagcaagaagggtttaaaagccattcttggtgggctagaagagctatgggatcactcacagtacaccgaagaatacaatctaaatcaattcttgtcaaagcttagtggctaaaaaaattggcgtttttccactttgtgtatagtattgtatttttcccagagcgaggaaattttgacagcgtggaatcattatcagtcatcatcagcagccgcccccatctcttcccgtatttatttcgtccaatttaatattctttggttgttctcgtcctcgtcgtctacatggctgtaatattatgaaagcaggaatggaatggaatggaatggagggggaatgaatgtagttggggaagaagaatggtttttccttgttttttaatcttagaagaagaaagggtttagggaagggaaaagagaatattgtaaatttcggatattgtaaatacaatcactttctatttctattttttttttcttttttccctaaaatagtattaatctctatctagctatgaacaacgtaacaaacaggttttttttacatccatatgatgacacaacacaacataaaatgatttgtccaacgatatgtaatgtaatgtagacaatcaactatatttgcatttaacatttggaaactaaccacttttcaatcaactacttgaaaatttttaattgacattttggatgttataattataatattatttctgtaaatttttgaaatttttttaatagtttactatatcgaaaatagaattcttgatattctaatttatcacgtgtgtttcaaaaaacttcatacctatttttaacattgtaaactattcgaaatttttaaaaaatttacaatgatggtattgtgagtataatctataattcttttttttttttaaaaaaaatatattagtatatattttcggtcacaaaagttaagtttacttctattttcacttttattttcttctctttttacatatattttaataattgttataaagtaattataccaataaaattgtattaaccatagttaccattactttttgaaatattattgggtaagtctactgtgggcccttttaaagacatgtttcagtagagtaagaaaaaacttgttaaaatttactctaaaaagaagaatatttttagtttttgaattagggggctattttaacttaatttaacttaaaaccattattaatattcaagtcttattagttagtagtacaaattcattgtaactagtgggaaaaaatattttgagatgggtccgggccacattnnnnnaaggggtaccactataagaaatgatagattttcactatttcgataaaaaataattgttagaacttgaaaactaggttttctctcaacgtgtccaatagaaaagtgatggacaacggtcttggcttccaccctgagaaatttcacaattttttgatatgtgtagtgtgagattttaagagaacactaacgagtgtaagagtaaggaaaaacatgttaaaattatcttgaaaagaataacattttaaatttttaatttaggatgccattttcaccaaatttaatgcggaaacaatcttcatattcacgtcttagtagtacaaatttattttaactagtggggaaaaatattccgagatgggtcctgaccacatttcacaaatgggtaccactatcagaaaatatgacaattttactatttcgataaaaataattattagtgcttgaaaactaagtttcctctcaacgtatccaatagaaaagtgatggaaaacggtctgggcttcctccctgtgaaattttacgattgtttgagatgtgtaggatgagattgtttgagaccgttgtgcatcaattttttcttggacacgttgagaga

SEQ ID NO: 14161 - DNA, 7316 bp, Cannabis sativa
ttttttaattattgttttttaaaattcccatcatagtaaaagtaacataaattaattaaaaaatgtaattcaataaaaaagataatacatagtcttaccaatgacatttaaagaaagataacaattgtggtcgtagtcaaatgactttacttatcttcaattaaatattaaaaaaagaaataataacaattttttaaaaaaaaattacaaaatttgcggttgacataaatatttgacctgctatttctatttttattttttgatagctatgctaattttttaattaataattaatcaaaataacaactggtactgttaagttattggtgaaaatataattattttatttataaaatatagtgcaagtggagagaaatgtggttcgaagtttggactttcacgcgtaatattaatattaaaaatataaaaatattaataaaaccttacagtgtcggtgtacataaagtttggatagcctgccaagccaagctaagctaagctaagctaagctttcatttttaattaaatttatccaattttttttattattgatatttatttattattattattatcattatctcagaaaaacaaaggcaaagggtctcgctgtaatgtgaaacaaaggcttttatctctcgtctctggaattctctgtctcaactactctgatcctcaatttttttatagagagagaaagcgagctctgagtctagggagatattgagagaagaataagaaaatgaaccccagtgattcatacggagcaatggaggttcagtacatacgtaggcaccacaagcatcaacccagagataaccagtgtacatctgctctggtcaagcacatcaaagctcctgttcaactcgtacgttttttctgaaccgtacgatcgattggtctatgatttttcttttttggttttcgtgtattaggattggttttgagtcatctggtttctttctgtttttgggggatttcaaaaaggggtatttgactttgtttttgtgctttgaagatctggataatttagctccatttagaatggttttcgaacgtttctttcgattttctaactgggttttcttgtttttggtttaatctggatccagaagctttgaattttgtgaattattcgagtattcgatctttgaggctttctcaaaatgagttcttcgtcactaagtaatgatttttatttttccttttttggtttattttgttttctacaaaacatggatttttttcctttttaattttcttctttcttaagtttgatatacctttttgtgtgatcggaagaaaaacaaaaagagtttatttgagctaatttgttactttatctcccaatgaaacaaacaaattgaaattgttgtggttgagatctaaatggttgcctttttctcatatcaggtatggtcgcttgttaggagatttgatcaaccccagaagtataagccgtttgttagtagatgcatcgtgaaaggggacctgggtattggaagtgttagagaagtgaacgttaaatctgggcttcctgctacgacaagcaccgagaggttggagttacttgacgatgaggaacacattcttggaatcaagattgttggtggtgatcacaggctaaaggtatacactactttcctctgtttctctacttgacgcttcatcctttcttcactatttttcttgtgtaataacttttctctgatgatgtcttgttgtggggattgctcttcaacttttaaattgaagtttttcagtgggagtagataatttatatctttgacatgcatagttttatatatttgatatgcagtgtaagtaaacagaggcttaataaggaagtggatgagtatttgatgctgtagcctctgatcatattcatggtcactcattactcgttgatggggcctaataaatgtgtagtcctgattcctgatcatactttttcatgaatgatctttaatggctagacacaagccaaggactgttgatagctgtcattacttgcactgtttccttgagtttttttgagggaatatgaaatttactgatgtccatgtccttactaaagattttcgatatatttcgcttgaacattttatgtgaaagccttctaatcatgtttcttttccacacattgcagaactactcttcaattgttactgtccatcctgagattattgaagggagaccaggaacattggttattgaatcctttgttgtggatgtccctgaaggaaataccaaggacgagacatgtttctttgttgaggccttgatcaggtgcaacctcaaatcattagctgatgtctctgagaggatggctattcaggatcgaaccgaacctatcaaccaatagtggatccaggggtgggcacaggagctcacgaactacagttaggctttttgatctcagataggtaggacttccctccaagtttttggagttttggctatactgctggattttgaatttctcttgtggagatccttcaactctctttccattcccatctgctctggcgtcgtcttcctcactgtgaaaaagtgctgctgggttttacatctttgagtgtctgaaggatgagcttttgttcaagtaggcgattccataaatggaaatagggatttcttgtgacttattgtgcgtggtgctaccaaccttgctatgactcttgatctgtaaatagtgttggaactatatggtacctaggaacaatggggttttcatctttgtaggttgccggagaaattcacttggaaaaaccacctctgttatgtgttgtttgttttgtatatactacactcttaataaattattgtaattgccttaattttgttccaccggttgttggatctcttaagaatctttcctttttaaagggttttatcactgaattatgaaaattctaattttgttgagagattgtgatggttctaggaggtgcctgtacttcttgaatgtgcttttttctgttacactcattttagtgatgtttccttcttttccactaggcttatctagtggtgataacaccattgtttgccccgatatacataagctaattgtagcactatgagcaactcaaattactgtagttttaacattgtattttcataaaccgtttgtccagctgggctcagcaaattccgtgtatgggatgaccaatttttatacaatgggaaagaacagttttacattaaatgcattcaaaaggataagatgaaaatgaaacaacaggtacacacttgatgtaggtccaaaactagttaaatggctccaataatggagtattggaggtatgcatccccttccctcttttccatctcaagaaattgagtatgaaatttgtcctcgaatgttagtggctctaatttgttctagctatatcctccacaagatgcatattttcatttcctttctccacatgacaagtcaaacgaagaaatgtaatattcgttgactggaccagattctcctccaatttgtattgacatctctgtcgttagcatactaatacctgctataaacttattagtgtgttcgatcaggtgaacgtgttttgagccaacaatttagttcatcataatgtagtctttggaagatggtcattagcatagcagaacacttctaccagcagtcattgcaggtacactttccttcctttatatggtggaagcgaaggccatctctaagaaaaatctcacggtttctgatcaaagacaagtattttgctgcttcatgacaatcactacaaactcgagtattcttaataactcttataggtactccatcttttgtgttcatcagtccataagttatggccaacttctctgtgtgactcagaagcatattctcttttttttccttatctagattctgatgtatgcagttcatatcagggacataacccaatttcttcatttctgaaaccaactgatatagctcgaagtatactttcccggtgtctgggtggggttttccttctgcagagaacatgtgaatggtctgatcaatttgtatccagctccagacctggctgattttcactcctcttttactcatcaagcttttaacacgctccacatcttcccatctttttgacattgcatacaagttcatcatcaagacataattggcagagttgtagggctctaacttgaaaagatttttggctgcaatctcagcaaactctaagtttctatgggttcggcatgatgcaagaagagcgccccacatggaagcatccggtgttaatggcattgtttcgataaaattccaagcttcatcaagatagccgactctcccaagaagatctaccaggcaacaacaatgctcaattgttgggtcaatgttataatcttggctcatactatcaaaaagcttccatccttctttaactaaaccagaattcttgcagccagaaaggagagctgtaaatgttatagcatcaggctggacacccgcattacacatttcatcaaagagaaaaatggcctcttttccaaaaccgtggatggaaaaacccatgatcatgcaattccaggaggctaatgtcttcttttgaattttcctgaaaacccgaagggcactacccaatttacctgccttagagtacatgtctataagagctgtggctacaaaaacatcttctataagaccaattcgtatgctgagacagtgtatctcttcacccttatgtaataaagacaggcctgcgcaaactcgaagtaagatggatatggtagctgaattaggatttatgccttctgcttgcatttcaataaaatattttagagcatccgtatggttcccattttgtgaacagcctgatatcagagcagtccatgaaaccacatttggtgttaatcctgaactcttgatccggtctattacagctctagcttccttgttgaggccccataatgaatatcctgaacaaagaccattccatgttaccaggtcgggtttgattccttcctcaaccatgaaattcaatagtttttcagcatcttcaaaaaaacccttgtaagaatatcctgatatcaatgcattccaagagaatatatttcttttcttcatagcattaaaaacagcttgagcatgacttaagcaatcacttttaatatacatgtccaacaaagaagttcctacatatacatcattgtcaagtccatttctgatcacaaatccatggatttctttcccaaattccaaagaatccaattcaataaccgattgaaggacactagttatggagcttgaatttggcttgaagcccacactctgcattctccgcaagatggtgagaaccatttcgtatgagccatggcgagagtgacccgacaaaagacaattccaagtcacaatgtctggcttcaaattgtaccttttcatttcgtttaaaagattccaagcatcactaaagtagccaaataaagcgtatgaagagatgattgcgttccatgaagataaactataatctttcatcgaatcaaagacagttctcgcttgtttaattctgttatttctggagtacatggtaataagcgaatcacatattgataaattggagtccaatgctcgccttaaaacgtaaccatgaatctgctttccttcatcaagagctccaatctttccacaagcacgtaatactttcaaaattgtacttatgttagtttttacaaatgaaaattgcatacccttaaatagttctaaagcctttaaccatctctcgttcttcaaattcaacaagatcatctcattccataagattccttctctatcagacatttcaccaaacacttgcttggctttttcaatgccccaacacgtaccatagaaactgattaattcagacttcaaatacacatccatatcaaaacctctcttgatcaaacaacaatgaattgccacaccaagccatgaatccttcaaacatgcacaaagcttcaaaatcatagtaagaacttcactatcaaaaataacacctccacattgcaactcactaaaaacttgaagaatttcaaccggattacccccaaaactcctaagctcttctacgaaagacatccacataagataatttcgtggacaacccatgataaataccatggttgcggacttgaaatcgccgaattccaagtaagaggtgatcaagctttttatctcatcagtattatccaaagtttccttttttatcatctgggcatgtaatactttcactgaacttaaagttttgatctttgctacttcatccaaaaagtgaagtttaggcagtggacatggaagagaggaaagagaaagaggggtctcataagtggtgcttctgactctaacacacagaaaatggagtgaatacattctgggtggcttagagagacgtgtgttttgtaagaaaagtgggttaaggttgtgaaatgtggccaatttatccatggaggcttgatggtttcccggcaaggagcaggtggtttggctccaaaatgacagttaagaataaagagcataaatttcattgtactgtaactttggcaaaaagtttggagttttgggatactgtggataaggtacgacctatcctaaaccaagagttattatgctaatgaaagtttctttttaggggtgagagtgagacaataatatgagtttgtaacttctatatgtggaaattggtgattaatgtaccatccccactaccctttattcccagataataagaatttgggggaagagaatactcataaaaaaaattaaaattaaataatttaaaataattaatttttttttaatttaaattaaaccaatattctcacaaatatttattatgcctttataatcaataaaagataaaagataaaagataaatatgtctctaagttaaaaaaagaaaaaacaagataagctaatagaagataaaaaattaatcagtctcaaaattttttaaaaaaaatcataaccaaaatacaataccatagttttatacctctcaagtctccaaatataaattaagaattaaacaaaaatgaaactaaagaatcaagaataaaatatttttacacttgtaatttacaatgatcagtagtttactatcgtcattaaacatatgatatataattttgattatagattgattatcaatgatatatatactatatatatgttaagaataaaaaagaaactatacatcgaagtcggatatggtacggatagtattattcttgcctttacccgccccattcccattttgggtattgaaattgtcccccgccccatccccgcttcaagtattgaaatagtctcttttgcc

SEQ ID NO: 14162 - DNA, 14132 bp, Cannabis sativa
aagggtaaaatgggaagttcatgtaattaatggactaaatttgtacaaattaagggagggtataaattttgatatggcttgtattattaagcccaaaaagtgaaatttcccattatttatgaacataggatatttgaatatatatatcatttgaaaaataaataaaaatcaaaaatttcaatttcaatataaaataatgaatatttagaaaatttataaaaacttaaacaaaaagaaaccagttaaatcaacagaataaaaaaaaaaataacttcatatataatagtattagtaaaccgattataaataatattaatgaaatatgataaatataataaacaactagaaaaaaaataatcaaagtcataactgacaaataagaatataacagaaaaaagaaaccgattctacctataaaataataataagtattagaaaccagttaaaaacttaaaaagaacaatcatacagaaaatttaaacagaaccggttccaaataaaaaaattataattagattctaatattacttttcctttaaaaatgcaggtatacaacaaagcatgtgtgtgatcaaatatggggccaatagatagaaaatacaagttatgatgactagcaaacttggtggacctgataaaaatagaaataaattgcaatagaaacagcatagacgtatcataccagatatttccgataacaacaccaatgaagatattgagtgacaattccctcaggttctacattgagctaagaaaaacataggttggagtaactaattctccactatgcatcacaactatagaagagacatctatacaaacagtagaaaactaatcttttgaacaactaatacaagagcaaagcaagacagtggaagaacttgttctacaaatacataatgaactattctaccaacaatttgataatgaaggacaggattcaactcatgataatagttaaataacaatctctccaaatatgtttgcaatagctgaagaagttgcagattttattatagagaaatcaaatgaagtaacaaaaaagagaagggatgaagaaagattacatcgtgcttgagatcgaagaaggacaaatatatagtgacaagaatatactgaaaatagtaactagtttctatacaaagataaagaactttcaaattagaactaagagatccgaaccaaggcaatacatggttactggtgttgatgaaaattgtaactggtttctgtgtgcttcaaaattgaaacaaacacaaactttcaaggttagaaaatctgtcaacaatcacacctgctcattggatgtcataatggaagctaagtgtttcaagggtaaaatacattgaggggtagaatggtaaatttgttcgtactcgatgtagatcatctacagaggatctttgattatttggattgaaaaaaatggataattcatagtgtatctatatttgaaacatatagagcattctatgtaataaggagtgtaattttcactaagtaagggattatttgagaagaagagagaatttagggtttatttgttaattaagagactttataaggtctaattaataaataagttaaataataattttatttgataattaattattaaatatatagatttaacatttatagagttagaattaaatatggtatttgtgaaagaaaagataagttattaaataaaatggtaaaattaaaatctatagggtccactatagtggttggttcggccaaaaggtttaaattaagacccattattttatcttttttaatttcatataattcaaaacctaaccctagtagaaatcctataaatagaataatatgctcttattttctacatctttttcagactactttgtcagacaacctagaaaataaagaaaaagcctctattctatttcaaaattatcctcatcttttcttcttcttatttttgaatgccctatagtgagttgaggaattgcctacacaatttaagccaatactcaagtctttgtggaaaattgtgaataattccaacaacaaaagaagatccagatttagatcttgatcatactttgagacagaaaagataaagggttagggatctaaacaggaggagacattatattctgctgccatcaatgtaaggttttctataactttatatgtgtttattttattgttttaggaaattcatatttagggtgttagattatagttctataatcaacatacatgttagtaaatttagatcatggtaaaataagttccaacaaaaatatgcatcccatggtcactagatctaaaaataggagttttcaaacccaaagtgtaccttaccacttcacctcatgatcttgaaccagccactgttaaagatgccttggccagtctagtttggaatcctgctatgacagttaaaatataatattgatggaattgtgaaaaggtaccaagccatactggtggccaaggggttttaacaaacacctgtgatagacttttttgagacatacaaccctgtcataaaatcatgcacaattcgtgtcatcttcactcttgcaaccactcacaattaggatatccaacaagttgatatcaataatgttgttttacatagagaacttcaaaaaaaaattatatggaacaaccccttgggttcattgaccctcaatatccagatcacgtttgcaaactcaacaaggtaatttatggtctcaaataggccccttgggcctagtttgacactctcaaaacatctctgcttcaatggggattcaacaattcaaaatcagataccaatttgttctatatgaacaaaaacaaatcattattgctacttttctatgtggacgatatacttataacatgagctgattctcgtcaaattcagcaagttatcactgctcttgaaacacagttttcactcaagcaacttggtcctattagcaacttccttggttttgaagtaattcgagacaactcaacaatatttctcactctacacaagcataccaaggatctactcattcgtaccaagatgactgatgctaaacctcaatccactccaatgtgtccaagtttaaaattgtctctacatttaggaactcctctccaaaatccaacagagtacaggaacattataggggctctacaatattagtgtcatacaaggcctgatatagcctttgctgtcaataggctaagtcaatacatgcaatctccaacttcagaacattagggtgcgaccaaacgtgttcttcgatatcttgttggcacactacatcttggaattgttttcacaccagcacacaatcttcaacttcaaggctacacggacacagattgggtaggattgtcatgacgataagaagtccacatctggttacaacatctttttagggaacaatcttataagctggtgctccaaaaagcaacaagttgttgctcgatctagtactgaattcgaatacagggccttagctcttgctacttcagaagtaatttggattcaatccctgctatccgaactatcaatatatctgctctattgtccaattttatggtgtgataatcttggagatggctctttagcatcaaatcctgtgtttttgatgcaaaaacgaaacacatcgaaatagacttgcattttgtaagggatcgagtcctctcttagcaactcaaagtaagatacgttgacaccattaaacaaatggctaacatctttactaaaccataacctatatcctttttgcttttttaaggaacaagttgacacttggtgtcttcttgtgtcacttgaggggggatattgaaacaacccagcaacaaactgatcaacaagactgagtgccagctgtccaaattctattataactaattcaagtttgttaaatcagttacatgttggttgtacgatctttttgtaatcaaaagtcaataaataagattctgtctcaacaagtttagttgaacaacttttctctttattgttcatccttttctccttcgtttttccacttttctgttcatcagtttctttcaataaggattgatatgttaatagaaaggaataactaattatagtgaaaccgtacaaaaaaaatgttgataaaattatttaaggaaagttattagggttacactaaatgaaattagttataaataaaataattattatgttttgtttatcttagttattacttattgttattagtataaatgtataaacggagtgtcagttatttgggttatccctatgaaaaaacaacttaaaataggaatactatgctgaaaaagtgaattagtgaaacccaagtacacagtggtagattgttaccactttcaatttgatttgattgtaaagagataaaaaagtctgtacatggcactgtagtataatgtatttcatcagcatctctttaggactaaagtcaaactttgacttctgcccttcacaataatgatctatgaacaaaatatttcaggttgaattactcaaaacagctttggatacatctaaatggttaagtctacatgttccaagtaagacttcaggaagctcatcttctgtattagcctgcaaataaagtagatttcagttgtgtcaaaatcaaaataatgtaaaaacaaatatacatccaaagttccaattctaaactccctttgccttagctgaatacctgtatcaaaaatgccatttctatgaccaaattgctgaggtagccaagaacaagattggccactccccttgccactgttgaagatgccacatcaacttcaacctagtatttatcaagatttcaatgttagacaatggacaccttaaacaatgatttgtgttaatagaaaagagttttgagtgagtttattattacctccaagtagttctttcctcgaaaataatgtacctcgagtgcatggcctatcaaacaagctttctttcctacactttgcttgacaatccatgatccctgagaaaaacaaactctaaaccattatacattgaaacaagcatgcatgactagtctactaagatccaccacataaatatatacttacctgagaaatgtatgggatgagcttgaatcttgaatttctataggcatcatctccattgacaaagctatgtaaggaaggattctcttctagaggagttttcaacatgtaataaaaagccaaggtatgcataggtgtacccggaacctgataaggtaataagtttggggttattggtgatcaaacaccattttataatgtttattcaaaataacattttgtgaaagacactcacttgaaagttgacaacaatgaagaattctggtgaacctagatttgcaaacttctgcataatgaaactaactatgagattcttttaatcagaacaaatatctaagtgttcattattacagaaccatactgatatattttgttttgttttattcttttttgagaaaaactgaaatgatatgatttgctctaacctgaacaatactatcaggtcggccaccaagatcatcttctcgcttgttcgatttcatccagtctgcaccaaccatttgcattaaggtgccttttgccttgacctggtgtggagaaacatgttcattccatgattagagaaaaataaaattaactatttcattttcaaagaaaaagagaagagaacagctttatatgggaaactatatgaatagcaaaacaaggtatttatttaccttttgatggtcttgtaaataatttggtccacgtattagaaacaatgaaggatcaccttctgcccaacttccaggtaaagcgcaagttgggtccttgagaagagtagctccataaaaacatgatatgctgtcttccctagctacttcttgtaaatccatataacccttcttctgagctgcagcaataaaagaaacccatgtcaactactctaaaatcatacaatatcatttcaagaatttggtggacaaaactagacttacctctgaggtcttgaaattttttcacaaaaacagcagctgatgagagtttgggctgaattatgttctgtacataatcaatgaggaaaccaatacatgtcaacacatactgaactacagttccactcacaacatcctagtatgctttacattacaaaataaaaactccatagaatatttcatgttaagtgtattgcattattgtccaatatgaaagtatactaaagcatcctatatttggatattacactaaattccttgtaggaatttaacaataacattaaacactgtatcatgttatgcaaacataagtatatgcatcagcctcttggaagttgagggttcatattttattatcagtaagtaccggagagttctctcctccactcagctctgattgccattcattctcatattggtcatattctgttggttcaggttcaggaacatcaaaaaactcatctgctgcatcattcaaatccatcaagcttttacggccagaaactactttatccatctcatcttccaccgaagaagcctcatccgtcttcctagtatcttcactcttgagttcttccttttcagtacttcttggcagtccattctctcttttcaattcttcagctaagagtttagaggaatctttagattggactctaaacagctctcttagtgctgtaaattgtgagaacaaacacacacatatgatcagcattggaattggatagatgcacaatcatattaaggaataatgtaaagattattagtaccggcgagtctttcaaccatacggatggttattgatcttgcagatgatggacgcaagtataacttccaatacttccaatcaatagaaagcatgtgttttacaagtgattgtttcccttggttcacaggtgttataacaaatcctccacctgcatatttgtacaataggtattcttgaatgaattatgaccaaccatacatctctagcaaaataatccaaagacagttcaggaagaaaattatgtgtcattacagtttctagtcatattaaggtgcttaagttagttattcaaccactattatatactgaatgaatagacttcattcacaaactaattcttgaaaaagatgaagatgttccataaccatatcttgtagtatatatggataatataatagaatggatacattcccattcccaagttaaagcatacattacttttaaggcaagcacggacatagcctttctgtggtagacacttcttgtgaaacactgaatggtaaagaattactgcaatcacatggtaaagaaagtaagtacaccattctttaatatagtaacaacaacaaaaaatggcttcaaattcatttggatgagattcttatgttctctacaaatattctaccatatgttccatcgtcctctcttctccaatagcgacacaacagtaaatctcttcgtttcatgcccctacaatgcaatgcaaaccagtattctatgtcaacaatgaaaaattattaaatattaatatgaatgaatgaagtttttcatatgaagctccatgtctgaccaaggtagccaatcgctgtataattgcttgtgaactatatctgtatggccatcaaggtgctccaccacactgccccggtagaaacagaaatcccatctgcgaaacactcaatgattcagtttaagacattctacaacatgacaaatcctctcatttataacatcatgcatatgagttaatgctaatgcatattcttctcattaagttagttgaaaatgtttgatttatggaataaggctatggttcaatgacttttaggaacttaaaacttaagaacatgaatatgattgatcatactctgatcttgaggagccaagagacatgagagtacggaaaatcccctctgaagttccatcaactaagcctactcccattatagctggatggtcatcccaatgctgcaaatgaaaaagattgtctgtcaactaaaagaataataataataaaaaaaacagaacagttggtgattcaataaagaaacctactctcccacgagaatcccaatcttttgattccttgaaaagcctcaagcctgaaagacagtgcactttgtagttgtaagaacatgcatattttggctatttagaataataatacacaaaaaaaaaaggtatattttgggtaccattttgacaaccgaaaattttccatggtgagggagcaataacatcagatgccattgcctctgtattaagagttgaatgaaatgtccagtctattgagggtttttggtgtggtctcttggaaccacccaatctatcaacaaaaattatattgagaggcttgaatcaatcatttatactagaacaatacattactatctacacttaataaaactagtagtttgtgcatggaattaaacaaggtgcacctcattgatggccattttctcttggaacaagccacaaaattgtcttgacattcctgtaaaggaaactaaaatatgagacagttcattcacactgtgttgaaacttgaaacacactcactgcttcaatttaacaaaactacctttgatgcagcatcttgaagagatcgaatccatcttgctgcttcctctggactactagcccccaactagaaagaaaaatcaaaatttgattagtttcctagtactgtgtgtgagagagacataagacaatatattaaatacacaatttgactatagtaatgtaatgatgtcccaccttaagctgatcactatgattggatgtattgtaaagtgtaaagagaaagaggacctgcaaatcacaagcaccattgacttgattacaatttttgaatcattaattatttcattttcataaaaaacttagtgcatacttttctatgaatactctctcttccattatctgtaacccgaatgcatgagtctattattgcacttttgactggttcctgcaaaatcaataagatttagtgacacaacaatttctctaagtatagtaagctatattttaaaatacatatgtacttgtttggaacttggaaggaccacatgaaatgaaatgagaattcaagcaaataggaattacaatttcatgtctctaattcattaaatcatatatctatcttcaattttgactctttagctaaaaggtcaatttgaccaaaacaataaaatcttgtacaaaggaaaattgaatttgataatggattaactgtacacgacaacaaatattttttctttttgtagcaattttttatttaattaattaacaaaaaatatcactgtagttgacatgaagcagctgattatatgagtcatgtatatgacagtgaattcagaatttgttcgtgatttatttatttaacaacattaatttttgtattcattcacatagaaatatatatatataaaagaaacttatataacagaaagatacaaaacctcacgacacaaatactgatacaggggtaatcaaacccatatacatatatacatatattataagaagaaagaaaagaaaaggcaaaggcaaattcatttacctcattttgagaaatgggtatggtcttgaagctcgtaagagaatgatccttaagaatgaagtaccttttgcgtgaatattgcaaaccaaacctattgaaacgaatgatatgaagccaaccctccatttctccttcaaccatatattatttcaccaaaaatattaaatgctttgttacaagcttgagttcatgatggtaatggagatggtacatgtatatatgaataataagttgagatgatgaacaatcaattgtgcatttatttaaagatttttttggttcatttttataataatataattgttatggtaatataaatggaagaagttgggagatgatgatcctctgatcccacaagagggaatcagagaatcatgaattgcaggaaattccagtcccttggtttttgctcttctctttctcttttttctttcttcccggttttaaataactgattttgacgtattgttattattcacagcccattcctaacctcaaattaccaaattgccctccttctccttcttcctatctctttaactaacattcatctagcaaaattatagctcattaaatcctacacattttattattattattattataataaatattttctaaaataactaatcaatactctgatcaattttatacttgaaaagccagctattttttctttttcaaatgatgggggtgacagaattatttttctggataatttcattccatggttgatggataatatatagtaaataacatttttaaatttggacacgtttggctccaaatatatactcactcactgataagtgataacaataccataaacccaattaaaaattaacacaagatgttgtcaactaccagaagtattatagcattaaatgcaattttgatgaccatgatgaatgaaagctgaaaagtatgtaaaggaagaggggtaaaagagtaattgtaggtgaatgagacactctctcttcattaaatttcctaatggagagttcaagcagactgaagatacatcgttgtttgaattattagataagataatggtgtcttgtagagttattatatccgacaataatcatgtttaatatactactaattattttaatgtttaaatgtttttgcaagtaaaacaccaaatatttaatccactttttttcttttttttttttttcattttacttgattgcgtggcaagatgggattggtgcaaacagaagagtgttgctgtctgttttttactaaataataattttttgcatttataaaataaaaaagtaagaattttgagctgtaaaaggtttccaaatggttggttcctaatcaagatttgctgaaatatatgttttaattattctattttttcattgtccctttttacttggtcaaacaaagttgacaataattaatgtatttgttattgttttcaattgccaaaaatttagagaagacaagggaaattaacttcactttataggtcaatctctccctaattctcaaaaaaagagatgagatactaaagcaagcaaccaataactgcacaaaacccgaagcattatcaattagaaattacaatttgttattataactttttaatcaattttcatgtccgaaattatatgcgaacatattttaaaaagttttttttataacggtattcgttatagttacagtattatttctgtaaatttttgaaaaatttcgaatagtttacagtaccgaaaacagagtttttgatattccagtttaccatacgcgttcagaaaacttcaaacgtattttcagcactgtaaactatcaaaaaaatttcaaaaatttacagggatgatgttgtaagtataacaaacacccaagtgcaaaaaaaattttaaaaaaaaatattctgacatatattttcgagcatagaagttgactaagaggttgtaataagaagttgacggtagcattcttcatcatgagaattgttaaatgacactactagtgtctagcaacttccttaacggaatttatataacttaagaaaataaattttaacaaatatcactaattaattatagggtaacaataaaaattagtacccaataacaattagttatcatagtaaagttgtttttttttttttgagaaaaatagggtacaatgttgttgcatgcaaacgagtttttaatggacatcactatgattcggacacgaacacatgtttcagttttgggtcagtgatcgtcctacttcaatttttattttttccttaacctaaaatattaatgttgaaagcaatatatatacaaatatttaactcattcgccaaatttgtgtaaacaatatatattttcttattaatctcattcccattattccttaataaaagatctcattcagacttgtacatacttgaaataaggtgcacatgtttgtaaataaggtattttgaaaaaaaaagtttgtaaatagggtaatccaacaatgttgaaactgaactcacccatcttggtagttgggaaataaaaaaagctttaatatgatcatttttttattgagatatttaatatgatcatttaggcttctctaatttgtttaaatatttatttatatatttatatttttaataataccgagatctttatctttagaataaatactattttttttcctgaactattactcttttaaaattttaatgtttgaactttcttaatatgttgcaaaaattctcataaaactatacaaatcgttttaaatatcttcatttaattgcattatgctcatttttttaaaataatatacttatgtgaccatgagtcacaggtatagtgtagcatgtaattgaaacagagaaaaataaaaaagaagagaatttgagatacaatcttgatttatcaaaatctcaactttattaacggtatatgtgatttttatataggtacatagatcaagaaatgagctaaaagagaaaaaactaacaaacaattagttagtagacagttttatagcctaactatcttaactacttttactacttaacatattatttacatcccccttaaactaaatggtgtagaaactatttttagtttggactttaggtacacaaatcgatcagtggttaaagatttagttaagatatcagctgcttgattgagcacagaaatatatcgatctgagacttgctttgtcataatttgatcttggacaaagtgtaaatcgatttatatatgtttagatttggtatggaacacagggtttgctattaaagctgtagcactttggttttcgacccaaataacaagacattgaactaaagttacttgtagttctgttaacaaagatcgaacccactttagtttaattgcagcatttgccaaagtacaaaactcaatttctgtgctcgaccgagcaacgacttgttgtttcttagctgactagcttatcaattatctcctagaaacaccaagtagcccccgttgaacgtctatcatcaacacaactcgcccagtctgcatcagagtatgcactaagagttgttgtagcaataggtcttagacaaataccctctttgatagcgccttttagataccgttgcaatgttttgcatgcttcccaatgtattgtcgttggggcctataacaattgacttagtttattgactctgataccatgtaattgaaacagagagaaacaaacatggaagaagaataagagattttgagatacaatcttgattcatcaaaagctcaactttattaatgatctaagtgatagttattttagagatttttttacaataaaagataaatcaaggtatatacaactcaattgtaaaataatacaagaacaataaaagagtcataaaataaatgttacaacacacactatacatatgtatatatataacatatatatatatatatatgaaaggtagaagaagaagaatataatacatgtaatataataatatatgtatatacactcactcacaaccttcagtgtagattagtggggatcaccatgacttgaacaaggtattgcacctttgtccaaaagcttatttcccttatctctaagcactgaggacactctctaggaaatagctttggaaattatcaagccttaggttttctagcaatgtgattttttgatagaaaacatctcatctcaatctgagcaccttagacctctttatatagtgtttaggatatcaccatttgaaatttaaactcataaccccccatagatgttatggactcagatgtaatgcatgcacacaccataactcttatagcattacgaatttcaaattaagatgcgtaacatctttttacacacttaatattggtgataatggtgaatgttactcatagtaacaagtaactcccccaaatgttacaaaatgatgacaactaatatatattgtcatatgctaaatattattattttattacacacatttaatctatatattatattattataaataatataacaatcccccactaaattaaatattatctctttagtaacaaacttgtaacttctgaaacatttatttaatcaatcaaaaatattatatcaaaatataacattttcccactttgattgactaaatgca

SEQ ID NO: 14163 - DNA, 4253 bp, Cannabis sativa
  modified_base (2688)..(2688): a, c, t, g, unknown or other
tttagtttgagtacctgtacaaaggcccaaccattgccatatctgaagatggattgcataacatttaagcagcaatgagcacaagagaacatgaattcatcttcaccctcgagcaaattcagtgcccgagcaacaatcctcaacgcctcgattgtaggcacaaagagagagccaagacaagcacttccaagattcttggtcaaagctctttggaaacaaaactgagtacttgattgcattcctctaagataatacaaagcaatcactctactaactgttatattagccacatttctcatcacttcagcagtccaagctaaactcaatactaataaaattataattaatggtggtaagtagaaattaagagcaccaattactgctaaaatccacaaagacatccaaataaatgcaactccaagcatcaaataaataggatggttaatatcaggaaatttcgatacaggctcaagcgctttgatcaaaactcggctacaaaatcccattctttgtgttacccaacaagcatataagccattgccaattgcaaaggcaatgaagcaaactccaactccatcagtggaaggtttttggaagcaaattaagagaattccagctgataatgacagcaaaaatgagctccataatatgaatggtaccatgattttaggccattctcttagtgctttttgccaagcaaatgcaagtgttatgcttaataatgatgatgcttcaacttgtggtatgtaaaatttgagaattttcatctcttttcttttgatatctgatgcttgtaaaatcccttgaactcctttatatatgagaaacccaactaatccaattgcagcaaccatatgcacaaggaataaaaagagagagattttgttggtgtatgctcttgaatttagtgttgttatagatggctgatcagtacccaaaaaaaagaaaatcatcaaattgttaagcttaaaccataaaattcagattaaattagtactacccaaaacagcaattaacacaaattcactaaaaaaaaaataaaaaaaccccataaaaagcatattaaccaagtaaagttgagaaatgaaattgcccactaaaatttccaagtaaagaattcatctttttccctttttctttttctgggtaccctctgaaacacttcactcagactaaatttttggacagaaaagataaaagctttaaccttcaaaattcacttgtttagctaactcagcttcaaaagaaaattacttacttgtggggttggtgtaaaacgaggctgagttgaatgctgagaaaattgagaaggagaaggagtatctactcttgtactattttgaaccaaaacccttaaaggattagttggattaagcctctgcatcattgaaatctgaaactcttctccattattaacattattatcatgaaccactttctcttctccttccaaacccacctcacctttttccaagtctttaactttcaccacctctgtctccatctccatctcttcttctctcttctcatttctctctctaacttcttcttctctttctctctccacaacctgaaacaacaccaaagttccaaactttacacaaccccacaaagcaaaacaccataaaaaatcaaaacttcataaaacacatataaatatatatatatatgcatattacaggctcagctgctgcacccattccaaaacagtgagttgaccggaaaattctccggcgccggcggtttcaaaactacaaaaagaacgttattaaagaagaagaagaagatgatgatgtaaaagttgctaaggctatatatgtatatatgtatatagctagaatatgcattatgggacccagttttgagggaaaatccacgctctgacaaggagagtgaagtacacgcaccaatgagaagagatccttgtttattgttgttgtcagacatgggatgacgcacgtggacagagaagaaggaggagtagtggtgggtgggtatgtctgatttttttgctctgttctaaaaaaaaaagtttgtttttttattttttttatgttaaagaaattaattaaataaataaattacaacggttttgtgtttatttatggtgatttttattaaatttaatgtaagaatgtggttaatgtttttgttattgtttatttgagtcatctttgaaaaggacaagagtgtacatgtataaaagaatcctaatctaagacaccatacttagtaattttttttactaagaaaaaatagtaaatactaaaatttattaaagtattttttttttttacaatatatatgtatattttttttagagagtattagaaatgcttaaacatttaaatatttctctttttaaaatataagaggaaaaaagatggaaaatcaaaaataaaataaaaaataattatcacttattttttattttgtcatttataatttatagaaaattgtatttataatgaaaaatgtatttattgtgatttcttctttatgaaaatatttgttgtctccaaataattaaatcataaatgtggtttgattttatttggcttaataaaataaattacaccaaataacaaataagatttgacctaatgaattgttaattagggataatgtagttgaaagttgcccctttgaatacattaatattgcataattttatatatatatatatanatatatatatatatatttagagagtaaacaaaaaatggcaatatataattaaaataaaatataagactatattaattaattatatttagatgaatattattaggtggtgagtgtgcatggtaattaaagtgagtacttttgatcaactttgacggctgagatgtttgcttcaaatgaggagcaaagttttgacaaggaatatttatatatatgtatttgtattggtattgactttaaatattatataatagtatataaagagtaaagagtgtgacataacatatattacaacacataaatacacaaatatattataaataaatatacaatataagccacctttgccttatcttgtttgaaattttgtatagacattattgctagttattattatattattatttaatataaatatacataattttattaaggaactatatataaaacttgtcacatacgtaccaatttccttatatatattgttattttactttacattatacaactgaaaaaaacaagaatactatataaaatggttgctttgctttgtaagctgaaatttgttataagtttttatgtatttatttatttattgctattgtccttgaaaacccataattaaaggaatatatttgtataaatagaaacatttggttggcaagaaagttagtttatatgaaaaaagaagtccaaattaagaaaaacactacacttgtttctttgctctattctatagtaggaatgtgaccatgatatgagtatgatagagtgatttctttatatatgaattatattattgtgccatacatttttctagaaaatatgtaaaattattttatttattatataaaaaatatttacaaaatacacacctaaaattataattagatcaagtgatcaacaccttcatatattctttacaagactttttgatcaatataatatttagtaaatatagattttcttttaaattattttatgaagctataaaacttgttattaaatgattacattgaaaaatactatgaacttattttatctaattaatgatggtaactccacatattaacctctatttactttcttattataactctaaacttaatttaaagttttttctcaaatacccttagcacaaaataaggctatctctttctatatattcttctcttttactattttctagagtgcattactttaaattaaaatataagaaaattccataatttttcaccaataaaaatgtgtatgtactatacatttagccacttattgtggtggggctcatgctcatcataatctattcatctcaataaatgaaattaaatacctttcaaaaaaaaaaattaaattaaatttttgaacttattaaaattgggtttcccatgaacattattgacttagtctcacccttgggaaaaaaaaaaacttcaataatgttcaatttcacttaaggaaaaaaaaaagagaacataataaataagtaattgtgcttatcttttcatatttctattttaatgagcaccttctataaattttttacatttattttcacatttaaatta

SEQ ID NO: 14164 - DNA, 5445 bp, Cannabis sativa
tttcatggctttttcacattaaaggtaaggtctttcacctaacccattaccactaccactctcctcagctacttagtgtggagaaaccgaggaaaacccaccatttccataacccaattggactattttctccattacccatttcaagatttggtctttgaatcaatggagtttttacagtcagtggattctcatctccttctgggtgctgctgtagcttttgttgctattgggattggtgctgttttcctcttttcttctaggaagcctaaaggttcactctctaatctccattgttgacttttgttatgattgtttctttgctgatttttgtttatgggtttttgatagtttggattttttgtgattgggttttgttgatttggttatttaacaagttgatgcagtgttaagcttaaaaaagcttcctttaggttttttattgggcttatcatcaagcttctaattcaattatataagaattaatgttcttgagattctcttaattttctacatcaatgaatgaaacaatgatatagtttcttttttctcatttgataacacatgcatttggttctaggatgaaactaatctatctctcatttagaaaattgcttagaaaaatttgacctttgttgcttcaataagatttttgtttgcctctgcaaatggtctttaacatcatattgtgttattaggctgcttggatcctgaaaatttcaaggacttcaaacttgtaaagcgaactcaactcagccataatgttgcaaaatttacatttgaactcccaacaccaacttcaattttgggacttccaattggacagcatataagttgcaggttattcttgattcctggtttatactgttgtggttttcggtttgaaatttttagctaaaacattaatgcattgcactaattacaatctcattttattgaataggggcaaggatagtcagggtgaagaagttaccaaaccttacactcctactactttggattctgatgttggatactttgaactagttataaaggtattccattttcgggatggtgtatgggcttgacaagtagttcattgtgatttttgtgtagttatttagaactgtaatgatggtattgtattttttaatttgtaaagatgtatccacaaggaaggatgtcacatcattttcgtgagatgcgtgttggagataaacttggcgtgaagggacctaaggtactaaatctcttctgactcgtaacttgttatttgtaaatgaaaaaatcaatgcttattccatgcttgtcactaatctcgacgtgctttcggttttgttgatgctgtggtaggtagattttttgtgactttcgttgtttcgtttcaatattataatttagcatgttgcctgaaagtgttgaagcgtgaatttaaatcctttctcctcgttataactctagacatttatttagtaaacgtggcgtgctagtaactaattctttcttaggaacataagcaccaaatgaacatatatacttcattttctctgttgattgattacttgcgaacgcacatgtgaaagcattgttcagatatgtttaaaacatcacttagttttaatcccagaacgggaaatgtgatttaaaattagttttcgaatgttgctgctgacagggccgtttcacatatgtacctgggcaagttagagcatttgggatgcttgctggaggctctggcatcaccccaatgtttcaggtatgttacctcagaaatttagtttatcgtatgggaatatgcttgtgtgtgtactctatgattttttctacttcgtcaattctcggtccaatcattgtttttttctcttacttgttcaggttgctagagcaatcctagaaaatcccaaggacaaaacagaggtgcatcttatctatgccaatgtaacgtacgaggatattcttttaaaggtgattcttcttagttccaacacttgactcaacaaccccgaaacatacatttattacttgtatcttggatcattttatgacttcttagaaactcggtttagctgatcctgctctcggtgcttgaaattctgttgcatggcttcggaatctctagtttaatcacaagaattaacaggaaatcgatgtaatgcaacagcattctatttgatataaaaatctactctataaattcatctctttttggaactgtgcaggaggagttggatggtctggctaccaactaccccgaacagtttaaagtctactatgtattgaatcaggtaaatgacctagattaacatgtttttgttcactttctatttactacgtgttaaatatcagtgttaatgttatgatcattgttgagtagctttaaagaaaatgttttgtctttccttgttttactcacctattaccagtaggcagtactcatcccgatgtgacaggttgagaaatttagagacagaacaccttaaataaattataattccatgaaatttaatttatgttcttttatagagatcttaataagtaagttgagaatgatcaaatcatgctacctaaaactaaagacaaccaaggtccttgtttggcattgttttttattttcaaaattgcgttttaaaaaatgagaacagataacagtttttgtagttttttataaacaagaaatgtttggttgatgtttttttaaaatattaattaagattagataaaaaatttgaaggaaaaagtgatgaagctcaagaaaacaacttttttcgttgttcagttctttgcaatttcgtttttgaaacttattttatgaaaataatgccaacaaaaaactctgattgttatcaaaaaaccatttttaagttttttaaactaaaaaacagttttttagttatgctgacaaacaaacacttctgagtttgggcaaaggtcgctttctttgtctagaccgaaactgtctgttgtggaaagtgtgtccaatctcagtcctaactaccattggtgggtggttcaagttacctatctttctttgtcgagttctaattgagtatcatttgtttgctcagcctccggaagtatgggatggaggtatcggttttgtaacaaaggaaatgattcaaaaccattgtccagctccagcagttgatgtcaaggtatgagtgcccgaaaaactactcttaaatgaaattggctaacattatttgttgtcttggttctgagtttagtctttggaatttatgcagattttgaggtgcggtccaccaccgatgaacaaagcaatggaggctcacctcaatgatcttaactatgaacgcgagatgttgttccagttctaatcattcatctccgatgaacttcactttcagatccttttttctctcatgtcgactagtactattcttctttctttgttaatttcatggcaaactagatcggttagatgttggagacttttcatcggtataaaaaacccgaaatggtattattgtatgagaacttgaaaagttttacatgcagctttttgtgtcttttgattggagcttaatatttttttatcataatttgtataattaacaagttgaagaagaaaaacacaagcaagccattttctttattctaccattgtaatattgtgttactttgcaaaagtataattaggtttgaactcgaaggggttgacttagtaacgagggaaaatgtcgggggccactagggcagactccttgtcgagtcattagggctcctgcttgacttgtctggttcgaactctagttatcgatttggataatgaaaattaagatggtacatacgaagtgtttataaaaggtttggtcaaaatttagaacttccttgatacacaaaattgttcattttcaattacttatatcatattaagaattaagaatgatgtcaattagccttgactttctaagaaaactacatgcacaagcacaaaaagttttctttaagaaacttgagagctcaaacactctaaggttgataataattaattacatagagttgagttgacttaaaatgtgggaccaactactattttaaaagcaattgtatgttattgggatgtcaataaataaatttttacctctatcacatcagagtagctcaaaatataaaataatcttagatttagtgtattcagtctaatttatcgtttgtagaaaggtgaatggatatattacatacccaaaataagataattttttttatgcacaaaaggagatcacctggtgtagatacttttcccgttttttcagtagcttagataatcttaagggccacgctctcaatcttggcaagagtctctcttaccttattgtagatataatcttgttttgcgacacctaccagctccaaaaattgaagctacaatttatcagtaagtcaataaactcgttaacaaataaaatgaaagaaaatcctaattattcttgtgtcaacacgatgatcaagaagtttctcttttggttcttaacttggtatgggatttgctaaaagttggaaatcttctaacaataatgagatattatttgttattattattgattatcaaaatgatatttttagggattttgagaaaaaatgtgatggtaagttgtttttcgtcgtgttttttcatggaagttttcttgggttctcttaatcttcttccttcgaggttgatcagcactaaagaggtttcgagtttagttgaacacgtcgaaaaattgattaaggaaagagttgaagagattatgaaggagttgtatttgttgatggagggaattttatatttatatacaggtttgcttggatctcacggaaattcagcttcaaaggaataaattgttcttacgtattgataatgtttggagcactcttcattaattaattttgataatcatgtaattagttctttaattttcttggtttaattccagcactttggtgatgatcataaataagagtgtttcgtgacttttccttttttcatttttttaatgtatatttttggttttctaataaacattataatgcatgcatggtgtagttaattaagtcgtacgttatactcaactgatcattccaaagccccataattaattattatatacataataaatagttgatctctctctctagcttatatatataaaaagtttttaattcaaaataaagaaaatgtaatcataatataatgattatttaacattaattaattttttaataaaattatatgaagatcatgaaaatgtgccaagaaaatatattactaaatgatatacatattaatattaattaaattacataagtgccctaacaaatatctatataacagctcgttaattaaactatataattaagccgttaatgatcaaactaaattatatatatctcatactactataattttactacaatacacacatatatatatatatatgcatatgtttaactcaaatccaaatt

SEQ ID NO: 14165 - DNA, 5000 bp, Cannabis sativa
ttaaacagaactagttcctcatccttaattacctcatctttcgcattaatactaaatatgtttgccggtacatcatctaatgtgtaactagtcagtatgaatatgagaatttcaaattacatatagcaaaggagaaagctttaaacatatcaatcaaattacaaagagataagtaggcctgtgagaacagcttaaatattaaaaagccgacataagaagataggaacaaatcaatcaaggaatgcttaaaaacctttttctaagcatgaatgcatttgacagacaaattaaactactataaattttcttttttactactaaacaaaaaaagaaagaggtttgaaaacaaaacaagatccaacttacaagagtttcaggtttttaatgtttccaatctccttgggaattgtgcccgttaaatcattccacatgaaatctcttccaaatgataagaaaatggtgtcagtacaaatgaaaattttatcaggaaaacttcttcatgtgcaatcaaattttaagagatatggctcacaatatccaaagatgagttagctgtcccagctcaggagctaaagttcctgtgagattcattcccatcatttggctgcatcaaatcttttattaaacatggatgacataacagaaaattagagcagagagagaatcaagaatgatgcaacattcaagtcaagaataataataatgattaaaacccagttctaatgacttagttatctcccaatagcagcctaaaggaaaattattcatgactatcaaagaaactaaagaatggtttgacatacagttctgtaacatgcaagtatccatcagtcccagttttgtttgaacaagtaactctattccacttagatacgcatggatcccccttgttccaatttcggatattattcattggatcaatcaatctgctctttacagcctccaaagctttcactgcaaatattaaccaacaaggcaaaatttcaagtcttttccatttgactgaaaacatatcgattaccttgcctttccttgtctttattgaaaaacaaaaccatcacatttgattaattttgagtactacttaaaaaatattgttttttttttcgctgggaacttaaaaaaatactgttaatgcaccaattttagaaaaagatattctatattttaaaagtttgtcccatttgagtaaatgtaaaattatgcacctcctgagaaacaagtaccgttgatgtaaatatgcatatacataaatgaagtaaagactataattactcagaagaccaactaattaaaacatggtaccaactattttaaggaagaaaaaagaataataaatgaaatttcaagttacttaatggcaagttcagagcaaacaaggtttaataattaagcaagcaattgatggtcagaattttgaaaaataaacagataatggaaaacactaagtaataagaaaaacagaagaaaatggaccttcagagggatctgtaacttgtgcaacaacgagaagaagaaagtaagaatatgagaccgcaaaaagacatgccaaaactcttagcttccacatcttgataccctaaaacacagataagaaagaattgtcaaaatttagttgagaaagagaaatgcaaagttcagaattatatttttctagtttgtggctcaattattaaatttttcttttctccctggaatctcagccagacacgtcagcttaataaattgttcaacgacaaacatgagttaatgaatctccggaaaacaaaagtaagagcattaaatgatcattatcaacatcatgccttaaatgattgaatgaatgagagatttaatggtaacagatttggcggtgaagagagggaaatatggtggaatagaagtgcagtagggctggaactggaaactcctaggaccaaaccataagaccgaacacaaagtcaatgggactaaagagagcaaaacacgctctgaaagcatcgttgtcgtcacgatgatccacaacagatcgtcgtttttccactgaattgagaattaaggaagacaacgatgtgtcttagatggcaagttagcaacgacgtgtcgttttacacgtctatgcagacagacagacactgaggtgagtgagtacagacatattttatacattataactatttttatttctttatgtttaatgttttttgttttgggcgatgacaacatacagaagtaatgttcagttgagagtcagagtgaaaacaaaagtggaaaaggaaaatatgtaaatgtatggtgttgttggatttagttaaaaaaaacaaaggatagtcataacttttttaattaaaaagaaataataataagtgcaaagtgaaattaattgacaaaaaaaaaagcgcaaagtgataaaacaatacagctgggtcaacaccacgagcacgagggaagaatttttgggttttcaactttcgaagaagggtggtagagtatttttcatttatttttcattattattattattattattattattatcttcaaagagagggtggagtttatcaacaaataaaatgatttcaataaaaaaattagattaaataatttttaagtatttagtctaacctacttatggtggagttcacacctaatcttccttctatgaaacagtcattacgaatcaatttcatgtgtcataagctacaaagactggttaccaacttgacatctataatatgtataatgggcaatatgtattttaaaacatcatttttttttattttctctgattatcatcttctcttcaacaaaaaaaaaaaaaaaaaaacttcaatagttgacaactctaaaagttatctatcataatttcatatcacattaaattaataatttttaggtaaaaaataatttttttcttataaaaaaaatatatcatatgatcattatttatattaaacaacacttcacgtaaaattagtcttgaaaattacattatatttgatatatagtaagactactttaataaacaatctctattgtagatgctctaactgtgctgccttattaattctaactacatcattacttcagtattaaataggagttttacatatcaagttgactatgtagaataataaagaatatatgctattaaaaaataaaaaaagaccacaaaaatatatgattattgatatacaaccaatttaaaaaattacaaaattcagacctaaaatactatttacattaatatgaaagatatagtgacttaaatataaaaacattaaatcataaaaattataataattaaatagggttgttcataaaatatctgatctgatctaattcgcacgatctaatccaatctaattcgcaaaatgcggctatccacatttgtgcgaattgatgttgtttgttgacgctaaaaaatgacaaacaccaacttgctaggtttgtcgagataattaataataagcgtaagtaaataatttagagagacacacaaaatttatagtagtttactccccgtgtcgcgatggtaaagaaactacgtctacttcgagtttttattctcacgagatggaattacaaaaaaatagctaagtatttaagctctaatttctagagagtgatgctttgaccttatgactacttttttgaatatagaaaatgagctagaggagctctcattttataggtgaataagttccttgaaaataggaataaaagaatgaaaatacaaattggctatttttgaccgaagatgatgatctaacggtaaaaattaacttcttaggttgatcatcattttcagagcccgagtcgcgacaccatgacccactccagataagttatggcttattttcgtaactctcttagggtaaaatttgaagtcgataacttcagaattgcgattaaagtgtgagacataactttatagagaattgaaatagcttcaaaacacaagttgaatcacgtcaatcagattaatattgtgagttatggccattttactgaaggttgttctgggcccagcatccagattgacatcccagcacccaggttgacatctagcgcccaagttgacatatgacgtcaacctgaacgttgggtgagtaggaaaacgtcctggaaatgtattttttgatgcctaactgatattttgacatcacttagtctatatatgtgttctggaaaagttggtcaccagttcttagagaagttgctattctgcagaaatgggagactcaaaagtactactcatttctgagtagtttcccatgttggaaatgacaaaggcaaagttgttaatttgacttttctaacttcatggctctcgaagcttcctcgggatgtcattttaatacttccaaagttctagaacttgaggatgaggtatcctaccccattttgttgaccattccggagagaatgctcggagcagaattggcatttggatgatcaaaaccagtgcaccaggttgattgtcaacctaggagctgggcccaggaccaggtcaacctgggcgttgggctcagtttctaggccctcggatttgtggttttctccctaaattttcttgtatcttagttttttccaatgacagaattaatgccaaaaacacttttttttttttttgagaaactaatcgaaattggcccaagttgataatatgtcaacttgggcactgggtcacaatttttgcgtcctggaagttccatttggtctcgacatagttgaatctcaatatttactaaaaaacagagaaaatgcctggaagggttctcaaaaaacatccttggaatcggcctaggttgaaaaaatgtcaacttgggcgttgggtcttacttctagcactcagaaagtgttgtttttgttgggattttatgccttaaataaaacacatttcaatataattttattttctattaatataagattagaattcatttaagttaatatgttattttcatgattatggtttaatatacaatttctgataaatctagaacatatagtcattc

SEQ ID NO: 14166 - DNA, 5325 bp, Cannabis sativa
tgaaatataaattttctactcataatgaatcagaatagcgtatattgccgattaggcacgtaatcacagagccataaaattaacaaagaattttattcaataaccaaaacaaaaattatgtgaggataagcaattaaagtgatggatcagaagtggttaaaggttgtcggtcacggtaaaatcagtaacacggaccaattgttaatcatcacatccaacacaataatttcatcaaaaataattgaaaacaaatctaaatgacaaattgaaccaaaacaaacaatggagaaaacgatcagagatggttaagggttgtcggtcacgttaaaatcagaaacacggaccaaaggttactcatcatatctacaaagataattttgatatatgaaaaataatttttcaagaaaaattcaaaactgaaataaaagaatcatcagagacttaagtactaagaatcatggaaagaatccatcatattgttgcagttatattctcatcagttgattgccaatcacaaataaaaaaagtaaaggaaaaccagaaagagtaaataggaggaacgaaccgagtagccaaaccctaatatctggtgatgatactgtgagatagagagagcttgcctctcattgtttatgaaagcgcctttttatagcaaatgagatgaaaccctaaattggcgatggggatttaaatgggcctcaataagcccatgaaaggcatgaccctctatcaacgtaaacaataattttctgaaccctagcccaaatatccgaccaattcttttatgaatgaaaactctataaaatatgcccatttttttcaactttatatatttttattatattttttaattttttcagtgaactatgcaatgttttccaaacaaatgtgagtctctttaaaaatatcacccaattcattcaaaaaataaaaaaaaaatagaaaaatttacataatttttggattaaatagtaaaacaatactttaaacaaaaattcctcataatcccacttaaaactcactaacaacccattaatcttaaacaatactaaacaaaaataccattaaatataactattaacaataacccataattaatcttagaaactcacctcaaatgaagatttttgaggcaaaaattacacaaaaccgagcttcccaacaacagccgatgcatatgatttttttctttttttggtagaataatgcatatgaatttgaaatagataaatttctctaataagtaaaccaacttactaccactttcactagaacgagcttgagattcaccaaaccgaagaagaattaattaaaatttaatttgcatccataatgtgaaaataattctaaaccaagtgtcaatcatccataatgtaagctatatattgagtcaaaagaattttcaaattcaaaattttcaaaggccacatttatctaatagtggatctttactttagggatcaatattatactcatttgtacatgtgatttgttttgccaagagacagcattatatttgatttattttttttaactttaaacttcattcaactaaatcaattcggcctcaataatattagtaaagtatgtaaataagttgctttagtcataaaatgaacaacttaattaacaaactgtttgacaaaatgtaaagtttatagcccacctaattcagggacctaaaaaaaacattttccatttaaaaatatatattttaataattttcaaaaatactatatatatttcaaataaaaagtacataactttttctttcctaaagctcactcaatctcaaagagacaagaggtcatgcttgggtgagcaagaggaggatgaccctggagtgtatgtccccaatgttcattgtataatcgtttaacaatggagtagaaaatagacaaagaaaaaaggttacttttcttatttttttaggttacgagctgttgttacttgttacctaaaaatctacaaagaaaaggacaacttgccaattcttaattaagttaccaaaatttcaatccacaccactctccataaaccaattttcatatatgaatataataacacgagatcataaaatgccactagtagtgtgtaacaaacaagacagcttattaaaacaacatttaatatgaaattacaaagataattaatgatacctctttattatctacacacaaaaactgtcatcttaacgtgccacgtcactacttatggccgaagaagaattgctggccccccacgtggatggacaaaatgtgaccacgtaatccttggcagtacagctggccaagggaggtggcgaatcgtaagcgtaactatagtaagaaggacatgcctccttaaaaatcttcgaatacacattgggcttacatttatttgggcttccgtactcttttcgacaacaaaacgaatccaaatcaaacctcaaacaaccactcttacatgccacaacttctccgacgtcgtttaacaccttcaactcatctggacacaagctattcacattctccacacacccaccaattgtgcattttgccgaaatgggccgggccgaaaccgacacgggaagattgtacccgtccactaagctcacgtcgtagtaattgggctttgtttggtctgattggaccgaaatttggaccaacgtcactggtggagtacctataagcccattacactcgagtcttccatcgcagtctcctgtttcacaagctgggctccagttagtggcgaagttgcaacctgttcgggcccataatcgaccggtccatttccatggggcaatgactcgatgggcctggcccgatgggaggtagaagccaccgtttgctaggactggaaacccattgttgggtgctattgctggccatatgggaaatgagcatttgttgtggacgtaaaacgacaccgtatgagcttttgtatttcctgcgttaattaatacttcatttgtataagtttgtatatacgtaattgtaatttaatgttaaggaagaaaaaatggaagaaagactataccaaataggaggaattgagatccgaagcataggagaaaagcaacaaagaaatttggtaacttcatttgtatgaattagattaatttacttttttgtgggaaatgataacatgtgaaaatatatattaatgtggttgtgagtttattctttgattgtacttgaagattggatttaaatgatctttggagacaagaaaacaaacgtgggtacgccttgcttatattttataaatatatgtgactattttaataagcaaaaattactaatggatatgagtaatgagagaattgtaaacttttacattacttcatatttggaggaaaatgaccattacaagttattaagacatgaatgaatagatataagttggcctatcactaactatacatgtgtgtcatagtgttgattttgtataactacataaaatttcattacaaaatgttttctattttggttgaaacatattcattttatatatttggttcgaaacaaccaagtcttcttcttttatttatttatttattaaaaaaataaatagttattactgttccattattgaatgtaaatttcaatcatattattaattattgtgtggataatttttcttcaaataaattaaaaccctactcccatttgaaatattggtcctcccttaggataggaatgcattaattgtagtaaatagttttcttttctcattcaaatcttagtagtaatgtaactaccaatgcttaaatcttcggattcccattatgcctagtctagttttattttcttgtgcaattatttaagcacaatagggtttatttatttaattaagttttcttctttgtaataaagtcattgctgtaaataaatgagaatttataacttgttgtagcattatagcataggcaaggcaactggtcaaagttcaacatttccatttatcagccaggttgtgacaaaatgtcagaaataaaataatagccataagttaagagtagtggactttcaaatttaagttatttttattattttttatatggctcacattttaggtgctgcgaatatccaatagtgtagaaaaaatataccaccaaattaaacattattgtccataattttaccacaaataataatagtaaatgaaaaaaaaaagatgatcactatgcagtgttggttgcttaattataagttgtttggtaatggtatgattagttaagaataatttgaataattgtaacactaagcataaaatatttgtaattgtgtttaataatgcattaaaatatttagttacattactataagttgaattacattatttaatgtaattattttagaaaaacacaataacaacaaaaataagattgtacgaaattttaaataattttactatttttaaaattttatttatataaaatatgttctgatgttgtacttttgttatcttattgttaatttttattatttgtgtattattttttatactattttaatgttgtttggatattatttttatatagtttttttttttttgttgtttttgtgctatttttatgaacaccgtaaaaatatatataaaaaatctttaaacgtacgtagaggcggacttacatatagtctagggagggcttaattccactttaaaatttaagaacatattatataaaattagagatagaaacaatacataattgttagacaacataatttatataaatatttattcattacttaatagacctataattaatctataattaacacaaattctcgcataaaaaacaaaaaaacaaaatacaagaattataaaaatcccatattattgtttagatgctaaaatggacggcaccagactttccattcgttaaagtgaacgtggatggagcgttgttttctaatcatgggaggtatggagtgggattggttgctagaactgctgctggtatagtgatggcggcaagaactttgtgcaaatggggcgatttgtaacctcatatagtcaaagccattggtatcaaagaggctttgtcctggagtaaggcgaatggatggacaagtgttatagttgagtctgattgtttaaaagtcattagtgatttacaaaagccaaaatatatggtctctccttatggtcatattctttatgattgtaggactttgatttctgattttgataattaagtttgttaagcggtctgctaataaggttgtccatgctttagcgcaaacttttctttttgaggctgactgccattttagtagggattctttacctagtgtaattggatccttggttgtggatgatttgatttaataa

SEQ ID NO: 14167 - DNA, 6569 bp, Cannabis sativa
  modified_base (6526)..(6533): a, c, t, g, unknown or other
ataaatgtaaattctgccgtgtggtagtaaaaatgaaaagtattacctcaaatccagtatttttgtaaaatgttttttttttatttaagcgtttatatattataatcatgttttatcgcactcaaacccagacctccaacacttacacacccaagtggttattgctcacccatttaaacttcattttctttcatattaataagcagaggcagaccattctctaataagaaaagcattatatatatattatatggggtgggccatagcacttcacggcggcgccggcgacatccctgtctctcttccagcggagcgtcgacagccacgtgaggatgcccttcattattgcctccagatcggcgttgaagctctcaaagcaggaaacccggtcttggacgttgttgaacttgtggtatacatatacaaattccctaacctcaacctctttttttggtctttattttgggctttcttcttctcaactcatactcagttacttccccaattttcaaatttagactatgctttgatctggtataattcctttaaaagtattagatggtaaaaaggggtctttcagtatgtttaatacattgaaattgagaactcttatctcctgagaacatgatctatgatctatgtatgtaggttcgtgaattggaaaacaatccacactttaatgccggtagaggctctgttctaacttgcaatggcgaagttgaaatggaagcaagtattatggatggaaacacaaagaactgtggagctgtttctggcctcaaaactgttgttaatgctatatcattggcacgtttggttatggaaaaaactcctcatatttaccttgcatttgatggagcagaagcctttgcaagagaacaagtgagtactgtaactcttcctagatttccctgaaatttctctcttttacacatagtaataactcactaaatgcaacatgaggacaaactcaagactctgtatgaccttgaataatggcaatacaagtttgagaggaacggcctatgttctttcttttatcaaaaacaaatttaaatgacacctaccagatttgcttgtcaatgttagtatggtctccacttgttcatattgtaaatgtttgtgtacgtatatatttgttatcttttttgcttcttttgttcctagaattataattatttatcctttttctatggtttttgtgcaactttcagggagttgagactgtagactcaagctattttgttactccagaaaatatcgaacgactaaagcaagcaaaagaagccaatagaacgcaggtatatttgttgtttaaatacaatcatagtacttatatcatgtttacatgtgcatcattaaagctctagtagattagaaagtacagttagtttcattattttaactcgagtgatgtggtaacttgtatcattgatttacacagcttgattatactgaaccaacttccaaagctgtgaacaataagaacttaacttcaaatggggatagccaagggacagttggatgtgtggccgttgacaatgatgggaatttagcttctgcaacatctactggtggatttgtaaacaagatgaggggaaggattggggacactcctgtaataggtgcaggaacttatgcaaacaagctctgtgcggtctctgccacgggcagaggcgaggccataattaaaggcacagtggccagggatgttgcagctctcatggaatttaaagggctttctcttaaggatgctgcagcttatgcggtggacagtgttccaaaagggactgctggccttattgctgtctctgccacaggagaagtgacaatgccttttaatacaatgggcatgttccgagcttgtgctactgaagatggctatgaagaaattggaatatggccagacatctagaatcgatgataatttgactattaataaatcttgcatttttaataattatgttactacagtattacctatgatgtgtagatagattaagctgaaaaaaatagattagaaaagaaaataggacataaatttagcgtgctttaacgccttggtccatgaagtatttttataagctttaataatagagtttttatagctctagtatttctttcaagatcctaaactctttaatggaggagataatgccttatttataaggataaatgggtcagacagatcttaaacttgtactcaagagattattgttaatctcgaaaattagtaaggcaagctttccgaattagccaagtaaaacgccccgttaacagaatattgtcgagaaaattaaggtggtttggccctgaatgcaagctatgaggtttaatgcgtgaagacttgaagcctcaagcctgaagagagggtgttggtgacattctccgcatgtgagcatctcgacaacctcttgcttaaggcctcttgtcagctccttgctcgaggccttttagcagccacttgctcgaggcgtctcgcagctcatctactcgaggtgtcttgtcagcttcacactcaagcatgttgataagttgatattttgtcttataaatatgaccaatttatatattaatatttttaaattaattttttaaattattgattagtgtgattttaatttgttaagatatttagaagactagtcatgcatttggagtcatttggagagattttagcacattttagtgaaaaatagtagaagccggcaagttcagttttacaagacagaatttaaatgcaaattttgacgaccttagaagcagaattgaacttggagctacacatgaaagttttaaatctcgttctcaacttttcgaaacatcttgaattatctaatttgagttgtattgaaaaagttacgaccaaaatattaatctgaacacgcggtagaattttttcgacagcaagtcatggctgtggcaagcctcaaccttcgctgcggcgagaggacgtgattatagtttttcttcaatttttatctttttttttttaaaaaaaaatcataattttttatgggggcataaataggacttttagggttcgtttttagcaatttttagattacgtttttgatagagaaacttagagggagaaagagaagaagaacaagatcacgtcatcaattgttcatcattatagtttcttttctccttcttaatattttactttttattatgactttcattacaatgattagtttggagtattttttttatagttaagggttattttaaaaccctaaaacatgaattttgatttgtgattgttattcttgatttctctcatattaaattgtttctatttttctatttgaatgctatgaatattgtgaattcttgttaggggtacaactaattaaagttttgcattattctattaacatcttagaattttttctcatctaatagtttaggattctaagtagagtgatagtttgaaattaatagtaatgtcaaatgtattattgattgtgatgaaaaatagaatttaagttaaatgaattatatgctttattgatttgtgacctagattttaatattttttctaggttaaatagattgtatgattcgtggatctattgcttgtaaaagatttaattattaagtgttttgccttgattaattgtaatagagagattagaaaaattgactgcttcagcgtttatgcggggttaatagtttaattgagaaattagaataatttttattattattgatcttgaatgattgttgacggtggagattgactcttaactatttcttaatagcgtaatatttatatttatttactttttagtttattatttaatcttcataattaaaattctccttattgattcttgttactattttttgaataataaattgataatagtcatcgtgagatcattctgtaattacgttataatgaagtaattggcaatatagaaataaaaattagtaaatttgttgtggtaaacgacatacatcaaatttttaatgtcgttgttggagactattttattcaatttgttatgcattttttttttcttgttactaactttttctcctagttgtggctttaatttccagatcattctttggaaacatggcgatttataatcaacaatactatgatccacattatgtctcgccataagtgcatcaatatgatctgttatcttgatttttgtcctcctgacgtggcatgcttatgtgggaaaaatcagtgtcacgtggcagtacaactcaccaataggaaggccaagtcagcacctaaacaaacggagatcccgtcactcaaacatgcatcaagtgacagactagctctctctcaggagcgggtggtcggccctatggccggccagccttagttctgcaccatggccagccagcctggcctacatagggacctgaccgaccaaggggggcttagcagggtttcctgggcaattctatacgtggacatcaacacatgggctgcgaattgggccttaaaagcccaacagaatggttgaataatatctagattcaagggcaatttagtcttttgtaaatatctaacaaactatgcaagtggtaaggcatttaaactgtaatctaaggttttaggcctcacatattaaggccttaaccttagcctagaaacctaagttgcatctaaacctgaaacctgcctccaagctctaagtgtttgacaaactctctctcttcctcacttcctctctcacacgcctgccctggcaacatctcaacacttgagttttgccattattgattcatacgttgtaatcctaagggtgctatagcagattccatctatattgatctggatagtatttccctcggtataaatacaactaacaagagagtaggtcattacccgctatcacaagggggtcgaacctctataacaaatctattgtttattgcttttcattcttatttgtgcaaacacatggcaagcatctggcaagcatcagatctatatgacgccgctgtcggttgatcactttttgaggtcaatagtttggtgctttcattaagagcgtggatattgaaatatgatcaaacgccatggtgaatagaggtgttcaacaaaatttacaaaccgtccaacctgaataaaccgcccaaactaaatcgaataaactgacaaaaaatacaaccgaaaataatacaatgaaaatccaaaccgctcaatgaatatattgggtggtttacaaattattctaaactgccaaattaacccgaataaacagaattaaatcgattaatatattttttttaataaaagtgtatataatatattacataaattatatttattagccaaactattttgtatttaaagtttgaacattttagtgtttaaattaaaatctagactttatagttaataatttttattatatttagaaattgaagttgaagtttaaaatctatacaatattattactttttttattattttattcaattatttcaagtttactcaattatatttatcttatattaaagtttttaaaataaatttagactatagcattttttaacttgaaatataaatatgtatttttatcttcttaaatctattttcttgaattagaaactaagaataataattataaaaaaaatgaagaacggtttggagggttaacccgactaaaccgacgaaatcattgggcgggttgaactttttctaatttttaattgggtgggttacaattcaatatttgcaacctaatatttatattgggttggttaaaatatactataacccgactaaatcgaccgacgtacacccctgatggtgaacaaaagaagaactcatgtcgcaccatctgcatcttcgggtctccctcaagacccatagattacaaatctaggcactcagattctagtcacaactgggatccccatgagtactgtagattgtgtgaatcctatcaccataataggtgccacaagcctagccactacaactggccaaactgatacaagcaccctgatggaacaaatggcaggcccttgcctctaagggtagacccaccattggcgacgcccactaaaggaaggacccaggggcgacaaccccttggaataacaaccggatctcgactctagttctatgctggagagacaggcccaagagttggcgagcttgcaattggcaagccccatttggacctaggagaagatcttgagttggctagactcagggaagctataagcagtgcaggcgtaactgaagaaccacgcgctgctgattgagaagttttcggtcagcagagatgcaaattcctgaaatggatggatgaccaggagtacatccttcgatctcaccaaggagagttagatcaccgcaaccaagatgccagggatctgataagatgattcaaccagagaactgatagaagaggccaggatctcctcagagatgcacttcaaagaagacttctgccaagttccataggttctaggacaaatctgttggaatatattttaccaggacctagaattactaacaagtatgtttttaacnnnnnnnntatgaatttctaaaacaataaaacttaaacacatat

SEQ ID NO: 14168 - DNA, 8476 bp, Cannabis sativa
tcattaaaatcataacattgaagtacaaaacccaaagtcaccatcatctcattatttagaggtagtgaacacattacacacgtttgtttgttatttttctttttagtgtatacaaaactaaaggggccataagcaaagtgatatttaacattaacttaatttatatatatatatatatattgcaataaagaaacataatgatacaataaatatatttataacataataagttgcagaaggtgcttcattatatgttgattgaatcaaatattcctactacatagaaaggcaacatttttaggtgaatcataatcactacaccttacatattgttacccaacatttatggaagaaaagaaaactaaaagaaaaacattaattgattcaattttttgtttttttttgtttggtatttgtaataatattgtttttctaatgagatttggtgagaatggatggtgatgatgaaacaggtgttaagccatgtttaagtgcagcattccaaacaaggtcaattctgtccacatctaaggctccaacttcatgatgagtccatccttcaagtgaatgaaccactccacctgcatggcatgcatgtactactcctctttccatagtatactgcatctcatcatatatatcattacaacaatataacacatctatactacccaattacccaaaagaaaaaaaaaaaaaatctttttcaaatatataattttttttgataatttttaaaaataccacctattttaataagggtccaaaatattttattttttctaaggcccaacaaatttctaagatctaaaaattttgacacattatcttaggtttttacaccaaaaaattcatcgaaatttttttcaaaaatactttgtactgtgttaaattttcactgttgtttaacatttattttttggttgttccactgttgttttagttattctattttattattttacggttgttttataaaaagacaataattttgtaaaaaaaattcgtgtaacagtaaaattgtaaacttttgccaaaaatcaaatatttttgtaaaaacctttaacttagtttcatatacacttttaataattaataaatcaatccaaccaacattgtacaatatatgtaaacatatatatcaatcaataaaaaaaataggatgatgtttacttcatttatattttgttgttattattgtaaggcaaaataaaaatttaagccttttttttttgttcttcaagaaaaattatggtatttttcaatataattctataaaataaatagttttgtaaattaatttaacttttttcacaatttaagaaagttattggtaatgataaaaatgaatattattttattacctcacaagatccaaggccttgaacatcttgaggcaacctcatggcagcaaggtcaccataagtacagtctcttctaaatgataatattggtggaaccacaaattgatgaaagtgtgtcccacttggggcccaaccttgctctcttggtgttatccacttcccaactatccaagtctataccatttattattattattattatcacttcacaaaacacattatacaaatatataaaaaatactaaaaggtaccagtggttagcaccctactacgtatcaatatcgctattggtacaattaaatatcgagtcccatataatttaatgtagtagtttttagagaatatcgctagtcaatcgcaaagtaacacatctagaaagtactaagtactattggtgcctaataacaatgctctaaatatatcattcaaataatatttattgtaaatgaaaagtcatcatcaccttgcaattctgtgctgcattgtattttgtgacttgaacaaggtaaggctggcattcagctggagcttccttctgaatattttgaaacctttctgttgatagagtcaacatctgtaaaaataaatttgtacgtgtagttagcgatatttcataataataatagtaattaaattaaaatatgttgttattgtacttacgagaactcggacttttcttcgacaaaggtagagagcaatggctcttccaagcttagaagtggcaccagttaaaaatacctcttttacatcttttggaatctcatttagaataactgctgctgttaaggtgtttccatgaacaactctaacttttaagtttgggtgcttgtttacaaataatgtcccaccaccattcaaagcttcattctatataaaataataaataaaaaggtgtaaattatataagttgtgtggtccttataagtacaaccaagtaagtaaagaaatacctaaacttgtacattttgtctaaatacatttacacaattaatttcatcttgagaacaatcccaataaattttaacattattatcaccatccttgattgcctcttttgttctcaattaattgtcaaagaagaattaaatttcatttaataaatttatacacaaaaaaaaatctagaggactgatataagatctagtatatgttggcatattatatggaacacttgatgaattgtgtcaatgatacataacatcacaacacagttgtctaataaatgatggtacttttacgttcatcatttggaatcattgtaaaaatatataaataaaataaatataataatactaagtcaataaatttgtgttctttagtaataactaaacaaaaccaagatagaagaatttaacataattgtccccacaatcaattttcacattaaaactaatttaatattgcgtgtgaaagaatgaaaaagagttttctagacttttaatgacaaaacaaattattcagtatggtttggaaaataccataaactcaatttattttgagaggtttataatgcatgaataaatatgtaaatatcactcaaaatctttgtgtgtgtttgtgtgttattccaatgtaaacaactttaatatatgaccccactaaaaccaacaagggattcaatgtaatggggacactaatcatctttagaaatttaagtaagttctttttggcattattcaagactatgttgtatatataactatatattagctagattataaagaaggtgaaatgagtttgttaaagttaggtacactaatttttatgcaaatttaatgatttttttttacttaagtaaaataaaagatcacaagactagttacccttttgggatgtgatgaccaaagatggatgattatatggaatttctattcacactaagtagggtagtagattaaggggcccacaacatagaactcatcaaagcaatttggttctaaaaaaaaattgagaaaaaaaaatagataccaaatatgtggaagagaatttactgcaaccatgtgtgttgttcataaaatatttatgtatttttgtttctgaaaatggttataaaggctgaacaagatgacagaagaaacaaagactatatgttattttatatgacatggccacattttaaaccataagtgaaatgcatttatgtcacaaagtcatcttttaataattaactagtcctttcaaccatttattgatgaaatttaaatgaagaacataagagagagctatatagatatatataatatatgtatgtaccatttctgcaaaatacaactaccctcctaacccaacccaacaacccatatcagaatatacttaatagtgttatgtgtataaattacaagaagaatagtgatcaataatcataaccaagaaaagaaataataataaaagaattaccaaccttatttaatgcagcaaggctaataaccttaacccctaacttatcagctctaagaatggccttctctatttgcttgttgattccttcagtggcatatggtatgaaatactgtcccaaatacaaaacaaaacaaaacaattcattttatttggtttttaagtgatatatataggaaacggacatagtcctctttcaaaactggtcctgttttattttggagtaatatgtcattgacttcaatagtactatatattactccagaataaaacatgacccgctaaaccaaacttaaaatacatatcgagatttgtgtccgaaatcaaatacctgaaacccaaatctagggacaacccatgtttggtgcagcctattcctgagcttgtagaatgaaaccagaaatggtttggccttaagccacattgctaacattactacgaaaaccccaggccataatggtaaaaagaagagttttattgagtatggcattgatgcaattgaccggaacacaaagggcacatgtaatgcagatgttatatccaccacatgggctaggaatacaaaatctggtaccttgctatttttacctgtgtgccaattcattgcaatttaattctctatatattaacaaccaacaacaaaagctaactcttcatcaatataatttacattatatatataaatatttattatgtaccatacagtgaacttgaccattcaactcacctgcattacaacttattttcttgtgcaactcccatgaactagggttcaaagtgttccctagtgcatcaaatagaggcataaagaggcaaaagtttgtttttttctcagtatggtgtaagctgtggtatctgcaaaaacagggtcagaaatttaataatcttcgaatcactattcatctagtcaaagagtttttttttttctttctttggtcacatttttgggttaatttattacaccccatggactagtcaattatgaatataaaaactcacaccaatactaaaagattttaactttatggctcattagaggaccccctaaccccactacatgttcagatgaaaatattatgacaactttaccaaattatccagtgtccaactaccttattaaatcatggaaaacaataaacctttcatactcaagggtataatgagaactaaaatgatttctttatatggataaagattgtttttttttttaagtttctctttcttactttgcatcttgattcttgtctagttaaaaaaataataccaatattggactaaatgtatataacaacaagaaaatgaaactaacttgattctctaaaggcaaataatgtgacacttttaagagattagcccttctaaaaggggtttattttaagccacaaaatagttgcatatatattatattatatattatatatatacttgcctaactaacaatattaattaactaatttctccaataatttggggtaatgtaacaatgaatgaaaattgtgtgtgcatttaaagagagaagagaaaaagagacgtggcgtgggaaagtgaaattacttacgttggagtatataaaatgtatctaagaaatggcattttctcaaacaccttgtgactaacaacttcaacattgctatgccccaaacacctcagaaaatcaaataccaaaacatagccatataccaattttattgatccatatcccaaaagagaggaacccattacaggtatccctatgatgatacctaaaaccatattctcaagtagacttccattcccagctgcaataaataaataaataaataaatttattaattaagttttttaacataattaacaaaagggtgttggtatttaatatgtttagttggttacctgtaaagggtgtttgtactggagtggaatgatgaagagaatggtaattagtgaaaagataatctttgttgtgaaaatttctatgtacccaatagaataaaggctctgatattccaatatgaagcaacagaactgtgataaccccttttgagtcccacaagggaagattttgaagaaatgggaagatgtaacaaccaatgaaggccatcagagtatgaagcattaatgaattatccctgtcaagaaattccaattgtccaacaccaacatgatgagctcaaaaataataatgataataaaaattgacttgtttaagcagagctatttattattatttaccagtcccattctttgtcaatctggttgaaatcaacaccttgttcaaggatttttctgtttcttgtgatgaaaagcatgttattgtaggaaacccatagttgataaatcaaacacctagctagatataaggccactatatggaaacaccagctatctttctgaaaatcttcatatatgattgagaagaaagcttttgcaaatacaggaccaagtaccacatactgttttaagaaaacccagaaaatcatgtatcaaaattcataaaaaaaaaaacagagaaagatttggtttttgggcaatttttttgttaccttgtattttcccaagttgtcccaaggccaagctgataagaaagcaaccatcttttttcctttctccttcaaaatgaagctaaaagcctcaaccaaaattaagaaaaaacacccttttggtacttttctcaaactctgtttttgtttttttgaatgtatgtgtttgtttttaaatatgtatcgaaacactacaagacatatatatatctttctgaactcctcaaaagtttttctttaccaatgttatgaaagatagataaagagagagagtagcaacaatttcaagggaagagagaaaagaagaaattgtgttttagaaaatttttgctatgccacacactattcttttactctcaaatgtctctctctattctctattctttcaaatgatgtctaggggtacctatctatttatataactcaaaagtacatccttccaaagattaaggcagttaaaagcttttaatattttcttcttttttctttttatattttcttaaaattattattaaagaaaaggaggacaaggctactagaagtgttcatcaaactgttcacatcacacaaatcgccaccgtataaaaaatggggtttgaaatcttttgcagtactgctgtagtttgcatttttgttaaatcgcgtaatgtagtacggtttgcggttttgaatttaataattgtagttcaaatcacactgcactatatgtattacaaagttacagattttttcaatatgatttttattctttttttcatataagaatgtaatatatgtgtatattacattattttttaaaaacaatttaatataataatttattgattagtatatatgttatgatgttaaaattttaatatgattttttttttattattttttgtattattaaaaatttattagaatgatttttatatttttattataatgtttgataatgatgatagtgtgaaccgcttaaattgtactgcgctacgctgtatttttacggtgggttttttacagttttaagatctcgcggtgtggttgcagtttgaaaaattacaaaaaccacatatgcagtttagtcatttgtgaacacccttaagggctaccaggtgtcgctcttgtctcttggggtaagcatgggaattttaatcccgctaatgaatgttcgtcaagacctttttaagcgggttgtccccatctacgccaggtaaggctagccctaaggagaggtgaggaaggcatgcgctttaggccttcgaacacttagggcactaaaattgtgaaaaaaatttattgtatataaataaaatattaaataataaagaaatacaccaaaatagtatttaatatcttggtagagagtgttgttttaacgtaggaggtaagggatgaattctgaacattcactttttaatttactttagatgattgtactttcaaactttttactatttcaaaaagttttactactgttagaattattatatttatttgttaaactatttttgtatttaaagtttggtctttatagtgtttatttgaaatattgactttatggttaataatttttattatatttgaatattgaaattaaatataaaatcttcatcatattattacttttctttaattattactttttgattaatatttgtttaaaaagaattatatttacgtaattatatttatcttatatatattaaagtttttaaaattaatttagactataatattttttttaacttaaaatataaataatatatattttttaaaaaatctaattatttaagtactaaaacctaacgttaataattttataaaaaaaaaaaaaaaaagaaagatcggtttgaacaggttaattcaaacaacctatgaacgcattggacaggttaaactttttctaatttataattggaagggttacaattaaataattgtagctcaatatttatattagcttggcaaaaatatgctataacccgaccaaacctactcacgtaccatatgtgtagtgacacttttgggtgaaaatatggtggaaccagggctgaccctgagttgaaataggtctaaataaaaaataatttttagacccttaccataaagataaataatatttttaaaaattattgaaaaaaaaatatgtatatttttttattgaaatttttacaccaaaaatctgttttgcacattttattactgttttac

SEQ ID NO: 14169 - DNA, 3923 bp, Cannabis sativa
  modified_base (842)..(847): a, c, t, g, unknown or other
taataatgtttaggcctaagtttgccctgatcaattccaaacctatatatatagggacacgattttttatgattacggtagccgttaaatcaaaacaattatttgatctgagagtttatagcaagtactagtacctacaaattaaaagaaaaacacttttccttcctgcactttcaagtcgaaatactaaaataatatataattaatcattataactatacaaatacaatgaaaagtaatattatatatatcactcaaaaataaataatggctaaaattagagtatacatggccacccatatatgtagtttatctggaccttgtaaattttcgaagcaccttatatttcgagggttataataatacaacttttatgtttatttatatttattggtcttccatgatcacttataataattaagtgataaaacatttaaaagaaacaaaaaatattaagaaacggcaccaaacccatttagatatgtcgtatggatttgtgaacaaaacataagttataactaaagtcggccattttcgttagtgtggtacaaccattttcaagctgtaattttcatttaaaatctgtaggaaagtatttccttaataatagtcattgaggcatattttttagtgcttgcaatatgggtcctatgacatacaactcgaaaacgacataaattaaataggaaaatttacaaaaatattagaatttgagttaacttttataaaaatactgtgacacggaaccagtataacacaaaacataacgattcaaaacaacagtagaacaactaaaaaacatcagtagaacaccagttaaaacttaacacagtatactgcannnnnnaacttataaaaaaatacagtaaaataataaaaataccgtctgacagtatttttataaaaaaaataacaaaaattagtataccatgtaaatttcccaatcaaatattactttttaccttagtgataaatctaaagttcttaagtattacttgagggaattcaacaatcaacacctacactaatttaattatggaagagacttttataatcacaaaaataaattatattttcatcaatatctcttataaaaaaaaatgtcaccctctctaaatttctcctattttttggccatttgtacaaatagtagtacatagcctaacttccttgtatgaatatgaaataatagtgggccgggcattgaccattaaaggccggcggcccaaatccgcagtttcaactctgaattctcaaacaaagttggtgcctcttctcttgtcgtatcttaatagttaatagctcattcaaattagtggatatcacgttattatatttataaataaaaggactttaataataagttggtcacttggtcatgacctccctcaactcatttaatcaaattaaaactttggttttcttaaacatattcttaataataataacaaatcccttaaaatggtataacatattaaccttaatttcttgcttacatactggttaaacatatttatataaaaatatattttgtgttctcaaaatggtgttcaagaaaaacatagcacctagacttaatccaatgacataattttaattatattataatgaaccaaagttattaatgctcatcatcaactatatatatagtcctatataaatacatggttcattaattaacactatatctaaaaacataatactcacaaaaatgaagaagtcttgtgtcgttttgatggttttttgccttggtgtaagctcattgattgtcgttttgggttatggtgatgataatgataataacaataacaataacctttacaagaatcttgatgtaacatggggtgaaggtcgttgcaacataatcaatggtgggagtgttatggcagtgtctcttgacaaagtttcaggctcgggtttcgaatcaaagaatgaatatctctttaccaagattgagatgcaaattaaacttgttcctggaaattctgctggcactgttacggctttttatgtaagtttattaatttttatttaatgtcgtatatttaatgtatagttactaatgttaatgtatatgaattaaatgttgcagttatcttcgaagggtgaccaacatgatgaaatagattttgagtttttggggaatgtttctggtgatccttacacacttcatactaatgtgttttgtaaaggagaaggaaaaagagaacaacaatttcgattgtggtttgatccaactgttgattttcatacctattctattctttggagtcctcaacacattttgtaagccttttttctacctcttgtgttaacaaattgatactagttagaccattataaattttatgggtttctatatttttgtgcaaaaatagggttttttttaaaaaaaatattattttatggaaaaattgaagaaaaacttaaaaatatgagaaattcaggtaaaaataaccagatacccttatagtaactagagaggtaatgagttgccatataaaggtaaccatgtatcttatgttatttttccatatttttttaacttttttctaaaattttcacataaaataacttttctttgagaaaaaatatatttttataaacttatactgtaaaatccataaaaataaaaattcttctaaatttaaagaaattcaaaattcttcttgcattgtttgtttatcattttaacatgcctcacatttatatatgatgggacatttaattattggtgcaaatcagtattaaatttggcattacaatgctaatttgcactaatagtagaatgtaaaaatgcaaaagattattttatttttttcttcttctaaaaagataataatttaatttacatatatatttgaaaaacatcatttttttcacttttaaatataccataaacctacccttttactttagttttagtactatttttaattagtgtaatgatatatatacaaacaaaataagcaccaaaatgttacactgaaacttaatgatatgtggcaacattttttaagttgtgagtcccatttaaccagaaatgattggctgaaaaatgttttagtgtatttttactattgaactttctttattgtgtagttttggtattggtggtctatgaatacacatacttatggagttttctctttgttttgagaaatattataggtttatggtagatggagagcccattagagagttcaagaacttagaaggtgttggtattccatacccaaaaagccagcccatgaagctgtactcaagtctttggaatgctgatgattgggccacaagaggtggtttggtcaaaacagattggtccaaagcaccattcacggcccacttcaagaatttcaaagcccaaaatggttgtagctggtctaatggtggctcatgcaaaaccctattctcttcatttagcaacaatcacaggctttgggataaacttgaccataaagatcaagaaaagatgagacagattcaaaaggacaatatggtctatgattattgtactgattacaagagattccctcaaggccccccaaaggaatgttactataagaatatctactaattattaattagttactatttgatattaagggataatcatgacccttatatttcaaccatttttcacattcttattgttattattattattaaatttagttttatgaattataattctttatttgcgtatctatcatacatttctatgttacttgaacaatgaatgaagaaattatttctttgttaatcatggctataaattaatattttggaatcaaaattatttccactaattattattattttcacacaatgtactttaaattaatttgttaagttatttttaaaatgcacggataggaagaatatagtactaaggttatgtttggtgtttgggatggagatga

SEQ ID NO: 14170 - DNA, 5527 bp, Cannabis sativa
tctctctctctctctctctcttgcagtctcaagaattgtacttcttgcagagtgagattgtcacgggaggtaagattgacaaccacgacttcatattgtggacccaaaccagcaagaacatataagatgagttgatcatctgtgattgtatttccagctgcacgtaatccatctacaagattcttcatcttgaaaaaggtattcatcaattgacagggagcctttcttggtgttttgaagttggctcattaagtgaatcaaacgagctttggaggtggtgccaaatatttgtttacgtgttctccatagctcatgagccgagttgcagttaacaacatgtcccaacatgttttcagagatggaagacattagccatgataagagaaactgatctaaacacatccaacgaatatattttggattggttacctaagtagtattttctggtggttgtcgaatgcgttgttgtggtgggttcaaattctacaatattggttcaagatcatgcgccctgattgctagtaacacttgtgatcgccagaaaaaatagttgttacgattgagacgcaaaggaggaagaaacattgttgttgggacaacaaagttgttggtaggtgctcctgaggaagataccatggaagaaccttgggtgactgataccaagttgtccacaatctccccaacaacaggtccacaagatctcaagaaagtctcaccagaaccactgccagttcccctacagtcactcaatctacaacatgcaccaccactgtcaccccaaaccaaccaacaaatacttcatctgcccctctaccatatagacaactgatccaccaatagaaacactcacaatatccaatcatccaatgcaaactagatttaagtctggtattcacaaaccaaaaatactagctgctacattaataagatccaatcacccatatcttgagcctaggtctgtgaaaaaggctctagctgatccaaaatggaactcagccatgacaactaaattttatgctcttgttagaaataaaacttggatttttgtaccatacattgatggcatgcaggttgttcaaaacaaatggcttttcagaaccaaattaaaaagtgatggatcagtggagaggttaaaggctagacttgtagccaagtggtttcaacaaatagaaggggtcgactaccttgaaacattaagcccagttgtcaagccatgcactctcagaattatgttcacccttgctgtcactaacaattgggacatacaacaagtggatgtaaacaatgcattcttaaatggggaactcaaagaaactgtgtacatgcaacaacccaagggctttgaagacagtgaacaccctacacatgtgtgcaaattacaaaaagccatatatgggcttaaacaagccccaagggcttggtatgaaaaactcaaattagctctgctctcatggggatttgtcaactctgtttttgacaattccctgttcatctcaaataacaaaaggaacttgctacttgttcttgtatatggtgatgacatactgatcactggtcatgattcagaagccatacaacaagtaataacagctctggacaacggatttgccttaaaaactatgggttctattagctactttcttggcttccaagcacacagatttggctctaaattgtatctaaaccagactaagtatgctcaagacatcctaaagaaagccaacatggaagactccaaaccttgcaccacaccaattgtgccctggaaacaaattgtttaccaacattgatgacttgtttcatgatcctaaactatacagaagcatcataggctcactttaatatctcaccttaactaggccagacttgtcatttgccattaataggttaagtcagtatatgcaaaaccccaccaacacacactagaatgcatgcaaaagggtgttgaggtacatcaaaggcaccactaatcttggccttgtatttcaacctgctacctcaatgaccattgaagcctacttagatgcagactgggcctgcaatctggatgacagaaagtctaccacagggttcaatgtcatgctaggagagaatctcatcacttggggttcaaagaaacaaacagctgttgccaaatcaagtacataattcgaatatagagctttatctaccactaccactgaaattgtttggatcacttcagtactcacagaaatgggcatcaacttatctaaaattcattctatctagtgtgataatcaaggagtacaacagttagcctccaaccatgtgtttcactcaagaaccaagcactagaggttgatgttcactatgtcagagagctaatcaccaaaaacaaagttcaaattgcctacattccaacagaggaacaacctgcagacttgctcacaaaacctctcacactaccaaagtttaatttcttttgtcaagctgtcattagagtatcttccttccagcttgatgggggatgctgaggatactcaagattagttctttggtctggtagttaagttggttatttctgttagtttagttaagtgagttaattagtgtattagctcctctcttccttttctgtattgctctattgtaatctcaactcagcagaaccagaaccagagggatcaacgttaagctactcttatatttctgaaaagctttcatctttatacgcaaaaaatatatatacctaaacccacctcagcttccatatgtgtatttatagctatcttaactgtttgttttgttatttatttgtaagtagagattgttttggagtttgattatgcagttaaaatgaagatggtttcattccctaataagctgattcttcttccatggactgttcttcacgccctctgtgactcccacagattcgctgaagctcaccaccgcttttcccttttcattcattccggttgtgtccccgacgagcgcacttgcaatattctcatcgctcgtttgcttggttctcgatctcccgaccatactttgagcgttatccgccgtttgattggtgttaagcgtgagtttgtgccttctttgattaattataaccgtttgattgatcagctatgttcgttgtccaggcctgcagaagctcatagcttgatttttgatttgttgggaagagggcattgtcctaatactgttacttacacttctttgattaatgggtattgtaaagttggtgaatttgattgtgcacagaaggtgtttgatgaaatgggtgagagaggtgttgttccgaattcactgacttacagtgttttgattagtggtgttttgaggattcgtgaggttgagcgtgggagagaactcatgtccttgctctgggaaagaatcaagtgtggagatcatgaccagtctttgaataatgcagctttttcgaatcttattgattctttgtgtagagaagggtttttccaggagctgtttaggattgcagaagatatgcctcaaggaaatagtctcagtgaggagttttgctatgctcaaatgattgattctctttgtaaaaccggtaaacatcatggcgcttcgaggattgtttatattatgaggaaaagaggtttggtcccaagcttggtgtcatataattctattgtacatggacttagcaaggagggaggctgtatgagggcttatcagttgttagaagaaggcattgaattcggatatcgaccatctgagcatacctacaaggtcttagtagaaggtctttgccgagaaaatgaccttcacaaggcaaaatttgtctttcatgttatgctcaacaaggaaggagttgagagaactagattttataacatatatcttagagctctttgttttatggataatgctgcaactgagcttttgaatacacttgtttctatgctccaaactcagtgtcaacctgatgtgatcactctcaataccattattaaagggttttgtaagatggggagagtagaagaagctttgaaagtactagatgacatgatggttggcaagttttctgctcctgatgttgtgacattcaccaccatcatttttggattacttgatgttggaagaactgaagatgctcttgattttctgtgtagagtaatgcatgacagtggtttgaaccctggcgttgtgacatataatgcagtccttcgtggattgttcaaacttcagctagcaaatgaagccatggagatttacaatgtcatggtaggaaaaggtgttacagctgacagtactacgtacactatcataattgatggattatgcaagtcttgtcagatagaagaagccaaacggttttgggatgatgtaatctggccatccaaaattcatgacaactttgtctatgcagctattatcaaagggctttgttgctctggaaaattcagtgaggcttgtcatttcctttatgaactaattgattccggggtttctccaaacatatttagctataacattctagttgatagcgcctgcagactaggattgagggatgaagcttatcgagttgtaagggagatgaaaaggaatggacttacacctgattgtgtgacatggaggattcttgacaagttacatggtggctcgagaaaacaaacatttgctgacgattcagccttaaaattgagtagcagatcacaagagatggaaatcgaactagattattgcaagaactaataacaatgcttatgaatgttcacagataatactgtgttaatcatcacagataacctcttcaagctcctgtttgttgtatgggattaggataagtaatcccaatcccatgtttggttacattattcgatgggaacaataatccattggttttatcaaacataaaaccactttccatgatatttgaattgaacctacaacattcatttctcgatgctgatgttctcctccctacgccagttgccattcgtcgtcatccttgttgagatcatcccactatcaccattgacatcacaccaccattctcttgttttcgttcatttcaaacttcatttgtaagtgcttgagattacatttgccaagctagatttgtttagtttgttgattttgactctccttgtgtatctctattttccttttaatttattggaaatgcttgtatgtataggattgaagcagtgtgcagggaacaaccaatggggccgaggagggatatgcagatgcaaagcaaaaaacacacttcccttgaaatttatgagcaaatgatgcagacctagcaagcttgttgatcaacccaacaggcagtgagaaaaaaagacatgtttatacgtgagtcttttctttggaattgaactagttttagtgttttagtgtattattattattttttttgtttttaatttcagtatcttatttggttcatattttgtgtgtattcttaccaatgaaaatgtagtttgttatcttgctaaaggaaaaaaagatgaagttaggacagtaatggtatgtgctctatataagggtattgcagtagttgattccaatggtttcttctttt

SEQ ID NO: 14171 - DNA, 2462 bp, Cannabis sativa
tattttatttcaaaatttaaaatagacaagaaattatattatagataaaattatctattttacgtgtggttggtaaaattccgagattacaactgataacaaggcattattttcacgtgacaatatgtgagtggggtcatttttacaataatataattaccgtttaaaactgaaaaaaaagaccaaaatattataagttattttaggattgaaaaaaccaagtggcaaaataacgttattattacaacgtaactcaaacaaaaatatattaataataaaataaataacaaaattaagttataaaaaaagtaacttgcctcgtacattataaataaataaattttacaagtatttgactgtttagtaataatttatttttcaattttttaattagtatatttaattttttttaaaaaaattaaaaatttaataaattgaactaatcaaaaattattacataataagtatttatttaaaatcatacataaatttaaatatttataccataaattacccttataacaaaattgaggccagagttagccatggtcataataaactcgtaactcattaacataataagccattggtttcaaaaaaccaagtggcgagtcatgagtgtgagccaactcagtcaagactcgagggctgtacaaaaagactcaaaactcatcatcagaaaagtcaagacaattcaatcacacgtgtcacactcacaacgcatatgaaactgctaacctttttattaattaattaatttatttattttctataaataataaataaaaaagaagaaaagaaatagtaaaggaagattaaaaaaaaagagaaataaaacacaaataatagcactagtttcggcctcaaaccagcattcatttctgtgcttcaaccaacaatctctgacccatcttcttcctcatctttatcgaatttacaggtaaagctctaaaacaatggaatatcatacaaaatatttttaatatttatatatggatgggaacctttttaatttttgaggtaattacaaaaaaaaaaaaaaaacaaccaaacaacttggctaagctttgaggttgtgtaataataaattgaattataacaaagacaagaacttttttttatttgagtttatttttgtgttttttttttgataaaaaagacatggaaggaatggaagccaaagctttgagaccgagtttgagaggcgagttgactcagcttgaggattttgaagaggtttataataataataataatactaataacaacggtaccggaatttcatgtgatgatttctccattgatgagcttcttaaccttcaaaatggagaatttgaagaagggtctgttgaagaagaggaagaagaagaagaaaaagactctctttgtgttgatgaagaaagtttaactctttccggtggttcttccggcgccggtgactctgagtccgctcttaccagcgaactcgccgttccggtaagagaaaacaaaaacatgtttttttttttaatttaattttgggaaattgaaataaaaaattaaacttttttgtttggtttgtgtaaacaggacgatgatttagctgaacttgaatgggtttctcatttcgtggacgattctttctcagatttttctcttttacacccaattgaaaaacagagcactgaatttcattcggaaaatcagttggaacaaccggagccgagccgacccggaactaacccgacgtgttttccttcagttccggtgaaaaccaggaccaaaagagctcgacccacaactcagccatggtcgaggactaactcgctgagtcaactcaccgagtcaaactcaacaacctcatcatcttcttcttcgtctccgccgccgtgttcggcctcgttttcatcgaacccttgtctcattttcaacaacaacgtggttcagaccatggagtttttacgaaacttgggcgaaccacccattaagaaaccgaagaagaaaccggcggcggttcaggccggagctggtgctgtggtcggaccacagttccagcgacggtgcagccattgtcaggtccagaagacaccacagtggcgaaccggtccgctcggcccgaaaaccctttgtaacgcttgtggggttcggttcaagtcgggtcgtcttttccccgagtaccgacccgcttgtagtccgactttttccagcgaggtccattcgaatagtcatcggaaagttttggaaatgaggaagaagaaggaagttgtcggatccggacccggacccggacccgggtcaggatccgggttggcccgcgtaatttcaagtttttgaggaaaaaaaataataataagggtagtttttgaggaaaaaagaatattattttttttgtaagggtagttttggaatttcaggactttgaacaattttttttaaggctttggtaaaagttagcggcaggcagggacttaggaaggaagata

SEQ ID NO: 14172 - DNA, 12913 bp, Cannabis sativa
  modified_base (513)..(516): a, c, t, g, unknown or other
  modified_base (12857)..(12859): a, c, t, g, unknown or other
  modified_base (12886)..(12887): a, c, t, g, unknown or other
ccgaccaggtgctctaagtagatgccacgtgtcaccattctcatgatgctacgtcagagtgccaattttaggataacagagtttatataaaattccaataaatactcctagtgaatttcagattttagctataaaaagcatctttaagaaatatcttttaaaaaaagaatgctaaaatcatgacatgtcctcattttgtattagatgaatactaattacaatctcctattacaaccttttagtcaaccttcacgtctgaaatcacattttgaaatattttttttcatagcagtattcgttatagttacagtataatccctgtaaatttttaaaaaatttcgaatagtttacattaccgaaaacaaagttcctgatattccagtttaccacgcgcattcaaaaaacttcaaacgtattttcgacactgtaaactatttgaaaattttcaaaattttacagggatgatgtagtaagcataacgaacacctcccgtgaaaaaaaaaattgaaaaannnnattccgacatgtattttcggacatgaaggttgtaacaggaggttgacggtagcactcctcttttgtattataataagtgcctgaaaaaaaagttattttaataaagagccctatattttcttctaatttcattttgcccctttagtaagtttatacaacaacaattgaaaaaccctttctccaaggtttttgctcaaaaactcatatttactcccttcatcttcctaaatctctctctaaattactctactggatcatcaagttagagagagagagagagagaatgccttcgccggttcatgctgccgaagccgacaatgactgctccaacgatgcctcaaccatcgctgacaacgataaagcttccaatttcttcgacatttatggccctcaggtactttatctatctctattcttttgcttaaccgctgttgtttgatttaaagaaactgggttctctattctgacttcaaattcaagcgcttgtacaatgatatgattataaacctatttgtatattatatatatttatataatatgtctcgcatttatatattaagttagcgaccagaagtttttttttttccctttttcgttctgatatattggtaaacatatctgaaggtggcatttttaagtactaaaccaaactgaaacttttatcaaacaatttttttttttttgaattttctgattattctgttatgataaactatacaaccttcttaagcagactattagtattttacattgggttcgatttattttccttttcaggctaaagcagaagttgtttttacagtaccagaggctacctctactttgaatttgcaagttggtaccttgatcaccctcgtatttttgttttgtatgtaagtttgaactattttgactggcatgtactgctgtacaggatgttcaaggacttgtaacttgggtgcttgctgaaggattcatgccaacatgggctttcattaaggtaaattgtttggaaccctaaattttcccctttgctatacttgattggctatgtgattttttttttctattctgaaaattttctctttatgaaaagctgaatttagtagatgtcactagtaggagtgtagtactagacatttcggatagggaatgagtagtattatttttgaacttggaacttataatctattcatagataacaaaaaaattagggctttgagcttctggttacatgagtattcgattagtggtttttactaatcacaaattgtataaatattactcaaaagttacttacataactgttaatgatttgcagaacaaacccctcatcccaaaagtggttctgctctacattccaggcctagatgcagcattgtacttatcacattccaaaatgcttcgcactcttaaagaattctgtggaaaacccagggcagttttggcgcttaggttagtattgatgcgattctttactactcctgtgatagtgttgttatgtattttactttcttttttttttacatctgtgccagttgaatatttattagtttccctcttgaaaacattgtttactgtttcctcacaatattttaaattttggttcctccttgctagttgtatatcagatggaatgcaaacgattgatacactcctaacatgcaaggtcaaaagaaagagggatcagagggaccaaagggagcctaactcaacaagtgaaccaggttggtgttcttttgaaactaattaagcagtttaagatatgcaaatgaagcaatgattttgtgtactgtttccacaatttgtcagtctgaaaaaaaaaaaacagcctttatttgatcggtatgcatctgaaggtttgtttcatgaaactattaagaaattccttcttgaaagacttgtatgcactttagtttgcaaagctctatggcgtgtctcttgtacttttatctctctcctccttcccctgttataagttatctaatcacctcttcttcaactgtactctctctctctctaatctattcaacttattttgtatagtacttaatcttatcataaaagtagaatatccagtttatgtaatgtactaaaacatttgtgttttgcagaaaaatgtgattctgagacagttgaacaatcctttatagaacttaagaaagatatacctttccccattacatattacactcttacagaaaaggagatggaagacaatggctactgtcttaataagccaggtgaaaaatgaattacatgtcatgtctttcttataagaaacaacgatttctagaagaaagattattttaaaccttaaaactttatattttgaatgcaggttttatttctactatctctgctccatcagaagcatctccatatgatttgttggcacttgattgtgagatggtaaatatatagatcttgtttatacttttgaatggaataaatatatgtaatctcatttgcaaacattacttggaatatttactattgaaaagcttaaatgacaatttcggaaattatttattttattccaatccatgcgccagttaggtcctcacttggtgattatcttatctgtcagtaagatcttgtttgggacttttggtgtgattgtagaacacattgaaaccaatttttttaagtttcaagtatgacaatacgactcacacatgcttggaggggaattgtaaaaattggttattgaattgatgcctgtagtagatgcaagcctttatttactaagaaactcttttctaagattatatttaggaaaagtttactaatcagttgtttgttttgcatgtacaagtttcactgattatggcttataaagttattggatctgattttggactatacaagagttagatgcaaagttgcatatcgttttcagaaaaatgatgtgattgccatagagctttagttgaaagcttaatttgtttaccttgtgaaaattgtcttgtggtttcttttctttcatttttgctttcatgtcatctcgttctcaatttttgttttttttttgttttgtttgtgtagtgcataacaagtgagggttttgagctgacaagagtgaccttagtggatgttcaaggccaggtatcttttgattaaatctatccttttccccccgactattagtcagaaagctttcttttaatgtgccaatgaaaagcaaatattttggtatatgtcgttcttaaacaacttaattttaagtgatactaagattattgtcaaaatgtgtttttctgttattattttaagggggccttggcaaaatgttaacatgttttttgtttcaaatttctggcatgggagactttgggagctctcatttagtgatgtatttatttatgaaactggaattgtaaatttcgagattagttttactaatgttactttaatgatatatatccttaaatgttaaccaggctgtcgtctgattctctcaggttgtgctagataaactggttaaaccatcaaacaatattaccgattacaacaccaggtatgttgtggtttcgctctttgtagatttttcgggaattattgtagctggccttttcaagtagttaggaatggttgcttttctttcactgctcagcctaagaggaaatatgaattctagttctcatggaagtccaaatataaagattaatactgtcaaaatgttttgaaggtggatattcctaattttaattttttgttattgtataaatagcaaaacttcttgtccaaattctgacttctactatccttggttattatattatacccaggtggtagttcaatttctagagagattttattttttctcttcgaaacaacatttagggctctctaccattccattcctgctctctgacttcaacccctctctttcatattcttcatgttaatgacagttaactattccgctctccacctcttgtctgatgtaaataactatgttatgcagatatagtgggattacgagtgacatgttaaatgatgtgactacaagtcttaaagatgttcaggttcattactcttgttgcatttctctataattttatgctcaacaattttttcttagtggcttctaaaattgcttatcttacttgattctgttttaaagctattatttcggatttatttacagttgcttcccatactcaggaggattttctaaagctggtttacaaggagactgtcttagttggacattctgtggaaaatgacttgttagcattgaagatctctcacaatctggtaattgatactgcagttctgtacaagcaccctcgtgggagatctcataaaactgctttacgagttcttgccaagagatttctttctaaggagatacagcagtcgggggatggtcatgacagcactgaagatgcaaggactgcattggaactggcacttttaaaaattaataatggtgagtgattctttttatgtatttgtaattattactgcagtattcatgttatctagaatagaggttagctaagttgtgaaggtggtgaagttaagtctggtttaatcattattagtttggacgttttttttttataaattaggtcctgattttgggtcaccgccatcattgataaggagaaagctccttacagtcctaagtgattctggaaaagtctcatctatgattgatgatgtttcgatagttaaacgatatgcttcagaatcatcccatgcgtttcctgtatcttctgatgatgaagctctttcaaaagccagaaaggaggtaagtcttttattccttcattctttttccttaacattgggctgcagcttacatactgttatatgtattatgtcgtattctaggtaaagaatgaaaaggttcattttgtttggactcaattctcagaattgaattcctatctgaagaaagaagcagcgaatccagagaaattgaatgttaaacttgcagagatgatgtctttgcttacctgtcgtgataaacctgggaataaaaagggcagcaaatctaaagttacacctgaactgaaggaaattcttgctcgtatggattctagaatccgttatcttcataacgccttacctactaatgccatgtttatagtttgcaccggtcatggtgacacagcaactgtccacaggtacagtttaccacctcaaatactttttcaaattaatgcatttttttctctgtggatacctgctaattctgtcttcattttctgttttaaatataaatttatgctttataaatatttatttactttagctcttatattgctataagaatgcctgcccaactaagagagtaattgatgccgcatctgaacaattggataccattatgaatattttccatagccttgtaaatcacaatgcggattttacacctttgttctgccttcctgtatagtagaagtatcatatatatttttttacactaattttagaattgttaaaaagcccacaattagggaaggacattgaatattatttggtttggggaacaatcaccacttcagaagggaaacaatgattggcagaagtgtacacttgtcttgagttggtgaattgagctgacattttagcacaacatattacattatgagggttccttttttggggcctcaatagtacaaaatgaacactcctgtttcaaaatcacatcatataatttacttacaatctaacagtttagtatcattgaccatagaatgaccgagataagatcggttctttaaagtattgatatgttctttcatgttttaaggaactcagaacaaatatataactgcattgcctgttttctgtactgagaaatgtagtttgctctcttagtttatagtttttttttactgtattgtcctattttttaccacggccacaagtgaggctccctaataaattcgggaggagttcaaatcatagacgtgcgaccttcatctctttccacagaaattcagaaaaaatagatgctgatatatttcctagttgattgaattgttctttttgctatatacatttgtataaatgtgtgactttgtttaaatgatggatgtgcatggatgaagagtgaggaaaatgctagcagagggccctgaaacgactatgtgcagagcaaaccttgtgaaggtgttggaagagcttcaagcccaagctgaggtagccttatgttttgttggagtaaaacattgatttgatcccattacattacattacaaatgtgttctacttttattattatttttacatgtgatccagtaatttagacaattacataatgtatgaaatatttatttatataatatagtcaaattgttttttgggattatggcttggtttctcattaaatatatacatgcaatattatttagaggctctattatttatgttactgtacatatttaaaaaaaattgctaaaaaatattactggtgcttagcactttttttttttggtgttgtactgtaattaagtatcagacactacaaaaaggttgctaaaagacatcactatggttttgtgtttaatctcattatgaatgaaggagaaactacaataaaactttctaataaatgaaaaagtttttggaatgctttctataaacctatgaatgtgtaatatggattaaacgaatttcacttaacctccaatgcaaaatttaaatttgtagaatttaatgagaaaaaaagagtatttttttttttttttatggcaatgcatatttaggttatggatttttaattttctttatatttttatggacattctaaatgtcatatttttgtaaaataattttcaaataccatagtttaaattttttcttaattttattgttagcattaaaaaataaaaaatcatcaaaccttgtcttcttccacaagccatcttgagtctcgatccctcgaataattttttttaatctagacccctcgaagcttcgaccaaatccctcccattgtcaacctattaaagctcatcaagaagtatgagatgccctcgtcaagcttgttcgtttctacggttgcagtggtaggttcaaataagcctgttaaagaaattgaatccaatcatgagctggcataggagtagtggctgcactggatgagggaatcccaaggctatgcaatcattgtttaatcattacattttctcaacttttcgttgggccttatattctgtatatttgctttaacacgtgtaatgtctttattggcttatgttttcccttgcaatgtcctactctgctgtataatgaaatgctactcactcactcatttcttgagctaagttttccattcaaaatgctattctcttaaatcttctcttgatatcagagtgacttcttggcctccgccaatgtcaacatgtcaaagccaaactacactaggaaacgtcggtggtggaaactcttaaggaaactccatgactcagactagttctgccatggctggtgctccattaacactgtcaactccctttagtaataccttgagccaaccatttaccgtcaagcttggcaggaacaactttcccttgtggaaaacaatagtttataccataatcagagatcacaggttagagggatatctcaatggtcaaaaaccatgtccaaacgaagtcatctcagtcgagagaatagctaagaatgaggttgttgtcactgaacttcagccaaacccaaagtttgaggcatggattgtgcatgaccagctcctaatgggctggctttacgaatccatgtctgaaagcattgcatcaaaagtaatgggttgcgaattggcatctgctctttggacagctctgaaggagctttatggagctcactcaaaggctaacatggattatttgtgcaccaaacttcaaactacaagaaaaggagcccaaccaatgactgactacttaaagatgaaacgaatgtgggctgattcactagcccttgctggtgatccctgtccagaaaagcatctcatatcaaatgtgctgtctggaattgatatggagtgcctctccattgtgcttctccttgagcatcgaacagatctaacctggcaagagttgcagggatctcttctcagctttgacagtaaacttgaacgactgggagctgtctctcgaactagcaagacactgggcaatccctatgcaagtttggcttaacgacccaaccatcctaacaacagaggaaaccaatcttgaagaggaaataaatacaacaataatcaaggtcgtggaagtcaatatcaaggcaacacatctagaggcaacaacaataacaacaacaacaacaacagcaatcgtggaagagggagatataatagggaaaactcgagaccatcttgtcaactctgtggaaagtttggtcactcaccagttgtgtgctactataggtataatgataattacatgggccaaccaccacaaggtgacaatcagcaaacacaggataaaaattcccagatgacagcactggttgctactcctcagatcctgaacgatgatgcttagtatgctgacagtggagctacaaatcatctcactccaaaatttgggaaaatgaccaacaaaacagagtatcatggtaaggattaaatgataataggtgatccaacaagcttgaaattgctcatgttggtactggttcattaaataccacaaattctacttctcttgttctaaatgatttacttcattttccctctattacatagaacgtgattagtgttttaaaactaactagtgacaacaatgtatctattgagtttttccttgatctttgttctgtgaaggacctaacaacagggaaggaggtgttgcaaggaacacataaagatggtctctaccaacttggttccacttcaaccaattcttgtacttccacgacctctgaaatttatttgtctagtgcctccacttggtctagtgtgtctagttttaactccctaaaagatacatggcatagatgcctagatcatccatctagttatgtattgaatcaagtgttaaaattgtctcatgtaccttttaatgctaatgaaacaacaattttgatgcttgccaatttggcaaagcttagtgacagtctctgcctttccctacatcaacaagtcatgcttctcaagttttagaactaatacacgcggacttgtgggggcctgccccaattgcctcacacactaactacaaatactatattcattttctagatgactatagtagatatacatggctatttccactcaaataaaaatctgatgcattatcgacttttgttcactttaaaagactagctgaaaattaatttgaaaagaaaattaaacaattaagaactgactgggtggtgaatttcaagctttcttagatttagtcagtgaacatgatatctactttcatcacagctgtccacacacctcagaacaaaatggtagggtcgaacgtaaacacagacacgtagtagaaactagattggctctccttgctcaagccaaaatgccccttaaatattggttagatgcattttaaactgcagtgtatctaatcaatagactccctactactgtccttaaggaaaagtcacccttttaaacactattctctaaagtccctgattacaagtttctaaaagtttttggtgtttcttacttcccctgtatctgaccttatcaaagtcacaagtttgagtttcactctgttaaatgtgttaatttgggttatagtgtggttcattaaggctataaatgccttagtccacacggtcgaatctatatcacaaggcatatgatttttaatgaaaatgaattccccttctcctttggttttctcaacactagacaacctgaacaatttatcactatgaccactccacagtcctggttcacattgcctgttgttcctctgtcctttcaatcccatcctcctattccatcttcaagtgttcatgtagcatcaccaaccccaacctcactaacttcctctgtaagtgactccttttccattgttggctcccctatttctttccctgctgctgatcctgcagaagctactattgcttctccttcatttcttcctgagtcccttgagagtcctgctagtagctcagtccctgctccacttcaggtcactcatcccatgacaccaggggcaaggttggcatcaaagacctggccttgattttggtgaaacttttagtccagttgttaaagctacaatagtgcgagtagttctcaccttagctgctgcttatgactgggaagtgagacaagttgacatcaacaatgcattcctcagtggagtggttgatgaagatgtttttatgatgtagcccctagctttgaagaccccttaaaaatctcattatgggtgcaaataacacaactctatttatggttgaaaataggctccaagagtctggtatgaacatctaaggacaacacttattcagtggggtttcaaaaactccatggctgactcatctttcttcatacttaaacactcaaaatttgtcatcatgactcttacttatgttgatgatatagttgttacaggaagttgtccaagccaaatcaacactttcatcaccaaaccaacaagactttctctccaaaggatttgggaccattacaatactttctgggcattaaagtttacagggacaacactagactatacttgtccaagagcaaatatataactgagcttcttcaaaaggtcaaaatggaacacacaaaacctagtgttactccaatcacagtaggaaaaactttgtctataacagatggtacatctctcagtgaaccaaccaactacatgagtgtaataggagccttgcaatacctcagccataccaggcctgccatttattttactgtcaataagcctagccaattccataaacaacccattgttgtgcactggggagcaactaagagtattagatatctcaagggtacaatgcatcatggattacacatacatccaagcactaatacgacattgattggcttctctgatgttgattgggcatgttgcccagatgacaggaagtctgttgtagggtactatgtgttcttaggagatgctttgatctcctggtcatcaaagaaacagacagtcgtggctaggagcaacacagagtctgatatagagctctttctcaactacctgcagaaatttcatggcttcaagagctattgaatgaactcaaattcaaatgctcatcgacacctgtcatctggtgtgacaatttgagtgcaagtgcactggctacaaaccctgtctatcatgctcgaacgaaacacattgaactcaatgttcactttgtgagaaacaaagtcttggagaagaaactggagattttgttccttatttcttgtagaaacatatacaacatatctagtatacctttaatcaaataattatactcagtctaggttatcatattaaaacatatacaaataaattcaataaatttaaaacacatcaaattactaaattaattgggagaattttcaataacaaaaactaaatatgatttatttttaacattctctagatgctactctcttataattattatagattatatatatatatattattttctttataataatatatgtataatttaagaattatatatatacatagttctaattagccactaaagtaaaaatatgttacatgtatatatatgtctaccatatatgtataattaaaaaaatattattcgttatgtcaatattgtcatataatttagtttcttaattgtttttttttttttgctttgaatttttttgtagatcaacgactcgtttaagtttagcaagaaagtaaagaataattattatagtgtagaatttaattataatcttagatattattttagcagtgtgtgttattgtgagtacttatgcatggataaattctaaaagacgtctcaatcgaccattatctataatgagagtctacaaatagttagaaaacttacataatttagtgtatgcaagtgatgtcaattgtgtttcacaattaagaatggatagacaaatattttacaggttatgtcacatactcagtactaggagaaaattaagaaagacacaaaatgtctttattgaggagatggtagcaatgttcttatatgttttagcgcaccaccataagatttgaattgttggttttagttttaaaaaataaggaaaaactataagcaaatactttcatgagtttaaaagcaatgattcgcagccagaaatttttttggagaacacctgagcaaatattagcgacctcaattgatccaaggtggaagtggtttaaggtatgagttgaggatttacaattgttgtaaagaccgcttagttnnntttagaaattagcagttaatcatgttnnattatggaaaattatttatagctatt

SEQ ID NO: 14173 - DNA, 2587 bp, Cannabis sativa
cccaatccccagccatttctagccataataaggctagttagtttctcctagcatcaatgcacctgacgtaactccaagggtaccccatgtggtgctagtggttacacctcgtcccatccacttgttggcacaatggtgacacttggttcgaaccgtaacgactaggttagtgaccagtgtcttaaggcaagtgggttgcgtggggaaagtgtattgtggtgttgttgaggctactaatggaccacacctgaatagatggattagtagccataggatcacatggctctgatacagatcttatattttgaaccattatttttcagtgatgaaaagatgattttgatgataacagaaatagattgaagaaattttctctcaatgaaagtaccaaaatattgatttagaaaatgtcaaagacacatcaaataaatgacaatgtttaatttagaattctaaagttaaaaaaaacttatgaacaaaaaataccaaaaattatagaggtttagtcttagatgtttggcaataactaatccccttttcgttatatttcacttacgaacacttgagatcaaatggaacttaagctaattgagtctccaaatattcaatgtcaattacaaatatatttcaataaagaattttttctgaagactaaattcgaatcccatttacaatgtaatgagctcatatttttaagtaaatgagtataattattattaattgtaaatgtacatattgattatttaatatttcctctcaaaaatctcaagtttttagggaagaaataaagacttagtctttagggatttattcaggtctcacggatctaaaatggattgcctcctcttcacggcatggctgagcattttcttttctttgtagcttcattgtactcttagatgcagagctagtatcttcttttgtatgtttaattatttactcacttgggttgagcagagaattgatttgctatttatttcaccaattgattccttctttcaccttacaccgctcaaggtatatcttgtgttgtaatctttatgaattttgagataatatacctacaacagattatttgaacttttttttaacgtattaaatttatttaaatttttcaaaaatttacaatttgtgttaaacaactacgttgttgtataatgtaatataaaatatatatatatatattaaaactatgtggatatagaaatgaggacaccatataattttccttattatctaccgtaaaagttaaatatatatatataatctgaaagacttaaatatattatctgtacaaaaattgtggaaaaaaaaaaaaaaactcccaagcataattaataaattttagagatatttgcagcataaatactttatgttttcgattttatacacttaaataccatatcttttttttttcgacggattaaataccaaaagttattctttttttacttccgttactactagtatgttaagcggtgactgggcatagtagtattaacaaatgttatattaatatttatttaataaatagaaaaacaaaaattatatttttttcaaaaaaaaaggatagattttaaataaataaataagtaataaagaaaaaaaaaaaagattgggttgagcttcttccacactcgttcttcctccattcccacagtcttcttcttcttctagtaaaccagccctaatcacctagagcccagatccctaaaatagcccaaagccccaatcactgcctttcttaatcaccattgtcttcttctttcttcttaatcgcaactatcttctctttccttcctaatcgccactgtcttctccttcatcctcttcccctagaaaaccagctccaatcatctagattcgaggccctaaaaccacccaaagccccaaatcaccgtcttcccttccccttagtttctgcttctcctcttgttagccaacgttaatggatttgtctgaatgtttgtcgtcgtccccaacgtcatggaatctccttcctctatacctgactcagagaaggatgatatcaaagccttaactaatatgtttttttcttttcaattcttctcggaaaaacgtatctgatttttttgcaacctgtaaatagtgtttattcattcatatgtatatgatttgatttttaatatattattattagttgattataactttactctacattttttgttattttgaaaaatcttgaatattggttagagaattgtattttgataaccagtgaaagaattatttatgtcgagatattagtgtttttttttcttttttacttattttcttaaataatattttagttaccttttaaaataaaaatgagatggactaataagagcatgacatgtggcataggaattagtccaattaacatttaacaaattagtagtaactgaagtagaaaaaatgtaacgtttagtatttaatccgtagaaaaaaaaatgtattatttaagtgtatgaaattaaaaatttatgccgcaaatatccttaaattttatttatatattatatttaggtgtcgtttggtaacactttttttttttaattttttaatcacaaaatgaatgtaa

SEQ ID NO: 14174 - DNA, 19699 bp, Cannabis sativa
gtgttctatgttatatacaaatagatcttgggttaattgttaatttatataacatatcatgcactagcctcagctactactgagttagtttagcttcactcactactcacaaaaattaggattcgagtttatcatgtgacaccaatttttgtggtgtgacaattaaggtgctcaagcatttccctcaatctagtcttccattcctgcacaaagtacatagaaatcgatgctcattatgttcaacatctaactgacactgttgacaaaaattttaaagtcaaatatgtaccattagatgaacaacctgttaatcttctaactaagcctatttcatctcctagacttgagtttctttgtcacaagttgcatttagcttactctaactaccacttgagtggggttgctagacacacattggaaactaacatgagtaagttggattaattggaagctaattacttatttgttagttagcttttcttattagttagtttcctattcagagctccaacaaagtcttgttaaagttaatcaaaatctctttgtataaatattcttattttttataaaagcaagtgattcattgtatcaatatctcaactcaagaaaggtgcttaaggctggtaccaaacgattgccttttgttatgctcttagtggggaagctacatattgtctgaaatagttattgaagctatcaagagattaaactcgaggtgggaaattaataataatgtagctcagtgtaggagtcttatgaacactattttgggatgtaactattcaaatgtttctagatcttttaatttaattgctcacaatatgactaagtgaattttaatcaaaatgaatgtaactagtaggattgagacttcctaatttagataatattgcttgtaatggccacaaaacctttccatctatataattacgtttcttttcaaacaaaaaataaaagaactatacttcacgtttaactagtgctaaaaatgctactatgagatataagttaataccaataatcagaaattataccataacatgaggaaaaggcattgaaaatcaagggagcaaagtcatgaaaatgtgaaactaaatctaaagtccaaacgaacaataaggaaccggttgctgcgggtgtggtatcatcgacttatgcttattttaatcaatgggagttagctaacgctcggtctcaaagtgctacctctgttgataacagagtagttgaagagcgttggagtgttcccgaggaagatacgattaagatcaatgttgatgtatccgtcttcactttagcaaatttttttggtatcggatgggttgcaagagattattttggcactttactctttgttattgctattcgaaaactaaggtgggtggaaccagtttgtgccgaggttgtggggttgaaagaagtcttgagttgttttccttagattgttgtggaatccaattgtcaaattcttattaattgtctttatagcaccttgaatatgccttcctcctttggttctattgtggcgaaagtttctttgtcaagatttattttcaacttcttgtgtttttgttaaacgatctgcaaacaaggcggccaattttttggctcgttctgcttgtttctcatcagatcatagttatagtggggggcttgtccctactgatttgcaagctattctgttagctgatttacatgaataaaatttacacactttatttcaaaaaaaaaaatctaaagtccaaacactatttagaagtttgtgagtaagccaaaagtaagagctaaatttaaatacgcactgtattttatggaaagatttttttcggcgatgtgcattcaaaatgccctcatgttcctatgtatgtgcacaagcacacatataaaacatgtgtaatacacctaaaatatgtaccaaaacattatagtagtttaacgaaagatgttatatcaaaaacttcaagttccaataaacgaaaaaagatgatactctttcatgaaaaacttcaagtctcaaccttaaaaattgacaaataaaaaacagtaaaataaaaaggttcccttagcatgagcagaagtagtttaaatagataatctcatcagagctgaagatccaaatcaggtggctgatcagtgtcgttcaagtacagtagttgtggatccgggtcatcgtcaactctttcatggaggatattgctaccttcattgcataatggctttagtatccccaactgacatgaagacaaagcaggagcctgcaaactcataggagtgtagttccactggttcaatgaattgtcatcattatcaaacatcattggaaaactgctgactgtgcctccctccaacgcctgagcataattcccaccatagttttggcccatcattgggtcttgcaaattatcaagcccatctgattggtccaatgtattaagctgatcagtagtatcagaagatgcaggtgaagggtacagaaacttcactcctttagaattactaaacataagagttggggacaggtaattgcttctatcaacaaaatcattaagccttgacttccattcatcagtggagacttgatcaacactatccaatgaagtctgttgaactacttctacttgtttccctttctgcagcttgttattatgattcataatattgttaccttctgccagcatatctacagtcctgaacttggtttttgtgctaaaattaggagtgtatggaccaccatcgtcataaactgggatcacccgaaaatgtgaggctaaccggcatttgttttgactagtattctcttgttgaccagctgcattttctctgagaaaattgccagagtttttttccattttgtcatttaagtcgctcgtcttagctactgatttgcccatcatagggtattttgtatttcctcctccattgactgcaatgctgttatccaatgtgaatggtatttgactagaattctcctgttgactagctacattctccttgagaaaattcccaggacaaattcctcttttctcattgaaggcacttatttctgcaaccatttttcccagcaaacgatgctccgtatctttacctccattagatgcagtatatttatcacagacgaatggcacttgactggtattctcctgttgaccagtcccactttcgcagagaaaatttgccacgttctcagcgaaggcacttgtttctgctacagtttttcctttcaaacaagaactgtcatcattctctccattggctgcatcgttaataaatgggatttgactagtattttcccgttggccaactacatttttccagggaaatttttcaatctttccattgaaaaatacttgaatacttttctctggtcgatcagctacattttcccaagaaaaatttccaactttctcactgaaggcacttgtttctgatactgcttttcctttcaaccaatcactgttatctttgtttctgttcgctgcaatattatcatccagtatgaatggcatttgtatactattctctcgccgatcagctacactttcccaggtaaaatttcccactttctcactgcaggcacttgcttctgctactgtttttcctttcaaccaatcaccgccatctttatttctgttggttgcaatgttattatccagcacaaatggaattcgtatactattctctcgtcgatcagctacactttcccaggaaaaacttcccactttctcactgaaggcacttgtttccgctactgttttgcctttcaaccaaaaaatgtcatctttgtttccgttggctgaaatgttattatccggcatgaatgacatttgtaaactattctctcgtcgatcagctacaccttcctcagaaaaaatgtccactttctccctggaggcacttgcttccactactgtttttcctttcaaccaattaatgccatctttgtttccactggctgcaatgttactatccaacatgaatggcattcgaatactattctcttgttgatcagctacactttcccaggtaaaaattcccactttctcactcaagttacttgcttctgctactgcttttcctttcaaccaatcactgtcatctctgtttctgttggcagcaatgctattatccatcatggaaggcatttgtatactactctctcgtcgatcagctacactatcccaggaaaagttagccactttctcactgaaggcccttgtttccattaccgtttttcctttcaacctatcattgtcatctttataggttgcattgttattatccagcatggacagtatttgtatattctctcgtcgatcagctacactttcccaggaaaaatttctctttttctcactgaaggcacttgcttccactactgcttttcctttcaaccaagttctgtcatctttgttttggttggctacattgttctcatatggcatgaatggcttttgtatattattctctcgtcgatcagctacactttcccaagaaaaatttcccattttctcactgaaggcacttgcttctgctactgttttctctttaaaccaatcactgtcatctttgtttccattggctgaaatgttattatccagcatgaatggcattagtatactgtcctctagccgatcagctacacttgcaaaggagaaattccccactttttcactgaaggcacttgcttccactacttctggtcgatcagctatactttcccagggaaaatttccctttttttcattgaaggcacttgtatcacccgctgttttttcttcaaaggaatactgataatctcttcctccactggatgcaatgctattaagcaacatgaatggcatatgaatactattctctttttgaccagctacattttcctgcagaaaattcccagaaatatttcttatcctctcattacggtcacttgtttcacttaccattacgtccttcataacatgctggatatctctccctctgctggctgtaatgttattatcaattaagaatgacattgtgccttttgtttccagttgaccagctacatttcccttctgaaaatctttaggaaaatttcctgctttctcattgaagtcacttgtttcagctaccctctttcccttcaaaggatgctgattttcgctccctcttttggttgcattttcagtatccaataaaaatgacattatactagtattctcttgttgaccagaaacatcttgcacgacaaaactcccaggcaaagtttccactttctcattgaagttggttgtttcagctaccattttgtctttcaacaggtacttggtatgtatttctttgtcggaagcaacgtcatcatccaacatgaatggctcttgaatattattctccagctgactagttacatattcctggaaataaatctcgggaaaaccatcccttttatcattcaagtcacttttttcttctaccacttttcccatctgtcctcctctgttggatgtgctattatcaaatatgaatgacgttttaccggtattgttttgttgaccaactaccttttcccggagaaaagtttttgggaagtttcccattatcccattaaagtcacttgttttagctatcactgagccattcaaatgagccttaaaagctcttcctccattttcagcattcttattattggagataaatgatttttttccaaacacatctcgatcattgggactcttttccttcgggggaggcataagtagactatctatctttaatcttccattatcagctggctcatggactttattgtcaccataagagctgtcaacaatttcttggtctacaggagaagcctgaaggttgagattgaatgtgctgttttttccacgagaaggaacattatttgagataacaggtaaggtagagactgcggaggcaatattaggactttgagaaggaattctcagtgggagagatggtgttggtgatgggagcagaatcctttgagtggtctgttgtcgatttgagattggagcttggtaatttggcacacattgcatcagctttctggcggcaaccttctgagctgttggtcccaagtttttgacaaacattaaaagcctttctttgtatccaaatttcttatttttaccaatctacaaacataaaaatagagatataagaaggcatgttgttatatagcagcatgatatgacaattaatgccatgcaacaaaaaagaaaaagaaagttttgactgcaaattaaaattataatattagcaatagaagcagttgagacaaggagtgaatgaggtcaagtatggaaccatgatatggaaatgaaaatgagagagcatattagtacgaaaggtatgttacaaatactataagtccgtttggtttagccaagtacgtacatgaatcagtggtttgtaagcatcatagacagatgagactcctaaatcagagtctctgcaaaatgggatcaaaggtctttctctttcagaaaaggtgccatagttccggcaatctcttagtcctgttcagggaagatataagagaaactaaattattctttcttttcaatccacacatgctgtatagatacacaaagatgaaggaacctctattatgtgttccttctatggagaggtgataggcattaaagggatatgggaattaccaagagatgaaggaccaattttgaagccaccaagcctaggaacttttgcacgtcggcctctgatttcacttattaagggtctttttccagggcctcctgatcttgttgcacagattaatcgtgactcgagtttctgtggatcagttctcagacattgaaatattacttgggctacatcttgtacaccacgggcctgaaaaactcaatatctatacatccttagtactgaaagatacataagacctcgttttacaagtttaatactggtgaaacacaaggctgaatataaaatagcctacctccttgtagtatattgtagttgaagaattaaaatgcattgcattgctggtgatcagaagcacatcatgctgttgattgacagaaatcgctaatcagttaatactaagaactttataaattcactgaggcctcgaagtattcatcaatacggtggtactataattgcagcgagagaaacatgaacgaatattattgtaaaacttcataccaagagagacgttacaaacaagatgaaaaatgtgataggactatgaataattcttagttttaagagcataacctcaaatttttccaagcttgtgtaatgcccttcctgaagtttagtcctcatggtactaaaatccatcggttctttgataatggtgtagtagttgtccacctttaatggcaagaagcaagttgtaattgagaaaataattaaaaactcaatggcctaaacatttacaaaccaagtagctagaaattgaagtgataggactgacctcattggggtcaacaggctgagcaaatattttatgtgtatccctcctacagtaagattatcatatgattaggaacttttcaataagtaatttgagcagtatatgtgcttacgtttgactcattttctgttctattaataatgaggaaagtttaccataacaaaatattcacctttgcagtatatcaaggataagctcaagtatgcgtttttctggtatccattgcacggatggcaatccattcgcttgttgatctaggtattataaacaacattacattggtaaatttataataggtaaggtgttaaaaactgtagtcaataatccataggtctacagaataacaaaattaccatgtctggttaaagaatctccatgtatgttttcttcaccctacataaaaagtaaaatgatgaagcagaagatattaaatccacaattttagggaaagtcataaatgtattcagtcaacttatgttgttcctctcccttaacctcttccttataagaggcaaatataacaattctccaattggctctcagtatacaaggaaaaaggaaatgcaacatcagggcctttttttatggaaaagaatagtaggactgttttgactaaaatcatgctgcattgaactattcaatcaaaattcacagcaaaaattacaattttgccaagcagtaagctttcaaaaacacacacattaagtaagcattaaatgaacctgttgaagcagacttttggcaaaggaaggcaagacaaggtcttcaagtcgtttctgcttgcggccacgcttgagtggaggaggggcaggcattgctctgcttgagggtgcaagatcatgatgttgctcattcttaggggaaccattcccagtatagcctgctttgctgagattgttactgatggctacacttaagctacgtttcaggttttccttcctcttctcttcctctaaagccaatattctggcactttttcttctctgccctacaacttctacttctccttccttagacatttttctgtatttatactaacattttaatactactacataaaaaataattccatgttacatactggattaaaaccagcaattacctgtgccacagtatgttcaaaataggggaaaaaaaaagaagaaacaaaactgaagttgagaaagtaagaaatccagtccttttgacaaaatgaacttctggttgttgacaattgagaaaaagaaaaaacagacaaaagttacttctgttcagtacgcatacaatttttgagctgcaaccccctcaatttcgccttctaatttatcgatcatctagcatgcttttgtttatagcacaatggctaatctatcatggttggaaattcatgctttgtatttttttaaaaaaatgaaaataatggtaatatctgatataagacagaaaataaagtctttcttctaaactcataatataccataaacaacagccaaaatggggcagaatttgggggctgatgtgaatgacagcaccatatgacatgtctcttcatcagtataaaaatgatgttaaaacatgttagtggtttctgcagggttttttgtatttttttataatttcattttccttctcacaaattggtacaaagttacaattatttcatgaagaaaagtaaaggagaaacaagatcagattattattattataattaaactaaataaaacttaatctgctaaggaataaaagagtgcagcttacagattctgcagaaacacgattgaccagccaaacgatagaggaaaaacctgtttggccgattatcttgttggtgaatagtggatcgccatgaacaagagaatgcggaataggaaaaatgactagactttatctactccaaaactgcgaaatggaaatcgctcaccccttcaatggtagacctgtgatgaattggtagaaaaacaaaatcttctctcttctttttaaggggatatcataaacattcaaggcacgctcaagaattcactcaaataagcctttaaatacaaatggtaagcacttatgtcggtggcggagttagcgttacatgcaacatttaatttgacaactgtacaatgttcgatttctccggcgaaaagtaccggtaacttcccatttggtttgacattaaattgatgtgccacgtattacaaaacgccaacgcatctgatactgtcattatcaatactacaaaattacttaggtaggctcaaattattttcgtaaccacatttaagaaaaaaaaaaggaaaaaaataaatcacaggatcagaaaatcctactcaagatatgcaattatttgaaatatgcttttgagttatggatgcattcaaagccaaaatcatcactcatttacattgttggtaaaggtatacatagttttttccttctaaaccaatctatcaattcaactggtatcggattgggaaccctatgctaagtttaacaggcttaaaacaagtgtttttttcacctagagtgcaacttctgtatctatcaacttaaatataaccactgagacgaaaaaggtagcaaaattcatctgttataaattccattttcattcttgttctgaatagagatagtacttggagagaagtagccatcatgccctcaatttgactgcagaatcaagcacatccaccgtgttattttgttgtccccagagctgtgcatatcttccggccttagataacagaacgtcatgcggtccttgttcaaccacctttccattctcaataactactatctgcattatcagcaaggagatacggagaatgagcaatgctggatatcggacatcatatatatataatcccaaacatcattagttataatttataatgcattaagcataaataaaaagagcaagtttgagaaacttcattgagccagtgaacttcagaccataagtgacactttttgggagggaaaaaaatagaacctcatcacactgcattgcagtggtcagtctgtgagctatgaagatcgatgttcgattagttgctaaggacttcaatgcagttaatatttctgcctctgttgtgctatccagtgcacttgtagcttcatcacacagcctaaagataccaaataaaaggaaaaatcatatacagcatgctatgaattagttgaaatgctcttttcattttctcctgaaaaagactataatttacaagagaaaaaatttaaattgcattctctatgagaattgtgtacatgtgttgcaaatttttagcctaacatgtgagacaataatgtatcggatcaacaactaaaagaaagatcgattctttggaaagtatgtatgtgaatttatatataaaagcagaattagttgaagatggagataaaaatattacagaattggaggtgctttcaaaaatgcacgagctaaggccacacgttgcttctctccaccacttaactgtacagaaaaacacaaaattgtcaaaattttgatactattgtttgtccactccatcgagaaagttttggtcaaaatattttaagggaactttacagatacatttaatatactgatcttgctctggagggtatgcataagtcagctcatcaagaccaaattatttaatgcatctctaataactttcttttgagttttagtttaaaaagttttcaaaacttaatgtcattgtagaaaatttcacctggtacatattaactttcttcccacaccccacccttgccctaaagagtgttgataacactgtaactagtcagtcaaatatacactacacaaaagtctaaccttgagccctcgttcccctacaacagtagaatacttctcaggaaaattcatgatagtatcatgtatagctgcacgtcgagcagcgtcatgcacctgttagaaaatagctatttaggataagactttggtatcatccaattgaattcataacaatgtaaataatgatgggacaaaaagtagaaataaacctcctcatctgatgctgacatacgaccataacgaatattatgaaatattgtatcattgaaaagtacctgagcatgaaacattgttactggttttaactttgtaactagtaagattccacagataaaattcatcatacaaggaaaatcctagagggagagaagtactaattgactataccgtatcttgaggcacaacaccaattgacttccttagactcgctagtgtcacatccctaatgtcttgatcatctatctttatctgtaagaaaagtcacaatataaaacagcaagtttataataaaagtaaaagcacagcaatataagacactgcaaatagaccgctaattaaaattctctagtgataacagtaagcaactgtagaggccagaaagagtccttacacttccagaatgggtgtcaaaaaacctgaagagcaatcttaaaatagttgacttccctgcaagtatccagcttaatacattaattatgatgcaaacacttgataacataatgtaagagtggatagcctgtaaaggcaaagattcctcagcactagccttaccactcccactagttccaacaatagccacactctttccagctggtacgctaaaagatatatcatcaagaatctttctctcagttaagtagctgttttgagagcgagaggggaaatgagggtacatcatcagcattatgtcaaatagcaaacaaagccacaacatgtaaacatgtacataactctccaaaacataaaattaaataaatatataaataaggaaaaaattaaactgcatttgtatttccactcaactataactcttaatttccactacatttgtctataaatgatggaataaatacagtttttttccctatacttaaatgtctcacaaatgtgcacaatttgaatgttgttcatgttttttccctgaataaaaaaaattaaaaaaagttgacagaaaaaagaagtacgaaaaacctctatagatcccttctctgtatcaattttctcatacttaaccggccatcattagatcccaaaaaagtttttagacaaattagaaccacaagatcatctatagttgttctgtaaactacgctacgtaatgccaaagtacaaaatgactaacccaactaatgctgtttaaaattgcattgaccacccaatagtagtactaagaagcactaagatgtttgatgctcatttaataataactttttatattttaggtttgttatcataaaattgataaagaattgcatttaacacctgaaatgaacattcccaaattgaatgcttccgccactcaatttcagaggtttagcatcttctttatctctgatgtctgcccgctcctgaaaataaagttggaaagaacaaactataagtcagaagaaaagactgcacgtcttatctgaaaacacttaataagcagcaacatatatttcatttatcttaataaaatatccatctccaagctttactttccattataaattagcagattaaaggggtacatgtcatgaagtgttaatctcaaatacaatttaactgcaataattagacattgatggcaagtcaaataaattgacaaagacatactaatataattctggtgggcaagcagagaaactaaaattgaagaatatttcccgaaattacctctagtaactgaaacatagatttcatgtcaacaaggctttgtatagtctcacgataaacactaccaaggaaattgagtggaagtgacaactggaagagaagtccattcaccatgacctatgtttgaattatcatccataattttatgtgagtgttaccatcataaatcaaaactggaaatcaggttttacattaaaaaaaatgatattaaaaaaaaagccatcataaagacaacttaccaaatcaccaactgtcatgctaccattcataatgccatttgagcacaacaccatagctgttgacagagccgtgctaaatattatattttggccgaagtttaaaaaggcaagactgcgttgcgttttcaaagcagcatcttcatactctgtataaagaaagaaagaaagtcaatccccttcaaaaaaaacaaagtcatcaaacaagcagcaaaagcagctcttacaagctaagacaataggtatgctagatcttcccatatctacagaaaaaatacacagttcttacaagactccaaagagtaagtgcaaagacacagcaataggagaagcgccacacaatgaaatgcaggggtaaatatttcagtgccctttaaagattccattcatacgtccacgaagaaaacaaaaacatacaagtgttaaagcacaacactaattgacatgtaataataaatattaagcggtcaagttttaaattctcttttgaattccacttacataaaaattcaatgtcaccttgtactgtacaggaaatatatgcaaacacaccttaacacatgtaaggcacttgttattttgtttcttaatcaattataactataaaacaagtcataaaaggtcatcaacatctagattctacaaccaaaataagtcataccgcaaattcaacatctaatagaaatataattctctcaaatcttgcaatttaataaatctggtttcttcagaattgaatttgaatgagacaagagaacacatgaacttactctttaagtactcatcatatttatcagcttcaaaagcttcattgttaaaatatttgacagtctgcataaaaaaggaagaaaaaaagtgacatcagatgaaaccacgcaaaaaattaaacagcatcaagtaacacatatagaacaaagacaaaagacaataaggtacatcacgacctcacctcataattaataagtgagtctattgcccttgtacttgcatcattatcagccttattcatcgccttcctaaacttagtcctccactgtaaaaataaggacttcatgtgagattaatgataaagtaactccagaagacaattaggctacagttgaacatatagagctgaagcctgaaggagttgaataaaacaatttaaacacgacataagaaaaatctatacatatgaatagcaaaaaagatgcatcagtagattcctaaattaaaatttacttagatgagtgaatgaaagaactggtagatgatatagtacctgtgtcacagataatgtaaacaccacataagcaacaactgagagtgatgtgatccacgcaaaagatgctccaaatttgtaagctagaatacctgaaaccatggatatctgaaagtatacatgttacatctgtcaaacctttcaagtaagaaaaatccaaattcaggctgaacatgttattgttatttttttaaaacaaaaataccaaagttgaagaccttattttattagttgtccaaacccattacgcaaattacgaatctagtctttctatgcatgcaaatagctcaacaggaagaaaagaaaaagaaaggcatacctctaagattgtgggcacaacattgaacaccatggctgagagaataaaatttatagcacggctaccacgatcaattattctattcagtgcacctgtttctcgactgcaaatttagttgccaaaatggagaaaattaaacaaactaagaagtgagtttaatctagcccacgagagcatgctctattatttaattaagtacagagaataaaagaaaactaaaaaagatgtatggtgactacaaaactgtttcattgttcttaaggagttctctgtttaaaattctgggcctcggaggtatgttgttttacagcacaagctacacaaataagcattaaaagaaataagtttggaggcaacaaaataccttagatgataccggaggtcaaggtcatgcaaatgagaaaagacctgcaaagaagataccaatatgtatgtcaaacagaacaatataggatatgagccaggcaaaggacttgcttgaaatatttaatgttttatgttcttggttttctaaagtgtcatggacagtgttagatttttttatcaagatggcaccttaaaccttcattttaaccttaaaaacaaaagagaaaaatgttgtgaagaatcttcaaagttggaaagctgcacaaaaataccttcctagatagcgagcgaattgttcgaagagcgaccttagaaaaaacagcagtgcgaagttctgccacaacaaagttcaaaaatagtttcaagaatcgaacaatacaatcaacacagcacaaaaaatgaaaactgtgtggagatacaataacacttgcaagcatggctagacctagaaataagtgaaagcctcaacaatagtagcagcaagcaagcaattacttcatttgtagtaccgttgaaagctgaagatcctgttcgtgctatcccatatccaattaaaaccgatgcaggggttgcaaaaagagctaatgcagtcgggttagctgcggtaaaggaagcaacagctccagcattaccagttgctgtggttaaccaatctacagcaagcttgaagaggaatggcacctgaacatttataacctgaaattgaaagataacagtgtaagagaggccacaattcgcattagatagaaaacagaacaatggagatttaaccataggaaaagcttgaccatataactgacctttgcgccaaccaaaaaccccaaggcagcaatgaccctccaacggaactcgagattatccttcatccacaaataaccggcaagagttcggaggattgtgatgtcagcaatttgctggtctgcaggtcccttggtcacaactttggtagctttgctctgttcctcagcgggcttcgatggtgccccattctttttatcactattatcactcgaagatgtcgaatataacgaccgcccatctacaaccgagccctgtcattcgaacaattctagttaaaccaaagaagaacagaaaaggagtaacaattctagaagtagcagctgtagagaaaatgactaactggtttcgatctagaattaggaacggaaaatgaagaagacgaatcagagaggaagccattgatacgaggaaagactttactacgcagaggagctgttgtggagccacaactgcgtaaaattgactcgccgttgaaaccaattttgacacttccacgaagcaagcatcgtcttcgccctactcctccacagtcaatactcaaatggtttctacagacgccattaacgctaacagcacctaaagaatcggaaatccgactccgacagacacgattcgacataaccgtgaaacccctgctctgctgaaccagaaactcaccagctctgtaacatctcgatgccgtagcacccaacattttcgattcttggtattcgatccaaaataagaaaaaaaaaaatacaaaattggcaacaattggggaagtagtcactccaacaatttacaatctttgaaaatgaatcaaaacaagtaaggaaaagaagaaaagggaggaaaaccctaatttgagagaagaaagtttacgtctttatttgcatcacactctgttttgggtctttaacggcttctgtgatgaaatcaatcttattgaggttgtcattctgtgactgctaattatttaccagatttaatgcactcaacccaatttatagaccaaatgcatcctcattttcaaattttgtgtaattattaacacgttggttttgttgtatattaatgttgaacaactccttcactcttcacttcagttgactatttttgatttagggatgccaatttgatgagaatcatatcatccccattcattccttgtaggtgaaaaaccaaatcacatattattaactctttttttcacttttaaacaatgtttttttatttttcattaaagaatttactaatatgactattcataattttactaaaaggttatattcttttttaaatctagtttgtagtgagtgagataatttctattaaattacaattttatttttggctgatttagcaaattaataaaatcttaatttacatttaaaaaactcttttttttcaattaaattatttgtataaatttttgtaaatgtcataagaaataaataagaaactccctccctgtcaactaaaaataaattagattttttttctgaaaattttggaaataaaaatgaaacaaagtgatgtagagaatttactcggacaccaattttgagaattttttcttaattttgctatttttgttttatactttaggaagggaactatttgaaaattaacaaatatattaatattaatagtatccaaaatcaccctaacatatttattgttatttgggtaatttaatatcgtgaatcataattcatttttaatagaatttgacaaaaaatgatatggtgtgtggctcaacataggttgatttcaatctgtaactaaaagtgaatgccattcctttcacacgtttgcaacatattaagtgatagattctcaagtgtatatcacatactatatataaggcttcgaatcttctatggtctgaaatcgggtccacattttcttatcttgtttatacaccatacatgcatacacccacaacaccatcttccatcttttgttatttttttcaaaaacaaacttttatccaaaatctcaaacatggcaactacaaccaacatcaagtgcgggacacctctctatgcccatctccaaggaaccccaaaccagaaaaaccgcttaactgcggcggtgacagtagccaggggagtgagatggcaaaagggtactcatgtacaagttaagagaaatggagtggtaagatgtggcataggattaggagatttcattggaggagacttggtgaaacccgatttggggcgttggctttcggacgtggaagaacacaaggctttagctatttactctcctcatgaaggaggctatgaaggaagataccttaatcgtctcatttacaaaggctactactttcttgacctctcagctcgtggccttggtgatccagagaccacacttaccaagattcaccctgtttgcccagtgagttttattgctataaatataaatatgccattatggtcaattgggatttcttattcatctacgtactctcttggtttgtaggctcatttagggaagcaacctatagcaaggtggtattttccaccagaggttgattacagactcgaagcattgcctcctgatgccaaaggattggtggtgtggattattgaagccaaggtaaataaaccgtaaaaggaactgtgtatgatcttaatcaagttaatataaggttacccttttttcattttggcatattattcacaggttttgtcaaaggcagaactgcaatttttagcattgcttccatctctacgaccaaaagttagggtcattgcagaatgtggaaactggttggtggactaaatcacatgatctgtgctattgtttctgaataagtttgtgatcaaaaagtggagtttttgaccaaacactgcaatttctgctttgatatgttgcaggcgtaagttcatgtggaagccactcaaagaaattgcgggactaactgaaagtgaggactgagttggaacaacaacaataagcaagcctacacagcattcttgaatttcaaatacatttcacaattgtatattcatagttctcatcaataatttgaccattaaatttgttagtcctgctttgcataaaaaatgcatacccttgttcctagaactaatttcatacatttttgcaaagactaaattgcatatacaatagctttagataacttgacttcactataatgagattactacataataatggtaaatataccttatattatatattggaggggcttctagatttggttaaagaaacatcataagtactaataagttgtactaagaactgtacagcatccccaaaagtttgatgcataagacaatgtttagtggatataagcaaaggttaagtccaaaattcctaaactagagaagctataattactccaaacctccaccatgtctggaactcagaacagaagatgatatgtgacaaaaaaatcagtcaaacttgaatagctataagtaatacagaatgtcaaaacagagcgcacaaatctgagtgataagttgtattggtaaaatattttgcaacaagttgaagtcgttaatctcttgaagctacacctctaagcaaatcatattatcatactaagcagtgtgaatgtcaattgggccgggccggcccgactctttcttttggcctagcgggtcaagcccgaccc

SEQ ID NO: 14175 - DNA, 2905 bp, Cannabis sativa
gtaatgaaattaaatctatttctttattgataattgaatagaaaatattacattgaaatagagttttatttagggcacaaagcctaacagggcttactccaacactaaaaagtgaggatcaatgcctccactgccttctaagcctagaaatcctcttgaccaagtgatataagcctttgataagttcaaagagaggcattgtgttatttgcccagaagcttccaacttgcgcatctttgaccttccctatacgtcttccctttgcgatgtacgttcatccctctcccctccaactgatggggggagagggatgatgtggtggagcccgattctatgtcttccaatatcccattgggaaatataagggtgagtgatcccatggatcatgatatgccacagggctaccattctcaggggaagatgatcgttctcatggcagagcaaactaggatggtttgggctatgtctccaatgtctcatcgaaggctttcaaccaagagctcttactccagccttcctacgatgtcaactaacctttcccaatgtcttcctctggtcctggcgataatgcctggtctcaatcttagatggcttaatttttgagtgggtacaatcgatatcttggcaaataccctcctcaatactgggcctagcttcgtggatcatccaaagaagatcatcaagaagttgtacttcaatactctatatgagttagtgtctacattgattacattggcatttttcttatgatgtctttttgacttgtacttttacttgctttgcagacctctatcatttaacaatacatccctactttcagctcctctaaccgcaatggactttcatgcctccaaatagctttggaagagttggctagctcaaatatagagtgcaacaaccttcagactcaagtgaactaactccaggtcaaagtagatgaacttcgggctcaactgaagcaggcaacacctcgaattgatgagctttcccgataacttcgattttcccttagctttcatgagaagttcaaaagtgaaaccaaacaagagtgggataacctcaaagccactattaaacagttagagaggcacatcaagactgtgaagaggaagagagatgcatgtgaggttgaaaaagttgagcgcctgatatactccatttaggtaactaatcctcatgtgaaatttagcacccgttccacgacactccaaatgattgagggattcaagaaagaccgtgaggaacaacaagcatcacgccaagctaaacgctttcagggtgctaacactagtaacgactagtaatttcttttcttttagtttaggtccatagctttattaggatgacccctatgctttccctttggatgattataaaactctctttttatcttctgtatatttaacatttgtaattgacgttggccaagtgacccttggggttactccttggccaagtgacttttcccgctatggtaagcaggttttttatttgagggacattgactctttgagtggtctaaacctctttacatttccttatccttttctttggacgtaagggagcttattattctttgagcgtgctgtgacctcttaacttgaattttcactattgcatatgcttgtaaatgtttgtttatgctcgagaggcgtctctctttctagcataatgccaagagtgtctttcaagatctcttttggctaagtaacctttgtaggggaaagtaagtgcatttctattatcaaccaagggtagctagtctgtgttgatttgaatttttttactctctcccccttgtcccccaattgtgtaacgtcgctcatggcgttgtacacttgagttttgcacataatttctttcttgtactctcattattttgaaaggaagagagatattattatgaaaacatgtgataaggaatgattgaacaatctcaatgcaatattcattcattataaggaagaagttgaaggccatttgggtgacctcttgttacattacattgaattgttaaaataaaaacaaaagaaacttaaactagtggagctgcctcgcgggccgcctccttgattcttaacaattcaaacaactaaaggatacttccaactcaccttttcaacaatagtaatttttcaagtgtgttgtgttccatgcccttggtatcactatatcatccatgcgagccaattcgcaggttcctggcaggatgaccttggcaactaataggggcctttccagctggttcccaacactcctgctccccaagtccttagtgtttggtaggactttccttaacaccaagtctctgttgctgaaggcgtgcatgcaaactcttgaattatagtatcgtgccaccctttgttgattactgccaacctcatttgggtcgcatctcttctttcctccaagagatccaaactttctgccattgctttttcatttattacttcattgaaattcttcattcgaaatgagttgagtttcatctcaatggggagtacaacctcacacccatatgccaaggagaaaggagtttcacctatggtggagcgaggcgtggtcttctatgcccagagtatattcgacagctcatctacccatctgcccttaagcttttctagctttttcttaaggtttcttttgattatcttgttcacttcctctacttttccattagcttggggtgtactactgttgagaatcccctctcaatgcctctctcaaagcaataggaacttagcaagtccccttcaaattgggttttgttatcagtgatgattttgtagggcacccaaacctacatattaggaacttattgatgaaggataccacttgcttagcggtgatgttgaccaaggctgtgacagtcagtagtcccatgatctataaggggaaataccgg

SEQ ID NO: 14176 - DNA, 4160 bp, Cannabis sativa
  modified_base (1929)..(1930): a, c, t, g, unknown or other
aaaacaattgaatataacaaatatccaccacttataatatctagtggtcattataacctctcacgagagtcacatacaaaaaaaattaaaataaaaaataatataactttttttttttaaaataaataaataagtggttgtgatatagggatggtatgatgccaagtgttgaaattaaaataagtaatggtaaaataaataaataaatgaaaaatgaataaaaactattaaccttgatttaactactaccggtttgggtggccacaccattaattttcacatactatagctttatttatatttatttacattttggtccatgaacttctcatttattacatttttatgtacctatattatatgtttttgaaataataacccttttgaagtggtgatgtggcaaaatataattggggaaaaagataatttggatatatactaatgaatagcttacatttggtttattttattttttcttacacaccaatcaaattcaatataaacaaaaccctactaattctaataaccacatacaatttgttttttaatttttgtaaaattaagtggaaaattatgttagaagaagtaataattgagtcttaagaataaattattactaatttgaaatttcaagggcaaaatagtcatattatttgaaataggataattaacagataaaatgagaatggtgtagtttttatttttaaaccaatttttttggcattaattgtgaattgtgatttttttaggttcttaaatcttaattgagttttcaaactaattcattgaactaattaaaaataaaaagcaaaaaagagatgaaataatcattaattaggccaactttatctttttcctttttttctttcattcttaaaatacatttattaatatttaaaatatttgattttttaagagaaaattaaaatatttgatttggaagttccaaagaggaactttcttatcatttggattttcagactgtccttatcttcaacaataataatgataataattcaaaaaaataataattataataataattcattttttaaataattatcattattatttttaagaaatgctaaaaggtgtcttagtgtacttaagtattacatcgctattggtacatttaactattatgtctcatataatttaatttaataatttttaagaaatattagtgcaattaagtatctgagtctttgtgcggtacaaacgctaaagagctcattaaatatattttttttatttggtttagtcagtcaagattgtaaaaatttacttgctactttgaaaaatatttctatcttttttgttaaacgatctgctaatttaatagctcataactttgtaaaaactgctattttgttctttgatcgtcgattcagtttatagtgtgtttttatctattttgttatcttgtttgatagcagaagttattagttaataaaattgaatttctattaaaaaaatatatcgaatctcatataacactacctataagtattattagacgtcactggtacccaataataatccccgtatttttataaataattgaactatataaaagaaacacaagcacacacccaccaataaaatacccaaaatacccctgcagtcatgtcctattcctaacattggccccataacattttgaaaaatttcccactcattcaagaacattccaaatttttggtgataccctttttacaatcattacatcaccacttatactaaaattccaataatacccctttctttgtaaaatcatatcaaataagcccttcatgaaattacgcagagagattctgttcatttctctctctaaacacactcatttctctctctctctcatcttctacatgtaagcgtttccatttttcctaattatttaatgcttagtgagagagagagagagagagnnagagagagagagagagagttgcagggtccagatttggtgagacaagagtggttgaaggaggagggagtagagtaggggggggaaccccacgagggagggatctgagaggacaaacaaacccagattttgttttaggccataagagtctataatcatgccatcaggtgcgaagaagagaaaagctgccaagaaaaagaaggagaaggaagccaccatcaccacctcatctcataccaacaatcctcatggaggtattttattattattattatttgttgtttgaatcattgtttttgccctttttggttgttgggtttttgagcttttgggttgatgattggtactttgtttttatatatatacaaatatattattttgtctgtactttgattgaatcaagactcagtttttatccattttctatataggaattttgtctgagaaataatgagacagagtggttgagtatgtaaagggtttttgagcttttgggtgatttaggttgatgattgattggttgtactttgtttatatatatatattattatctttgtgttttttgtttgtatttgtttgaatcaagactcagtttttatccattttgtatcaataattgagttatgctttttaccaaagtttgtttctttgatacttttttgccaatttggtttaatgggcatttgttaaagtttgtcaatttgtactttgtttgggaaaaaaagttgatttttgatcattttggtgttatgggtaatttttgtttttgattggggggatttgaatttgaatccaatttttttgacagggtatgatgattcgaaatcccaagatgagaagggaagtgatggtggtgaggttatgtctcctgtatatgagggccaccattttcatgaagggagtgaggagggtgactcatcaggtgctagatcaattgttgcgaaagataagtctgtggagagagtttctagggagagaagtttgaaatctgggaagaattctgagaacaaagatgtaaggattgagtatgttgagtctggaaaggaatctcgtgacggggatgatagaaactcaagtagtagtagcagcagcaggagcagcagcagtagcagtagctcggatgatgaatctcgagccattgagaagaaacaggacttgaaagcaaatgtttccattttggattcaccagttgaatcctcttcagctgaagagaagaataaggttgatgaattgtcctctaagccagtattggtttctggtgtgatcaaacccggttttgaaaatggtgcagagaaatcgtctactgtggaaaccgttactgatttgtcttcgaaaaaaagtgaggataagagtgcaaaatcatctccaagcaaatcagaatctgtctcgaatacttatgaggttgaagaattgccaccttcaagtggttgcgaggctcaaactagtaatgctaatcaagacattaaaacttctgagactcctgaaccctccgaaaaccaggtattaagcttggcccccatcccctttgaagtttaagtttcacaagtttttttcagttcttataatttactattaaatgccttattctctattgaattttatgcagcctttggttgctccaacgccgcgtcctgtgcaaaaaacctcttggttgagttgctgtggaatttttgatgtgattacaggatccggtcgataaattcaggttggtattgttttcatatatttgtgttttaactttttctacttcatttgaagtgccaatatgccatgtatgatttagctgtggaagttatgtggatttttagctattgttttctcatattcttagtttcacccttttgtattgaagcatcacttttcaatatctgtttcgtttttgtctagtaattatgtctggatgagttgaaaactcccccttgttgtatcatagtgtaggaataggtagaaaagttctatatgggacataatgaatggtttgtttagtggtcgaatatgtaattgttgcaggcgacgatttgagaaggacttgtagaggaaagaaaagggtatgccgtagtttggtagtcttgatagacaaagttagatacccgagcattcctcgaaaagttagaattttcattctagcaattcagtgctcctatgaagcattctcccttcagtgtgcttaatgaagacacgaaattgagaatctgtagcagcggaatgaatgctctttggtagccaacatgac

SEQ ID NO: 14177 - DNA, 4915 bp, Cannabis sativa
aaaagaaaatccttactaaattaatccacaattatccctttccaatttttgttttttttaaaaatccacatttatcacaataaattattaattttgattaaaatttccgcaaataattccacgtggcatgtgataagggcgcgtagctaaaaccatttttacagactcgtgtgggcccactctctcagtttctttagataaataccgacccttcgtttccctttccaaacccaaaaatctctcactgtcgttcctcactaacacacaccccctgcgcacgttagcatcttccccatacccatttcagtagaaagagagagaaaccaaaagagagagagagagaaagagaagaaaacgataatggcgtcggcaacgagagtagatctggatgggaatccgataaagccattgacaatatgcatgatcggagctggtggcttcattggttctcatctctgcgagaagctcattcacgaaactcctcacaagatcttggctcttgatgtttacaacgacaagatcaggcatctccttgagcctgagacttctgaatatgctgatcgtatccagttccaccgacttaacatcaagcacgattctcgtcttgaaggcctcattaagatggcagatctggtttgtcatatttgtttattgattcttttagcattttaatggcggttcttgatttttgaaatttgattttttttgagtgtagacgataaatcttgctgcgatctgtactccggcggactataacactcgcccgctcgacactatttacagcaattttattgatgctcttcctgtggtacgttgaatatggaaatggataatctttttgtttttgtttttgtagtgaatttgattgattgaagtggatatgtgtgcgatttcttttttgaatttaggtgaagtactgttccgaaaacaataagaggctcattcacttctctacttgtgaagtgtatgggaaaacgattggaagctttcttcccaaagacagtcctcttcgtcaggtatgctatggctttcgtcttccgcttttttttattcttcatgcataattttgattgaagtcagatctgaatttttttggcaattgtattgcgatttgcgattaactagtctattttactatttgaacgtttcgattgtataattgaggcttttggtgatctgctgtgaatgtcggtggcattgaaatgtagtggtcaaaggtttgatatttggtcaattattgatgaaatagtttgattttaaatgtcggtgcattgccgatactgatgcttttactcaatttcacttgggttgaggctatattgctacgtattatggagttcctgattaaattaatttgagatcaatgctataagagtttggaaaaatcctccatttgctggatctacaagcataggcacttgcttttatgttttatctttgagcatttaggaagattgcttgtgtatcttttgtatgtggacattttttcttgttattaatattcagtaggttctctacttgtgttttcattgggaagtgaactcttttattgtttagctttttgtagtatgcttttgtattgtatactcaaagtgacatgtttaaagaaagtacaaagtattaggtacccactgcgttgaacttttttttctattttttttaagtgcgagtaatgcttgatgtaaatgagaaaattcattgtttagcttgctaagaatgttcttttttttttttttatcttacttgtcttaaactgatcttggaatttaactgcatatgtttttataggatcctgagtattatgttctcaaggaagatacatctccctgcatctttggtgctattgacaagcagagatggtcttatgcatgtgcaaagcaacttattgagaggctgatttatggtttgtcaactattcatcttgtgtaatactagcttagttttattatttagtgtttgattatggtatcttttttctttttggtgtttacagctgagggtgcggaaaatggtcttgagttcaccattgtgagacctttcaactggatcggtcccaggatggactttattcccggcattgatggtccaagtgaaggtgttccaagggttcttgcttgcttcagtaatgtatgtgggaaatttcctttgtcattcaatgtatccatttttttcgtgtttatttgtaattaaacagaaccaatacttttgctgcagaatctcctacgtcgggagcctctcaagcttgtggatggtggtgaatcccagagaacttttatctacataaaggatgctattgaggcagttcttttgatgatcgtgagtttattttctagtgaatactttcagatctaacatctgaatttttatgctttttgtttataacaatggtgccaatttatctcaggaaaatcctgctagggccaatggacacattttcaatgtgggcaaccctaacaacgaagttaccgtcaggcagcttgccgagatgatgactgaggtcagatcattgtcttaagtggaatagcattgctttgttctgttctgttatgttctgcaaatttatttgtcaattaagaccaacaagtcttttctttaaacgtgcaggtttactcaaaggtcagcggtgagccaccgatagattctccaaccgttgatgtcacctccaaagaattctacggagtgggatacgacgacagtgataagcgaattccggacatgaccatcatcaatacacaacttggtaaccttattcaacttcatatcccaatctcattattcagatcgtgatttagaatcgaaaagaaccatttctcatgaaacttgtgtttgaaaacagggtggaacccgaagacctccctttgggacttgcttgaatcgactcttacataccaacataggacatatgctgaggcaatcaagaaggcgattgctaaatcaaccagctaaatttcttgggtggtctcgggtggcactcaagagaaggattctttctttcttgcttagaggtttgctgtcgtttatcataatcatcttcatcaccatcgtcatccagtgtttcttaaaattcttttgtttttaagaatgtgaagatatatatatcttaatcatcgaatcgaatatacactacaattttattctttttttttatatatataacttctctatggggtcgttagtcctagttatagtatcaccatcatcatcatcatcatcacattcactagtagaatgaaagagaagaaagatctgaaatatcatatatcttccatatatatatgtgaaatgttttctactagagttttcattttgggctaaacgacaatcaagggggacaaccaacttgttatactaagggggaaaagctgtcgtttctctctctttaatttttcttgtttccttaaggattgtcatatcatattcctttcttttgttaaaagctgtgttgtattatttatttagtttgacctcttgtgggcccattaaattattattattattattatttattaatatatttatatatttcccatatcagattcttagaataaatttattacagctttttacttgggatctggtcataagtttatttattaagtttggtaaagatgatatggatttaatctttaaaatgtgattcaaacaaaatttactatttctttatgctgtgccatgttcacctcccaagtatattttaattagttgttgtagttaaataatttttttactaatagttatcaatttttgtaaaggttaaattgaagaaagttatgcaaatttagattttctttctaatttatttacataacaatataacataatcggataataattggggaaaatgttgccattaagcatcaacattgcttagtaccaccactatatgtggggtatatgaatggttagtaatattttatagagtaatttttagagtaaattttaatttttgatgataataatatataatttatacttgtaaaatgtcaaaccattatcatgtatcatttttttatcatcagttctagcatttcacgtactaaatagtatgcaggtgtataattttcgatttatatagtcatcttgttggaattggtttggactttgaggtcgttttcattatatttaaaatgtgtaattatgtctttgtcccatagaatttctattgaagtggttgttactttttttgcccaccgatttaatattttcattcacaaatccaatccatatttggtcagaaaaattgagttgataatgtcaactttgaaaattgatcgttgaaaaagaaaaacaggaacaaaaagtaatgtacaagaatatcatagctagtcttgttttcattcttcattgtctcgattaatcttttccaatttcactagtattctttgaaaggataagaatatcaatcctcaacctacacgaaaaaggaacttctttaaatataatgtaaaaattattaatatataatttcattatgcataataaggtttttttaaaaaaataagaacaaaaactgatttaaaatataataaacaaaaataaatttcaacctaaactttaaactaaaccaaatattcatgttaatttaaattctctaaacgctaacatattgtaacagaaataagtttctatagcgttcttgcttcaagtttttattgaacttttacatttaccaaatcatgcctcttatacataattacgttactctggctgcttcttggaatgatgactgatcttacaaaccaacacgagtgttttcaacgtgctttgttctcactcgcacgcttttgggaaaacttttcagaaggtcagtcacccatcctgaaattacctaagtcaaatatgcttaactgtggagttattttgtgatgagctactaaaaaataagattcaccttgttgatataggtagtaccaat

SEQ ID NO: 14178 - DNA, 7797 bp, Cannabis sativa
ttttttttttttttttcagaaagcatggaaaaaggcattgttctcatcccctttgcataaccaggtaaccttgcttctctgtctcaagaagctatgatacatcttctcttgagcattaaaagtcaaagcagcctctttcttggccaggtgataggttacatcatgcagatgttcttgagcttgagttctagcttgcaggtagaggtcctttgcttcttgatagttcttcccaatatccccaattctctctctattaaacctcttgatagtgtgcttcaatctcataagcttcaagtgcagagctgccattccctctcttctcatcgatatgtgctaattttcaagaactacttctttaaagtctgggtgatccgcccagaaattatagtatctgaaaggtttgatccctatttccacattggtagccatcgaaacaacacacatataacggtcagaaatggtctcccagctgtagtgagcttttgtcacatgaaagctatctgtccaatcttcattcacaaaggtgtggtcaagattagaatagatcctcttatccccttcttgattattagtccaagtgtaacccgaacctgtcttaagaagtctatccatgtgactttgagctagccaattggtagcatcccttatatcattcaaagtgacatctttgcctcccttcttatcgtccaagtcgaataaagaattgaaatcccctgttattaaccaaggatttgttgagaccttaaggttaattaacccctcccacaacccttttatttcctcacctgtgttaaaaccatacacaaaagtgacactcatagcttcagaatggccagccattttcacatagcaatgaacaaactgaggatcttctctaacaataataacccgagtaaaattttccctccatataactaatatcctgttctcaacaatcggactaatataacaatcccaattagtgaatctcctaaccatcatctcaataattttattactcttaagtttggtctccaacaacccacaaactcctattttattcgaatagcacaaatcaaacacagtattctgcttctccattttattcaatcccctcacagcagtaacagaaacaacaatatctatgtgttcagtgtagctacctgagaagctaccctaccttcatcccgcagaagattaaatgagttgttgctgctctctgccatctccttcggacttccaggttggcttgttgttgacactggaactgttttctttggaatctcccattcctgttgaggattgcttgctgccttttccttggtttctttcttttgtgtctgctggtgctgatgtttttctatcttcattttcacaatttcatcatgcctgcagttagctttggtgtgaccaaacttattggagttgcgcaaattcattaaaataatgtaagaatcggggtggtgcatccgtgatttccatttcaaccaaaactctagcaaattgcaaccatgtttgatcctttgtgtgttggtccaccataattggctttccaattgtgttaacaagctcagttagactattgaagccctaaattatgtaatctgatccacaatggaacagtccgaaccagattcaaagcatttaaatccgcagaccaaggacgaacaattactagttttcgatcaaattgcacaactcctacctccacaacctgatcacgagttgcttcatcattgaaccgcaccattattagtcccatagacaattcgctaacctgaactacaccaaaatgaccccagacccttttaacaaatccttcgaaaatagacacaggtggattggctcctagtaccttgcaaatgactgctgagttccagcatttttcctcttcttgtacctcctctaggtctacctgagcaatcttgatgccttctctaatcaatggatctgtgaagagaagtcgttgatcttgtttcataattttttccttcgtgaaagtctcccaaatttgctttgccgacctcggagattgttgattatctaagttcatcttttgttcgttttctacctcctgagcccaactctgagctcggctattacctgacctgtttgtaacctctgtctcgattaaatcctgaattctaaccatcttcacaatcagattcagccccttagttgaatgagattcatcaacttcttctgtttctccttttattcctgcaagaacatcttcgactggtaatcgagtgactagtttccgtcctacttttttcttccttgactagtttccgtcccacttttttcttcctcgccatggaaggataaagcaaggaaaacgaaaactatccttgctaattgtttaattgtttaaaatttcgttaatttgattctggacatttaattgtaattttttcacactaaccaatttattttttaaaaatattatttttttttattcaaaaaaaaaaagaaggcctaattattatttgtcaaaatatgatataataaatttttacaactatacattatttatttatttatttttttaaaaaacagcccaataatttttattttgtccaaagcgccaaagtggcttgggacgatcctgactgttggttgcccctttatagtattacagtttagctaggagtccttacatggaacgtaataagaaaaagcaaaaaggtattagtttaggttaagttaggtctattttaagtagtttcaattattaggatggtgatgaagttaacaatcaaatgttaacgtacgtaatccataggcttaggagtcaactctagaattttctttttgggtcctactttggacccctctctctgaaagactcaaactaattcgaggtgacatgcatatgatccctattaattataatcaattgatgcatgttctatgtcgtcgggtacaagtagtagtataattttcttattagcaattactaccatgtatatatgtatccaaaatattccaatcaaaggaatgtaatatatccacgtacacatatattatatatataaaatcttaagcacatgtgctcataatcttgaagagttttgatgtttgtctccaggactgaggacgatcaataacacaatagcttatgtttaggacaacctttcaattaaattgtcctcaaattaaaatacctcaaacatttaaatgtacctatttgacatatagagtaaatataaatataagtacttaaaattttaaatttgtaaatagtataaatctaataattatttataattttttttttgatttcattatatacaaattttattattgtcttattaaacatgacacatataaattccagaatctaaattattgagtttagataaaatcatgtaatatcttaaactgaaaaattatgactacaacttttataatgcatttacctttaaattttcttttaacaattaaaaacagagtagaaattgatttttttttttataattttataaacattaaatatttatgtcgctaaaaataaagattatatttatattgcttgcaaatttaaattttaattaattatactatttttttctaattatatagtatatatatatatatatgtataatttgatttttacatcgttctatgggtgtaaatttattttgtgtataaatgtaatatatacaaatatatatgtacatttatgacccaaacacactggcacacgacgcggtgcatgattggtctgagtcgtgggaaaaacaattacttatttgactaggagaggagtgtgttgtactaattccaattatacattaaaacaaaaaaaaaaaaagaaattccaattatacaaaatgtatgtgccccacacttggtattggaaaagattgtaaactataaaatgttttttaacaagtactgcacacacatacacgtacaaaacaacttattcatatcaaagaataagaaaaaaggtgttacagcattatgatgctaaacttgtgatgctcaaaagggccgtatacactcccgactctatcaaaagttggaaattttgtgaaatcttcgcaaaagatcatgacccattattattttttagattttatatatatgatcagccaaaaacaactgatttatatatatgacatttatgtgaaaagggtttacgatggtggcctggcctccaccacgagcttatacaggtatatggcgtacacatttttctttccatgattctctattttcaggacttgatcatatcgcactaataatgtaattgatatacatatattatctctatttcctttttatgcgaaagtactattaataatatattcccatgcaatatttattattaataatattaatgcatatcacgtagcatgattaattactaaaatgtacactgtagttataaatactatctaacatgtatacatgtaaattatagacacacaaacgaatatatatactggagcatttttaattaattgtaatcatgacaaagtaaacaaaatttaatgtgcgcgtgcgcactcgcactattttgttttgaaaaaaaaaaaacaaacaaaaaaaattcatagtaatttattaaatattatgtatagctaaaatatatatatagtgatgacacattatatatatatatatgtctataactgctgatagaaaaggttgctgtgttatttgatgcacaattttgttatcactaattagtaattacttcaaaatatagaaaatatgataattattgaactatatgacccaaatattaatactgataaaagataatagaaaatatgattaaatatatactcatgataatgtacatgtatcaatatatagtatcaaattgattaaattaaataagataaacaaatagaatcgattatattctaaatgcggagtatcatgatttttaatttaaccaattagtgattagagagttgcgtgatgcaccatatggtacgtgtattgttgcgctgtcgtgcattaatcttatatatgataatcattgtgaccattatcatcactaaatagtccttgattaattaccttaaagaggttaaaacaagtgttttcaatattatatttaaaatattatatgaaatgaaaattgtaataatcttatcaaatgtacgctcatacaaaccaaaactatatacttatatatatatatatatattaatatatttacaaccattgctactactacttaaaagttaaaaggcctaataacccagtatattcacatgttcatatatgttaatggatatatataagggcaaatcaatcatgtggtaaccaacatatatagcctatctatagatattaataattatatcacgttaattaagtgcccaattcaatgaaggacaaggaagagaaaataaagcatattatattgaggggtccatcattattttgagtagtaacattagggtcatggggacaaaagttggaccaccagggtgattattattgattagtctgaaatcatgaaggagaagagccaaatggactttgcaaataaaaaggacacctagggtggcacctaattaaggaaatcttttaagatcttgtgtcacccatatttgaaagtaacaagagaaaactcccaaccagagaagagactaagtatgctttgaaaaatatggttgtgttaacgtacctatatatgtattctcaaaaaatgaaataaaggtcaatgtcttacctatcttaaaataagcctatagtatgaaacttgtacatcaatgagaaaatttatatagtaaaaagttatatatatatttcatttgatttgagtattattattaattaaattcatacctctctagggtctacaaaaagaggttttgatggaggagtttttgtgaacccctcctcttcatggtccttgatcttcaaggcttttatacaccacaaatcttcgggacaagataataatttccaatgtgggatgtgatgtctcagctcgaactcgtgaccaccaacttcggtcactattgccttacaatctttggaagctatagccatgttatgcacgaattggcataaactcctgaccagctttccggacaatggaccttcggagtgaactccatacatgaaataaaacccaaaagggttaaagaagtttggtatgcaaggaggtactaacttaattataaacttattattaaagcaagaagaagggaataatctactaatcaatctactacttttggtataaattaaacacgataagggagctttccctagccacagcttgaaaagtcccccagtgttccacacactaaccatggcccagctactactactacccaatgactctccttttgggtaggccacccatgtccccaagctcaacttgttactcaatatgtcgtttatgtcctttggaaaaaactcagcggacgacatgaatttccggtacaaacactcagcttcttccactttaaccttggaaatctccacattcgacgagatatgtgaggccctgttctgaacagggttgaccagaattgctggagtcctaaacttgttgtacccaaatttctcaacaaagagcttcaccgaggccttgttctccttctcggttgccatgtagctataatcaacctcgttcgacacgaaccactcctctacctctcgaaccaggctcgacccaatcccttttcgtctgtgatgaggggacacccttaggcctaagatgtaacccaccttggctccgccggctccgctaactcctaatttattcattgtgaccacttttattgagccttgaatcacaccaactaactccttgtccaactccgctacctaaaattaatcattattaatattttatttattgatatagaataaataataataataatagagtaattaattaatttaattaattaattaccagcatcttatacatcggactgttgcggatcctacaaatggggtcacccatagtgtccgtgaagagaaaaattcgctcggttgggcccacttcacatcttcgttcgaggtcttcaactctagctctgtcaacttgcttatcgtagctccgaattatcggccgtggcttattcaatcccattctattaaaaactatatatatataacaaacacactactagagtctagactatataaataaatatatgtgtgtataatattgaacgatttaggtaaattaatcagttgttgtttcttttttgattggtaattttgatgagattcatcgatgatggagtagatcgtagtacacttaataaggaaaggacagtagtaaagacacttatatatatatagagaaacttaactagtacgaagatcgatgaataaatgatcgatgatgatggttataatcatttatatatatacacatggagatttgagagagagagagagaaagagagagataaacttgcttattactatatttatatatgtataaaatggcatggccgcctagggaatgtttgtctatcatatcatgatcatcaacatcaacctaggcttttgaaaagaaattaataatactagacaaaaggtggtttaattataggatgtgttttttgtctctctagctatagccttttcattcttctatctttattagatttttacataataatagttattataataatattatgtcaaaatggaaatatacactaacttagtttcgttaggccaatccacgttaggataacctcaggctcacgccatgatgcacacataagagagtatatatatctgcacgtatatatagttaataataatatagtcagttaataaaagtaattaaataaataacattaataaaagac

SEQ ID NO: 14179 - DNA, 3689 bp, Cannabis sativa
aattttcaaaaataattttttttgtctaacatattatattttgtattttgctcacatactcggatcctagacccgaaaccatacccaaacttgaatccggatggattaatgtcatggtatggtgttaaaatattaatttttttttctaagaaaaatatttaaaaatagtttttaaaaatttgtgccaaacacatttaaatttttaaaatgacaaaaaattattttttattctcacttttaaaaacacaattttaaaaactgaaaactgaaaacacagccaaacaagttccaaaatcctttttagtatttcttctctaaaatatcattatctttcattccaaaaacaaataattttcaaataaaaactctcagccaaaattagagatttgtgagacctaataaaaacgaaatattttagatggagccaaaggtgattttggtcattagactaccaaggtacaactacattttttcatcaaaaaaaaaaaaaaaaaaagtgtacaactacaagttctacaatcccaacttgacaaatatatatatatatatatatatatgtgtcaaaagcacacacaccaccagttgagacatattccaaaattaaaaaaagctacgttgaatgtttacttggatatgagttgacacagacaaaataatggttgattagggttttggatggtaccaattaagaatcttaatttggccagaataagtttttcaaaaagttggttaacctttgccctagtggctgtgttaatatattgacctcgttgaccgacttggaaattcaaaccctcactacctacgtatatgcaccaaccacgaataaatcaatcatattatcatatatattcatttgatttctctacatatttaattatataaaatattttaactaaattagaaatttttttaatctcgttataaagtccactacaaaaattcaagatttttttttattattaacaagaaaaagtcattaataattatctcacttgacactagatacttggaaaacttatgtggtagactctaactttatttgtgtggtataaatttattttaaaaatgtaaatcaattataaaattaatatatattttattgatgatagtgtttattgtaaatttttttaaaaaataaggtatatttttataaatactcaaaatttacaaaaacatagatccacaattttttaatatttttacagatttaatttttcttttcagaaaattaaaaatagttatttttacgttgatttcacaacaacattatactaattaagttgatttcatgtttctttatatttttgtattgtattgtttatacattgtattcatgttgttttcataaaattctataaaaatgtaattgaaaaatataaattcataaaaaggtaaaatttaatctgtaaaaatattttttttaaaaaaaaattatatatatatcattttaggcactttgtgtaaaaaatctctttaaataatttacgatgatggtgttcaaaaattatgttgcacacctatttcttctagaataaataggatttgccacacacactccccccgctatgacattttttaaagttttgccctgtaatttctttttttgtttgttgcagaaaatttcctgcactataaaaatcgtttacattctactcattttttaaaaaaaaatgttgatatagcactaacataatgttactctaacgcaattcaagagtctgacagaaaataaattcataaataatagtctaattttgatgaattatgagaatatgtaaatgcatattctagcttagagataatatttgtatgtttaatgctaataaattagatttcgagtagtttaatgttgttaaatagactaccgtactataattatacatgtgactcatggccacataaacaaattattatgaaaaattaactcaatataactgaaggagaataatggtaacgattttttttaatttaggcgaaatttatgaaacaaaatataaaattaagggacaaaactctacaaaatcatagtttagtaataaaaatcatttttattctttttctatattagtggaaaccccacttctaaacttttattaaactctgattttgacattataaagtatctaaattttctcaaaaatttgttgaggaatctatcataactgcaatgatcataaaaataaactataattgtaattattttaagtgcctaaactatcacataccctcctaatatatttttgggatatttacagtgaaattatttaatttatgtaattattatacatatgaccctaatgtaaaaaaaatatagcagcaaaagtctctttcgtcaattttttgttggatctattggtttcttaccgttaaatgataagtaggatactctgaatttacaccattggtccaagtggaataatgtaatgtacaaattgctgacatatatataggaaatttctttggtgagagcatcacttttgcttcggtcgtatacacatttcttattttcggtatatagagaaattgtaaattaacttttatcatatcgtggttaagcaaataataataataattgttatccgtgtttctgaatgaaggacacgtggcaagaaataaaaaagaacaaaccaatgatcactgactaagtcttcttaatgacagaaggtcacagagagattaggctagcccaggaaaggtctgacccggaaaaggcatagagatttattgcaaagaaaatgaccattcagggcccaaaagctttattgctccgggacccggagaagaccaatttatctataagtgtaggcagatgtcggagagttatgtgaagagtctaagacggatgccaactgtgcaaggagaactaaaagccacatgcgaggcgagagtcgaggctttatgatagttattcttgtctgacatagaatcaaatcttgttccttgtgtcggactatggtagtgtgcgcaccactctctgaatactctactttgttcgacggctcctgtgagcattttgtccaccaagtgcaagcctttccccaacacgtgccttgcacaagaaatggtccccactatacggacaatttgccacacaagaaagaaccatcttgggagcctaatagtcaaatatctaatgtattttactacaataatgggctttttttacagaaatcctagataggtcatgggtatgctcatgtcggtactttagcctataaatactcttttatttccacacaaaggggggataatcgaagctctgtcaaaatctctctaagctttcttcttctttaagagaaactaagagaacaaagttagggtttcctactgtaaacaacattgtaatacattaaataagccttctaaggccaatatactgactcgtggggtaggaattattaacacctgaatcacgtaaaaatctttatctactttatttattatttcttttatttcttgaagcttttttaaatttgtttctggaaatttcgataaacaacaacaacaactaataataataatataaattatagttataatagttactctatctgttttcgaaattttttaaataatttgaagtgttaaaaatataattcaaataattaattgcacgcatacttattttatttaactattttgaatttacttttatgttgtatttattaaggtattataattataat

SEQ ID NO: 14180 - DNA, 3763 bp, Cannabis sativa
ataatttacaatttgatttgttaccgaattcttaaacaaaaatttactagaacttaaataaaacttatatttacgtggctcgccacgtaactttcatctagtatataaaaagattgtagagagctaagaaattatgagacaaggatttttatttggttcaagtattaaagaactctagtccacgagtcaatattagtaagaatttttttgtgtatgagcacaacaatggcaagctattctctatttcaataacgtcttagcttaagaactgaaaaaagatagaaccttatacaatggagttgttgctctatttatagaaaatgttacctgtggaccttatttgtaagatcccattgattaattgagcataatgaacccactaatggggacttagcattagattagcatatggattccaaacattcggtccaattagagtggtaagtaaacaagatgccactttttgtgtgagaaagaagactgttatggtaatgggtgtttgtatcctaacaatattttgctgtaatatattttaccaagatctatatttactaacaagtatgttgattaacaccttaaataagaattctctaaaataatggaattaaacacatataaagtttaagtaaccttacattggtggcagcagaataacatgtctcctcccactcagatctcaaatccttgttcctttctgtcacagagtattaacaagatctgagtccgattctccttcaagtgttggattcttcacagtatgattgagtacttgacttgctatgggtgggcatgtactctttcactatagtcttaaaaattatgaagagggagagagaggatttccaaattagtaaaggaaaggaggctctcaaattttttagttatttgacagaataaaaattaggttattaggttggatgagaatgagagcatcctatttcttttatattatttcacttagggttaggatttaaattatatggattagaaaaaaagagataaaataattgcaaaattaaacactaatggctggtcatgattatctcaacttgtgtggggaccatgtgtaaaattggaaatgattaatatacccttgatcactaaatgtgttgattttgggccctaggggcaaatagtcatttcaccacaaatgagtaaatgatatattaaagtttattctaaagttataaaggataaattttagaataaactttaatatagtcatttgaccaccttagactatggtctacacatcaaactcgttccaaattttagcttggaagtcttatgtgatgtgtattgggcatttgatccatatgataggaggtccaccttgagatattgcatctattttggtggtaacttaatagcctggaagtcctaaaaacatgtcaaaatttctcgatcctccactaaaattaagtttcgaagcctagctaatgttgtctctgaaacatcctggattcaatctctgcttcgggaactctatgtgcatgctcatggtgttccctcgattcggtatgataaccaaagcacaattctcttagctgctaatcatgtgctccatgcaaggactaagcacatcaagatcgatctttactttgttcgtgacaagatcctttagcatcagattcaagtgaatatatgttcttactcatgctcaaattgctgactatctgcccatctcaagctctcaatttgatgatcttaggtccaaagttaatgttgcttccaaagctcccttaagtttgaaggggactgtcaagaaattagttaattaaattagatagttgttaatagttccaactgtttttttgttagttatattcgattgtaattatttttttacttatttactgcgtaacactataaatacacttttttagtgcatattattcaacaaacaagacagtcataactttcatattcatcttcttcacattacattacagctctgaatatgagaattagactctgataattattaatttagagcactttacagatacaaatgttgagaaatatataaaagtatgagagttggcaattacaaaatacaataatataaacataatatttaataatacttaaaatgcaagtagtgatgacagaacgatgatccaatatttcattccctaatttgttttataggatcaaacaaaataattttgtagtgaaaccgcaccaagttcctatgtcaccacgtgaataagataacttacacaactacctcatataaacacttttcatacactacgaactttattcttatatgctatttttattcatttttatataaaaattggccatttcactttctaaatatatacttgaggagtaaaaataaattctaaaaataatgattatgctatttaaactgactattcatacattatgatcttaattaaacaataagtatatataaatgatccgtactcagttaagataatagtatctctttatttatggatcttttatgatcatagtttattagtgatgtggggtaactagttaccactctcaaaataacaaacctaacacacacacaagttataacctacagtaatggtaatggtaacttgttacttaaccaaatttggggaaagaaaaatttaattgtgatggtgacttgttacttaatcttattcgtaaagaaaagaaaaaaaaaagaaaatgatggtgacgataacaaaatttggaagaaacaaatcaatcattggtataaacctgatttagagaagaaaaaaaatgatcatatataatgataactggttgcttagaaagatatgaagaaatgaaaaatcacaaataaaattaactttttactaatgtcaaattacttattttttaaattgatgcatggtaaccgattatcttcatatcactactaaaataaaaatttataatagtaactaactactactgagtcaattttaaaaataagtaattggatactagtaactagttagtgtaaacaaatgaaaaaaaaaaactaaactaaactataggaaaaaaatatataaaaatgtaaaataaataaataacggaaataataaccatattttagtggcattatttttttgcctgtatttgtaaaaactagtttaagtttactatatttttgaaattatttttcatgcttatgtgcaagaatttgagtgccataaaacaaaacaaaaaaaattaaagataatataccaaccaactaaactaaaattgaaagagttaaatactataaacttctatagacaataataacaataaaaaaaaaaaaaaaagattttgtattgactgtttgtaagatttaaatataatttcatttagtaaactttttacaaagtgattggattttagatttagcgtggaaaaattgtgtgggggaacacaatagtgaaaaaattgacaaaaatattttcctaattttttttacatcaattatcttattgaataaaattacaattagtctaaattttataaaatttcatcaaattcaacgctaggcttttcaacaagttctttcttttttcgcaacattccaaataaattaaaatttctatttgattagtttacattatggccaatcaaactttgattaagtattgtgaacttgtgattccgttatataggagtgtatatcagtcactttggttggattatagtgtatttttactaactcaatataaatgtcaagtggtatatatctaattgtaacctgtctaataattttcgttggtttagtcggattaatccgtttaaatcggtt

SEQ ID NO: 14181 - DNA, 6335 bp, Cannabis sativa
aaattcaaatttgtaattttattattcgttattagatcaaaattcgatagtttgatatttttaaaattaatatttatagttaaattcgtttggtaaccatttcattaaaaactattccatatatatatatatataagcccaataattatcctcccaaattagaagagaaaaaggacaatacaagcctatgaattagggatctttttgtggtaggtaagaggagaaggtgtcaaataattcagtgttagattaattgtctaaatcacaaactaatgaactttataaatactattaaattggcctcccataatgtttggtataagatctcatatatataaagaagaaaacattactataccatatacttttgtatgaattaatattttaatttaagttacataatgaaaacacaatgtctttcttcatcaaaatattcctttcttgagcctacaaatactagcccaccttttcaacaaacaaagactaatattcctttgcccttttcctttatttttgttctcttttttataattgtattctcaaaccataatttaaatgattaaatacataataagcattattatgaaaaatatgagataatatatattacataaaagtgccaagaattgtacatgtcatgcctaaaattgagcaaggattacactcatcatacaccagtcccacccaactactcatattcattcatatacatatcatcatagcaaagctaccatcatcatcatcatcatcatcttatctaaaccaaggtcctttcttttactccttcaaaggccaggttcctatttaagtctactatttcttcttaatagtagtacaagtcagactataccccaattttatatttttgactaaaaataaataaaaatttgaaggatgttaaaccaaaattctacttatttattttcctgtggtaccaaacagcaatggaaaaggaaaatttttttacttagttattttccatctaaacaaacaagttcagcagctaattcttccactagtaacccaaagatagcatattcaatctcaattgctgtctctcccacttgttctttgttgttcttggttgtccaaccttgaagatctttgctgtaatcttgctctaccatcatgtcaatggtgttacattgcacttctttccacgattcgaacctcttgcacactcttttcaccacttcttcgctgtagtcactcgtgttttcttctctcctttcctccaacataacatcagaaactaatctcttcatgtgtcttggaattcgttggacttgatgaaggcgtgagttgcctagaacttcgcgaacaaaatcaccaacatctgattcatcatcttcgcattcttcttcttcttcatcatcatcatcttcttcatctaacattcttttctcgagttcaattgggtctaactcagccaatttctcgaatctacgaagcttttgcagtagctgctgctttgttcctgaaaattaaatgacaaaccaacatcaataaaagccaagtctgaatatgtatgtgacaatttataaaagttatccaaccaatgtaaattctaagtaggaaccaaacttatgacaatgacaataactaaccaaacacaacattcctggttttaaagctcagtaataacaataggctgatatacttaatcaatgagcctaagagcagaatatgcctcagaaaaaaaccataagagagaattcacctaatacgaaattgtaaggaccaatgtaataaaagggagcctgtgacaattaagatagaccctccacacacaaaaagagtgggtcatgtttggatttattacagctgcatttttgttcaagtttattgaaaatatacatataattaaaaagaaaaagaaaacacagagacacaatcccattagggacacataaacagtaatcctatcttaatggaacccacaaagacaaaaatggtttaaaagttgatatgaaggaacaaaatgaccataagattatgacaccaaacagtgatttaattagtttctaatgcacattgaattttcaactaccccaagaaaatgatactgaaaactcagatgagcatgggaattggcatgagatattatggaccactcaacaaaacaaaagaagatacaaaaatcagaaaaagagtcgtatatgcatgtataattgatgacgtactctgtacactagcaaagctgctttccatatcaaaaccattatcttcatcttcatcttcatcctcatgaccatcataatcatcttcaaatggagggtctaatactgatacaggactaaattgctccttctcctcttcttcttcttcttcttcttcattttttaccctttggaactcctggttttcagatacacatttcttaattttctcctgttcaaaacaaaaaaattaatgttaaaaataaataaatgttacttaatacacattattaaaggattttgaccaaaacccagattcttaattggccactttttttttctttttcatttgacttattcatcctataatttactacttgggatgttgggatattgtactaaaatccaaaacaagaaacaataaagcaaatttttttgtcctgttttagaaaaacaaaagacttggttcttctcttcttctttgattatgaacatgaaagaatgaaattaagatctgaatttgtacacgtaaacgtttcaaaactattttggcatatatgtaataacaaatatttcatgcaaaagaaaaaaaaaaaaaaagtttattaaatgtgattttatatgccgacagttcaaatacgtccagtaaaaccagttgtatcaactcggaccgagttgtgtgaattaactcgttcatgaatacgtgtcggtcaacaaaaaaagtttcctctgtttttgttttttctttacagataatgagaaagaaagtaacataataagaataccaacctcttgtttatggcgggagggagacggcgccggagatgaaaactccggcgtccggtgaccggctgaagaaggacttcgtgtaagaacgaaacgaaatgggctttgagagaagtcgttttcattttcatggtcacagaaagaaaaatcaatgtcaccattattattattattactttctctcacgagtttggtcaggaaatcgatttcatcagagtgttcatagtggctactagtactactcgaggtctctaaatccaaagatttttcttcattgctctccgaccaaatagtagcactactgggtcgaccagtacatggacaagaaccgctaatctcacagcctgtcataacctgatcatcacctctaactatcttttcttccatagtattaacctttcttagaatgtccttgaccgaaggtttgactttaacaccatttcccccctcgatttctctggtcctgtttgaccgattacgattctttagtctcttcaaaaacgatccaaataagccaaaaccgttctttagcttctgggttttggtcttcgaagatgatgatgatgactgtttttggatcctcagagcagcatcgagtaacagagccgcagttctcgccgggatatgtagaaaaatggcatttgagtttttgccagggctcttggccggagattgaaattcgaaaaggggtgactttctagggtccggtgactcatttaaggagagaaaacaagcggttttacagaactttccgggaaagcttctgttttctgagatgggttttcgttttttgagctgtaaatggtttctgggatggtcagccgttttcagctgagaaagtctgtcggaaatgtagttcttgagaacgaacggttcctgatcttctttcagtaactcgctcaacttcaagcactgagccatactcataaataaaaaaaataataataatcaaaaaaatctttccttgaagagtacaaatttcaaaaaaccatgaaaaagagttgaagaggtttcaacttaaacaagttttttcaaaagtgagagagaaaagagagagaagttttgaggagagttataggtgaaaagttgtgtacaaataaaagagagaagagaaagaaattttattaagtggggaaggaatgaggagacttcctcattcaaatctgggaggttagaaaatcgaggcagaaaattagtgataataaactaattattttatgatcaaaatatgtcactactacagttaactcaaataatagtaatacaacaaaaattggtgtggttgaggtgggtaaagctagcttagtaatataatgatataatcactttgtaccactaacgacaaaaaaccggtctagagagttctttctttcctagctagctacacacaacacacgataagataagaagagtaataatgagggttgagtataacataatttttggaacatggtattttattaagttattaattattaatatgggttttgtgattattagagcattattattactaattactatatgggtgcttaaattgggatataatagggtgatagtagtgagtgaataataatgagagagtgtgtttttatcacatgattcgtgagaaacggtggtggcaagctcagctgtaacaaaagtgaaaggttttcctcgtaacttcatttctttcccgagagatgtttacatatttccgaccattaggcagttggctcttttaatcttcaaatcttattaataggcacagtcgtgctctgcagtcggcaccactgaaaaactcgttcttgatacttaattatactaataactatgaaattttgtgtaattgttaagtactactagtttccattaagatttttctttaccaaaatgttttctttgctataattatcttttttttcgattaaaatctctagtactatattatcaactccaactatagaagttttttttaatgttgaattcaattaacactaaaatgatagaattttagtaggatttttttaattttatacttcaaaatataatattttttgtatttttacggaattctacacagatgtctttatagcaactaacggaacaacttaaatcgcaattaaaatctgtatagcaacccaaatagaaattagcagagcaactcaaaccgtaaatttgaagaaaaaaaattaaaaatagtatatgagataatttcttattttagtaatgcatatacatattttctattttcattcaattacaatattaaaagcaacactaaaaatatatgcttcgctattataccattgtttttaacaaaaaagtttatagttctaataattattgttgggacaagttataacttggcaccaagatttttttttttttttaaataacccaataaggttacttatatagtttagctcgatgaatagatggagttatacaatcaatcacaagtgaatcaaagaaattaataacatgaacatgagttcaaaattacttacaatttaagtttatctcctattgatcatcattatgatataaattagatctttatattaaacggtaagtttgattaagacaactttattcgtatcggtcctagtcatatataatctctattatatacatcaccttcacttaaatgtcatgctacatcaataatctgaatcgagattacttgcatcgaataacgggcatcagtgaactgcactaataactattaattaaagatttttaaattttaatatgttgttgactgtttttttcatagctaaatgatcttaattctccgtacaactacaagtcacggtctcatttatgaataaggaattttttgatatatataaattatttaatattaaatattaataatttaacattcatacatatatatcaaaatattcaactcttattaataatcacaaatgtcttaacaggcttttcaggatataaaccctaacatggccttccgagcatcaagttgtacggagacttcacatccacctctacgaacatggtcatgatggcggtatgctttagggcagtgccgactgtgaatggtagtttgatattaattactacttggagctatcctagctctagtgaaaccatacattagctgctcacatggctctagatcttttagtgacaaacccatctggattagggtttgcttgaataagatatgtttgaggacactccgtcattgatcatcacccttgccaccatcatgttggctatttgtacctcaacaaccaagggatcattgtgagggtagctaacatgatacgagttggagttttcaaatgtaatgggagcacactcatagcattgagactttggaggacgctctacaacctccagtacttcgactctcggttcatatcgcaaagaccttgcata

SEQ ID NO: 14182 - DNA, 2884 bp, Cannabis sativa
  modified_base (90)..(94): a, c, t, g, unknown or other
attcatttatttccttctgaactcataatataatacttaatataaaacatagcatacgtgcatcgtacgtaacaatatactagtatatannnnnatatatatatatatttgtaaacatcaactactaataattctaaatatataaatttaatataaacatattgggttgtttgtttggcttcatagtttaatttttttttttttcactaagataaaatatatataaactaggcaaaagagaggatggtagatacaaagagatctaccttcccaatactaataggtcccaattttgttcttggaagcagcccaagaagcaagtctatgagctgtttcattcctaaggcgaggaacccaaatcaaagataaatcattaatagaagccaaaagttcagcaaatgtgacaaactatgtccacacaataactttttttatttcaacaactctaattaaaacttgacaatcaaagaagaaagtgactgaagtccagccaaggagaagacactgcttaacaacagccaagagagcccgggggagggggtgtaatactagccttagaagtgaaaagactaaatgacaaagctcctccattccaaaaaatagcagccccaatactgagcatgccccttacagtcgcatcaacatacacataatggctagatgtaagatgggaaggttcaaagcgaacaatattaatgagcaaagactcgagagaatcatcaacaaaagacttattagattcatggacccctgtagaaatcaagtttgaaatagaatgacaagtccatttggtactttcatgataggctttattacgacccatccaaagagtggagtaaagaatgctagcaaattgagtgaacttgatcttgtcattatgcactctatcagttaagaaatttgggttgaggatccaattcaccacctccttatagtcattaaagtgtaatgcaccacttctaatattccaagagctaatgaattgtcttgccatgggacatgagaagaataaaggatcataattgtcttgggccgcattacaaaggatacacttaacatctcccccaaaaaggttaatctagttttttcccataagggagaaatatcacgagcaagtttccaaaggaagaagcgaattctctcatggaccttagctgcctagagagttttttgaaagttattctcccttgaccatcgattattgattaggctcatataagcccttttcaaagagaaatcaccaactgtgacatctttctatatgaatttatcataaaaagtagttggtgattgttgtaaaaggtttagagaagtaccgaggctagggataaacccttccttgagagcatgatgattccaggagccatccacattgagcaaggatctctgtagcatttgaccaagaattcatattcgtgggttgaagctagcacaatatcgatcccaacccaaccaagggatccatgggatattccacaatgaacagatcttccatttctaattaaatagcaacactccacggataaattctctagtagccataataccttttgccacaacaaaggcaataaaggggagagtactaaaatatttgacacgatagatttttgtccacgagttaagttgttgacctaaactctcaagtctccttatttcgatgattaaaaaatatttgattcttatttgtcactaatgatttgttaattttgtagcataaattaaaaataattaagcattttaaggcaaaattaattctaagggtaaaatggtagttttaccaaaactttcaaaagttacctgaagtggactccaagactcagagaactcaagacaagacttcatgaagttttttttttcttttacatttccaagtcttgtacagtgatttacaagtccacactgaaaattttctaagtatgaaatttggctcactaacttatgtgacaagttatatcacaaaaatgatatcgaaattttctaaattgatttttaagatcacatatcagtaaaataagagaattcaattagaatttttgaaatcggatatacgagctagaagttgtaagcgttttagtgcccagaaatggaaatttacccctgttagccatccgaaattctggttcctatccaaaattttagatcacggcataatatgcctagaaaattgtgctaacaactatcaatgactacttttcattcacatactatataaactcgttttccactaaaaataatttgttggttgagcattttcatataccaaacacattcaagtgattttaagatctcccaagtttaaaatctaacaaaacacttttcacacactttgtgtcaaaatttgtatttatttattctcagtgtgcttgctaatcactctaggttctattatcacaattctagggtaattttgcttgtaatcataaatacatttccatattgtgttgaggtgatgttgggaccggtattgtaaacaacccgtttagagtagagcgacactataacaatttaagattaaggttgatagtccttggcggtgcaaaactattgtaagaggtttgaaaacactttggtgaataattctcagttgtaagggttagtcaagtctgttaacttggctcgataatgaaactcgaagctaggtccatagctttgaagacgaatgatgtaggtggttttgttttaccgaaccttgtaaaaatcgagagtttgtaatttcttacccttaaactctttactttacaagcttgattattttctcagtatattttcttatcataatatttgcatttacttgattaatttgattaattgcataattttgtgttaaaagttttaatttattgaaattattttaaatttaaaattcactgttgggttttatgcc

SEQ ID NO: 14183 - DNA, 4777 bp, Cannabis sativa
gtgtttgttgaaatgtctaagagaaaaaatgctttggtcattacaaaacacctcacgtcctcactaggaatagaatgattacattatatagtttctgaaaataaaaaacaaaattacagctagtaaacttgtttttaaaatcaaaaccccacaagatcacttatctgagttcaaaagtccatcattatcatttttttttacaatattttgaggatgagaaaaaaaaattgatttagagaactaaggcaattcagtaaccaccataagtatcctaactttttttttaaaaaaaggggtcgggcctaactcggcccgtttatctagggttgggcttggcccgctaagccaaaagaaagagttaggcctggccgggccaggctaaagtgatatcgggtcgggccgggtttgtggcgggtcaggcccggcccggcccaactcacattcctaattttatctttgtgttttttattatttttgtgcagagataatgcaatatatatgttctcatttgctgagtatttcatagagggaaaggagattccgaaggtggattttgatttggaatgtcataggtccaggcttgcttttttattatattcatatgcaatgacaaagcaaacctgtggatatgagagtgaggctgactagatgttgaaactttgtccactgtgttttttggtatgcagatgttgaaactttgtcaaagcaaagagctttttgtccactgtgttatttttgtatgtagatattgaaactttgtcaaagcacagagcattttgtacacaatgttttttaggtatatagatgttgaaactttatcaaaggaaagagctttttgtccactgtatctttttggtatgtagatattgaaactttgtcaatacaaagagctttttgtcctttatgttccttttggtattacttttttttttttttaatttaatttatgaagaattattaggataatttggagcaatggtagagaacaagtaaatatttagcaacaccaacaacaaatgacaaagcagcaagcatgtgaagtgactaaatatagcaattcctataacaattcgaatatatcaataacaaatgacatgttagcaaccttttagcaacaccaacaactttattagtaatggaccacatttttagcaacaccaacaactatattagcaacctttacaataacatttgcactagtaactttggtttcaaggaacaaatgactaaatatagaaattcctatatcaatactaatagaaactctaaaggaaactatatcagtaattttttgcataacatgtcaaagcaccaaatacagaaaccttgaaatgaactacatcatcaacataaaagtaaccatttgcattaaataacaaatgatcctgcactacaaccttaaaagcaactcattcagcaatcccttgcataaaatatcatataattcaataaaacaattcaaactgaaaccatttgataaactattagctaaatattaaagtccaaatatttttttttctaaaaattatgtgtgtaatagtcaaattaaagatttatattctgttttaaaaaagtaaagcaataatgaatgtatatatatatcattcttctatatatatgtatatagttataaagtcaatctttaattcctgttgttgttatattttctgcaagtctttctattatgtccactttgaccgcagataccgcatttgttttgttttttttggcattttgttttttttttctctcatccaggcttgaatcttctcttctttgctctacctactcttactcttccttttggagggtctactttccaatttttaatttcatcaagtgtttcccacatgtctttgcttccaataggatatacaacttccccataagtagcaaccattgcttccttcatgtaatatgctgaacaatattgataagggtcttcattatttgctttcaaaacagcaattgcatgtttacatggtatttgatccatttgaaacctattgaatcattatgaatttattgattaatataatgaatcatcaagtatatgcaacaacattatatattaatgattaaacatatatggtttaagtgtttaacctgttgcatgaacaagttatccaagttaaatcaactattgctctttctccatcatcacaaacttcgtacaaagtgtgagttggtgggtgcacctgtttattataatgataaaattagtataccatgtgtagttatgataaaaaaaaaagaaagtttgtatttgaatttcataataataccgtcaatgacaatgaggatatgtagttgtcattcaaaatttcttcatatttactggtcaactttgttgtgatagcatttgcgatgtttctattattctaactctattgttgaaccaatcctctaaaacattctaacatcgtacaaattggtagctctcttatagctagaattgctgaattcaaagattctacaatattagatgtcatgatggagtatctgttgtttagtgaatgaactcttgcccatttgtgatatccaatctcttgtaggtaaggttgtagcctcttatcaatcttatcaagttctctcatgtggtactcaaactcattgacagtgtatgcatatgcagctaaaaagaatgtactcttcacctttttggatccttttttgaatttgcttttcatgttcttcaacaaatgtaggcgcaagccccatgtggtacttttgggtatactgtgttgactgcttttatgatgctttcatgtcgatctgaaatgattatcatatcttctcttactccatatgctttcctgaatttatcaaagaagaactcccaagaatcatcattctccgagtcaactacaccatatgctaagggaaaacttttaccttctccattgtgagttgctgcagctagtaatattcctccatatgctgacttcataaaagttccatcaactattacacatggtatgcaatggggccaaccttttatagaagcattcaacactacgaaagcatataggaatatcccattatcatctgttttgagatcaactctagatcctggatttgtaaggtggaacctgtgaagataacttggtaattcaacataagattgggctgcatttcctagaactttttccttggccttttctctagatctccaagctttgctatacttcactttcactccatgatcatgcttcatgtcattcattatatcaacaactttgtacattgttttgatatcattgaatttgtgtttgatcatatctccaataattgttgaagttgcttgtcgtttgcctttgtaccttatttcaagcgcacaagtgtgaatttgctgaaagctcttgattataaattgatttgtctttccatttcgtaatgctcgtaatgtccacttgcaatttttgtcaaggcaaacaactagatactcttttgtacaagacttttgcacacaatactggaaattgtttttgatagcataatgactcaaaacattcttcaaggtcttcttgtctttgtatatctgagacacaacaatttcttcttcatttttgttgcagatcactgattcttcatttatgtcgctctcttcttctttctcgaagttcgtttcatttgcatcttctataattttttttgacataagattgacatagtcaatatagtctgcaatgtcttctgtgccagttttatcaatgtttgatgcattttcttctacttttccaacttcattatatagtaggtatgatgaagttattgcactccttgttgaaaagaaagttggtctgttggggctgatgtcaattgtaaggcataatggatactttgtaaaatcaggttctcttttcttcatcttcatataaactttaagttgtgtatcatcagctacattcaggcccggccctgagcataggcgggctaggctgtgcctagggcccacctagcccaggggccccaaaaaaaaattcctttaaaaattataccatttttttattttgaaaaataccacatttttttctaaataagggcccaaaataaattttttttctatggcccactaagtttcagggtcggccctggctatattgaaaggactgtagccgtcttttacttgatactgaatcttcaaaatagttgattctattagcaacttcagctcattacaaatcattccaaacaagtggctatggttgcaattatttggaatgagcaatgcacaaccttcaaagttgatgtagattccattttgatcccattgtcctccatgttgaagtacaacaatactttctatctcctgttctaaaataaaattaaaccagcaagtattatttctattaaatttacaaaaccaattacaacaactcaatattaagcttataaataaataaagttaacaacttttctctaactatacatatcctcaacaactctatgccaaaaatacttaaacgttaaatagtataactttgtttggcaatgctgaaaacaacattacaagcatccatgaccataaacttaaaaaaataaaaaaattatcagtaacccaatcagaaatattcatagcaacagttattataactatatttaaaaaataacaaagatttaagattataacaaccctattggcaaccacaacaacactaacataaatcatgctcataaaataacaaaacaacaaagacagcaactgcttagcaaccctgactaacaaccatatgtaaaaaaaatacaaatgcagaaactcttttcacaacactta

SEQ ID NO: 14184 - DNA, 7456 bp, Cannabis sativa
  modified_base (7419)..(7431): a, c, t, g, unknown or other
ctgcctctaaatgtcaatgcagatattttcaccccctttagcttccctttttataaattgggttgaaaaaagggaagctaaaggcttacattgtagtagttcactttgcaacataagaattgatatgagttgccaccccaatttcgctagaaaaatgctcgattcttctctatagttttttagaaacccaaccctcctcgagatttggggagaaaaactttattccacactttgagtcataaaccatggttccctttctcacttccctagctaccagaattttcgggccatgcgattaattttgaacgccaacctttgatttcgttgttttcaaagaataaattgggagagacagacccactgatataataagcgtggcacgacctacttcgaaaagatttttcatgtgtttccatcctcgaagcgtagaagaaagattattcaagacaaagttgaattcaatatcctttcgatgtgttctaaatataggaagccccaaatatttgatgtttcagtttgggctatctaatgcctagactttctttattaccctttcttacttcaaaaaaattaacattccaagattgttgtatttttgtctcgactaagagcaatatttttccaaataattcaaaaatttacaagcttcctcatattggctacccttaacgataaggtcatccacaaataaaatttgagatgagcgtggtctagtcctattcaattttatccacttgattttaccactccccaaagcctcatcaataagtctagaaagaatttcggccacctagattaagatatacgggtaaaaaggatcttcctggtgaataccgtatttcggaacaatctttctcatcagcccactatgacaaatgttgagagatgatgtagtaatatattgggagacccaaatgcgaaatataactcatcgaaaattagtttagtcaaatgttaacataaaaatcttaatctcgtgcttgaaaaagatagaattgttccaaatttattaaaatatatgagttatatacaactcttcgtgagaaaggagccattattataactaattgtaagttacaagaccaaatttattccacaaatcattaagaagttgagccaaacgaacatatatataatgagaatataatctttatgcaagaaataaaatatgtttaaaataaagaaaatgcacaagtgaactttaaaatataagttttagttatctttataaaatattaaatatgtttaaagattggggtatccaagttttttatttttaattaatgttttttcttttatattgtttgttactagctagctaggtaggtactatcatcaaacccactagggccaaaaaagagaagggacatctctctacaacattatcagttgtgtttttttattttcttcttcaattgtttaatgagcttagttgccttttgttttgtgcaagatgtttaaaaaatatgttgataacatgattggatatctgtgggcctttctaaatgttatattctgcattctatatgattataaagaagatatactactttattgttctttcgattctcaagaaataccttgtactaatttcaatcttatatatgtcttcccaagtaattaaataactttcctgagttttttaataacaaattcatattaacacacatatatgtaaataggttatactatctatatatataaaaatatatttatttatatattactattagagcacagctttatgtaatatatatactacatgtacagaattttatgtaagcttcttctgatatactttgttattaattaatatacatatctatattctactggtataacaaagtttcatgcatgtgtatgtatgaaaagcttcaagtcctttaattttgcattatttactaaatctttgtccttacatttaattatcaattcaaggacattcaatttcttttatttttttatataaccacacaaattagaataattatgctaagaatgaacttcataaccagccaaagcaaacattatattcaaggtttcaaataattcactattctctagctttgaaccgactttttgataaaataacaaggcagtaaaccagagagcataatataaaactatgccttcttcggtacaatgaaaattatcatgtagtgatgagatgtgcagcaattcgatcatatatatatattatatatttgtaaaaatatgtatatataatataatgaaattgatgttaatcattcagatcaaaaaaaaaaaaaaaaaaaaattgatgttaatcatataattattttagctaaatatctaagtaactaattttgtcatgacaatttatttaatcgaatcaaaaaattaacgataaatatatcattattgaaaaaaaaaaacactcctcggttctggacaagtataagaaaaataataatcagaacatatatatatattgaggaagatgagaaatcaaattttgattttctattttgagagtttgtattctgtttgatgaccatatatagtttaattacaacaacacccctcacaatcactttagaacttttcacacacagagatcggaaagagagagagaaattaagaactcgttcttcttgttcatctattgttttgttcttttatgaaaaataagtattcacactaggtagaattgataaattactaccgggtgagaattgaagaattattgagctggagaatactcacaaaccacctcgttttcctcttcccttctgtgaaagttgcggtggcatccgcaggcggcgcaagaaagcgcccccaccgtcccttcctctccgttagccatgaactcgcggcagccatccactgcgtagccaccgatattagccgcgtgattcttctggcactcaccatacctcaccgtactcctcacaaccgaagaagaaatagtacttgtactacttgacttgtctcttttaaccactacttgccttttcttcatatccttgtttagctaaaattgaatagaaaaagcaaataaagaagcgatctagcttgcttggtaggtttaatgtggaagttttggagtcttgttttgcttccttaattgtctaagcttgttgccctagctcatccaaaaaattatattccactacgagaaagtattcaaaggaaaaaggctaagctatatctatatatgatcagtataattatgtgtttatatacatgtataaatatagctataggctatacatggtgcataatcgattctatatagtggtgcctaaccctaaccctagtatttatatttataaatgggataaggggttcgttgtattccaccacctcttagagaaaaacaaaaaataaaaaaaataataaataaaaaaaaaaaagaaagaaagaaagaaggaaagaaaaggaagagaaaagtgagtcttaagagaagaggtacttaataagagaagtgatgaagagcaagagcagcccttttttaccaattatgtgattattttaatgtcaaactcacaagaggttgaatagggagcagaagatggacatcaagttcatcatgtccaccaatgatatggaaccacgtcatcactcaaatatatgtatatataaaattaaaataaatgaacaagaaaaagtaggttacttcattacagcttccacacacacacacgaatatttagagagcataataaaaataaataaataaagtttcctccatactgtaacgtggagcatttcgataagaggaccaatatatagtaatatacgatatattaatccgattattataaagttaacatgtggaataaaagctcaatattcaaccaagagagtaagagctagccatggtatacattatttaactcactactatttatctttatatatatatattgattattttttttgttatacatatttatataatttttgctacaatacaacacactaatattgttttaaaattcacctagctagctagctagctagctactttaaatggtttcataatctcccctattgactagggcgcctgtaagattttatctgattatcagcaaaaatgtttgtacttttaagagaaaaatcatcaaacataaaaacattcaagtctatagtctaattggtccttgctggctgagtgagaactgttgtttttagattgaggaggtgcatacagatatcttatattttctttaaattaggtaactaattggcagaaggatgtaaatttttgtgggtccagtaaagttattcatagatatatcaacaatacaattttggtaacatgagcatttttcttttctttgcgagacttttctagcagacaatatacgaagaagctagatggagatcgatcaatcctattttgtccttgcatatattgcatattgcatatgtataattatataactaatttgttgttcgatcagatatgatatctcaactgtccctgcaagacattttgtgcaagaaatcaaacttttaatatctgcgtgtataattaatttattaattgttttaatataaaccaccttagtggggcaaacggataatgacaaactaattaaggtgtggattctatatttaaattttagtgggtccaaattgatacttaaaggaaggttgctaaggccccataaaagtactgtgacaacaaatattgtctaattacccatgattctaataattaagaccattgccctctctattgctttcctttcctttactctcaaccacagttgtacctatctctatgatcttctcttttgaatcaaatcatggacaatcatcatttttcgaatttcaacatcaatgagatgctcttcaactccatctgtatattccaacttaatcatgcatattgataaaaagaattgaagcttacaattaattaattgactattatcatctatcatttaaatatatatatgttttctaataattatttatgcatgtatatgcacaatacacatggagttagcacaattattaatcaaagttttcaaaaaaaagagaagaaaaggacaccaaatcgaatactacaaactaactgattactggaagataagatttatttattttttttttttacacataaattcaacaagagcaataagacagccacacacaaatttattcttttgataaatttattaataacaaaaaaaaaaaaatactatgacatataccaaattaccacaactgtatatcgagattgaggaaagatatgttttatgtatgtgaatatactctatgtattatatatatgaaaacgtacattttttttttgtagatagcttgctatacctacactatagaaactgttaaatatatttatgatatatatatatatatatatatatatatatattggatggagtagttcttcaatcgaaccatgattagagagtgcatacataaaaagcagccacaagggaaagttatagaattatatatagtgtaaaggaagagacagccacaaaatggggcggtacatgtgcaatatcacaacccatatatttaaaagggtcgacacactaagttgtggttgtcaatcaaaaatttccatgcatatatgtgtactgtttacatttttgttaaataatattatataattataatttataagcatataccaagatagctatgtctctctcccctttaagagaaaaaaaatatttatacctctcgagaataatatagataaatatgtgaaaaagtaattacatatttttatctattaatactactatatatattattgctgattttatgttgcacctaatattagaatctaggtagtccacaattggtttacgcacaagagaacaaaagttgaaagacagagtatccgtggggtggatattgcagggaacttggttttgaggaaaatatagatagattgttgagacaagtcaactaaaagttatcttttccacataatcattccactctttaatttccgtggaaaacaagtcaagtaagtatttcaatttgaaatagatgaacatatatattcgtttcttaggtcaatctttaaatttaattcaattggcttttagtcaggagtgtaattctttttattgtcacttctttaattcgctggaacactgagttgagtgccgcgccaatagattttataatgcattttgaagtgacaaataattttccatcattacaaccaacataaaatacatataaaactatatacactaaacacatttattgtggtgcaagagagaagaatgaataataatgaaataaaatatagagaagcatagaaataaggttctttttggttggagataatgaaatagtcactactataaaaatgtgtattcgcgattgttcttattagaattagttaggcaattagtttaaggaaattttcacgatatactgacttttattattttttttacaaaaacattgctaggtggtattttttttactgtgtatttttataagtttcatactgtagtatactgtatttatttttttttttaattttgtttggtttgttttagtgttgttttacggttgttttccataatttattttttaatgtcgatttcactgttcttcctccatcttgctagaattaatgattattttctgggtgttctcttggtgttgtggtggttttatctgtgggtgagtgtggaagatggaggctataaaatatatttcttcttccttctctatggttattttgtggttattttttattttggttctcctaaaaatatatttgacgagctcagtagaaatttttttttaaggtgtgtggttcttttatatttttctcagtggttatatctgcttattgttttacattagtttttttgttgttttagtagttttttttttgttctgattttttaagattaggcttgcaaatataactgttattgcattgggcattggggctgtgtagaatattttttagttttttttaatcatgttttctttttttattgtataatttgttttagtgttgttttataattgttttactattattttaccatgattatttatttgacatcgatttcactttttttctcattctcaccggaattaatagttattttctgattgttctagtgttcctgtagtggttttgtccgcgggtgtgaaagatggagacctcattttttttggtgtttaaaaaaagaaaattggccaagacagtataaatgaaaaaaaaaaattggccaagacagtataaatgaaaaaaaaattggccaagacagtataaaaataatttctatcgtgtgacaatatttttataaaaagtgagccaaaagtcagtatttttgtaagttttccattagttaattctgttattttctgtttccactatttttttggcttttgtcttacatattgtttgaattattttaccagaatctagannnnnnnnnnnnnatgttgtttaacatcctaatatgaa

SEQ ID NO: 14185 - DNA, 1859 bp, Cannabis sativa
tcacatggtggttctgaagtagtagaggttggggaagaggaccttatcaatcaagaagtgagtgaggggtttgaattgctcagtttgctcacatcttgtgtggaggcaattgggtcgaagagcattcatgctattaaccatttcattgccaagttaggggaccttgcttctcctaaagggactcctataagccgggttacagcttattacacagaagctttagctcttagagtgactagactttggccacagatgtttcacattacacctccaagggagttcgagagagttgatgaggattctggctctgcattaaggtttctgaatcaagtcaccccaattcccaagtttcttcacttcacatcgaatgaagtgctaatgagagcttttgaagacaaagacagggttcacattatcgatttcgacatcaggcaaggattacaatggcctagtctgttccaaagcttagcttcgaggactaatcctccaagccatgttagaatcaccggtataggtgagtctaagcaagagctaaacgaaacaggcgataggctagctggttttgctgaggctttaaatcttccctttgagtttcacccggttgtggacagactagaagatgtgaggctttggatgcttcatgtgaaggagcatgagagtgtggcagtgaattgcatttttcaacttcacaagaccctttatgacagcagtggaggcgttctcagagatttcttgggactaattcgaagcacgaacccgacagtagttgttatggcagaacaggaagctgaacacaatgaccccaggttggaagcaagggtatgcaactcactgaagttctactcagccattttcgactctattgatgctagcttacttccaatggatagccctgcaaggatcaaagttgaggagatgtttgcaagggaaataaggaacattgttgctggtgaaggcatggacagacttgagagacatgagaactttgagacatggaggaagctgatggagcaaggagggtttcgcagcacgaggattggcgagagggagttgatgcagaaccggatgctactgagaatgtattcttgtgatgaagactacagtgtcaaggaacaaggccgagataatgaagctggtgttggaggagttacactcggatggcaagatcagccattgttcacagtctcagcttggacaccagctgatgttgcaggcagctcatcatctttttctcaactaggttgactggtttggctgctgtgcagggtggtttatactcttcttttcttctcacttaaacatacaccaaccatcacttttcaatttaccttcttgttgcatacagaaacaaacaacaacaacaacaaaaaaagaaaaaaaaaaacaacatacagaattctttgtagttagaaaatcattcagtcattctttcattcgtttctgcagataaaagaaaaaaaaaggatcattaagaagtccaatagagttgagtagatagagtcagaagaaccatttattttgtatgaaaaatacagcaagttagtagtttcatttcatcatatgttattttctagattcaggtcacttagtattatttggagtcagttgtgtttgtcattattattcttttattcttttatgtgtatgctgaaattcttttgttatagtaagcaaggtcttcaagtcttgtagtcaaatttatttgttgaaagttaccagtacaatgaaagaattatgaaagttgaaattaatgtcatatatgatatgtagagatggaaattggtcggttaatgtacggggaatgcaatccccgcccccatccccgctacctatttatacccccatccccgccccatccc

SEQ ID NO: 14186 - DNA, 11836 bp, Cannabis sativa
  modified_base (4278)..(4284): a, c, t, g, unknown or other
aaaaagaaaataatgtttacttaattataattcttaaaattcaaacctcaatgtaatttcttttattgctaatatatgaatcctacataaagttggtaaatagaaataaaaaatgataataattaaaataatttaaaacttatcgaaatataacttagaaaaagtggtggtggatcacttgattgttgtttaatattactaaaaaacaaaactagagcaaaaaagatattttaagtggtcattcacttcatacatggccccaaatcccacgtcatcacaaaactagaccccgcaattctttatatataaattaaaattatccggcaagagcaaaactccccctctctaaaaataaaataaaataaatattttccgttttttatttatcagccccccaaaacaccaacccaaaattttaaaattcccaccagaaccaggaaaatctcaccctccccaagtatcagcgggtgaaaactcgccacgtgtacaaactgaaggatctaaaccgtaggtgacagatggcacgggcaaaagaacgggtagcaaggacaagcacgtgcaccgtctgatgttgcatcaacggtggataatctgcccgattcgtggacgggcagatctgaatgcctttaagaagaggtggtgaccatctcatttgtaattcgttctcaagagggtatctgaaaccctcgtttcttctctctttctctctctataaatctgtcttctgtactctctcactaatctcgcgatttataaatacacacacctaaaccctcgccggcggccaccgttgaattttttctccgaccgattatgagtagccgacgtttcgggtttggatctctgatcggcggttagccgttggtccggaggattcgtcccggaccgaaatggcatcagccttatcggcgagtcgaagcgaaccttcctggggtgagaacaaggtttatatgaggaaatatacaaccgctactgctgctgctgctactggctctaaaaaaaaccctcttctcaagttcaatcctaaccctaatctgagtgccgtacgtcagtcgtatgatacgcctccggcgcaggcgtcgggagatttgcccccgtctaatcggaaattgatgagcttaaatgagaagaggtcgtcgccttcgtcttctcgtagctatgtcacttttaatctcgcttcgtgttcgagaagagatcttaaggagcttgggaagcggctgagtttagaacttgaacaggtcagagcccttatgtcccgcatcgagtcaggagatttgaaatcgggacctggacatcatcatttgtcgttttcagcgaagacgactcggccttctcctcttcagcagacgcatttggcggagtcgccgagagccgctggggtagagaagagaatccctaatgctaatcaaacccacccggactctaactttctcacaggaaagaagaagaaaaagaaagatatgagtacgggtttgatgacaacacctgtggagaagatgggttctagtatgaaaaggagtaacccctacggatcggttatggaagcgaaacggccggcattggacccaattgatgagaaacttgcttcgagtatgttgaagaggtgtggtcagatcttgacgaagctgatgaagcataagtttgggtgggttttcaatgccccggtagatgtggttgggttgaatctccacgattaccaccaaatcgtcaaaaatccaatggatctcggaactgtcaagtccaagcttgagaaaaataggtatcgttcacccatcgatttggcttcagatgtgagacttacatttaacaatgcaatgctttataaccctaaaggttcagacgttcatgtaatggcagagcagcttctgctgcgctttgatgaaatgtataatcccgctttcaagaagtatgaaaatgagcggcgccgtgcgcttggagctggtgctcaaagcattgctcctgagagtaccaacatagatttagagactagggtagtagggaaaaagcctgaaccggtgcgaccacaacccacattttcgaactcaccaccaccagttcaaactcagtcattgacgaagccttcagtacctgctatgcccccaatgccaacaatgtcagcccccttaacaaacccctcagggaacacaagacccatgaagcttcctaaaccaaaagcaaaggatcccaacaaaaggcaaatgagtgacgaggagaaggctaagttgggagccaatttacaaaatcttccgcaagagaagatgggtcaactagttcagatattgaagaaaaggagcgatcatttgtctcaagatggggatgaaattgagcttgatatcgaggctgttgatacagagacgctatgggagcttgatagatttgtcagcaattacaaaaagtttgctagcaaaattaagcgacagtcactcatacagcctcctgctccagctccacagaacagcaatcagcaggtaatgaaaactgttacctttgttttgtttgagagcttgatttgtttgtctcttgattttggagaaataatggtttctgttgttgtgtactacattgtagtctttggtgatggagactccagaggttgctactgcagttaaaagcaagaaaattgatactgctgaggaggatattgacattggagaggatattccaatgggaaatttcccacctgtggtgattgagaaggacactgctggtggtgctagtagtgggtctagtagttctggcagctcaagctctagtagtgattcatcctcatctagtggtacatagctagtgtctttggttgtttgtatctataatggcaatgtggtatcagctcccctgaaactcatcatttttttcttctttttgttgcagattccgactcagggagttcctctggtagtgattcagaagctgatagtgttcaatcaccatttgttgcatcaaaagaagctccagcaccagctcccgacagctaacgtgaaagtcctgaaagaattttaggacagctagtgaaaagccatagtcttcatttagcttagcaaaaggaaatctagagattggtttagtctttagacaaggatgtggatgcttgaagaaagacttgggcttgtggcttctgttttttttgtgtgtgtggatttgtttggcttcttttttctttttctttttttttttatggaacagtgcaagtggatggggcattgaaagatagtgagtgttagtggttggcttggacggttccatttgtaccttgtgtaaagaaagaatgaccggaacataaattcaactgagttttctagggaccagtagatagaagaggaaaggagatagctctgctaaagtagataggagagttagaattagggtttttttttttagtttaatggacgtttaacttcgagaagagaagggggaaagaaggaaaaacttggtttgggaaatttttttttgtatcatactaaacaccaccacatgattttcagagtggtcaagcagcacagtagaaaacatgtacagaatgattatgggaaaaaaaaaaacgaaacgaaagaggtttggctctttttcttttttaatatcttgctaatggctcatttatgcttttgattcttttcctctggcagccccatttcttgtgtttccttttctccctagcttttacttttttgctgttccttccttcaggctgtttctcaccattctggctttaaattttaaccttaataattaagagaaaacgagccccagtctgatgggccagcgatcatcagcaaatgaaaattgcaaattcgttgggtctttcggtagctttaataattcgttcattatggatcattactgcaggaggatagaaatttgacaagttgggcaactaataaaatatagtactctgtacaaagtgcactagtaaaatttcatagtaagatcttatatgaaaaactgtggtttctgctaattctaattgtttctcattgtggttctattttactgcatttcatagcaactacaacaaataataataataataataataataataataattacctgccaataaagctccagtcaacttcttaacaagttaataataataattatctgttaatatgggcttttgaatttctcttatgacaagtacacaggaagttaagatttaacaatttttaattgtccaaggtcttacctttaatatgaaaaatccaaatgattgcacgtgtgtaaatgtgacattctcattacttggatttacgcaactaaaactattattattattattannnnnnntattattattattattactagttgtagttgttatgaaatgcagtaaaatagaactgcaatgagagaaacaattagtattagcagataccacagtttttcattttaagatcttactgtgaaattttactagtgcactttgtacagagtactatattttatgtgttgcctaacttgtccaatgtcatcctccagtcaagttcttaacaagttaaaaatttcagcttgtgtcttcatcggaagtggttgtggttttttattttttagtggcgtaaatccaagtaagtaatgagaatgtcacatttacacacgtgtgccatgatttggacttttcatatttaaaggtaagacgacctttgacaattaaaaattgtgtaaattggattccattgtacttgttttagagaaattcaaccccatataatatttaatgataaatgctaaagagtattcgtggtgcctatcatatgagatataatataactattggcgtctctcatgcgagatataataaatttaataaaaaaatgattaattatgggtgttttataacaatgccaaatattaatagacaatttgaaaatggaagctgtgcaagtgcaagatatttttataatcaagttaacaaagcctggaattagatgagaattctaatcttaagcaacacgttatttcttgtttggattcataaagttgatgccacgagtgagttgaagaatatggaaggataagagtaaggtgtcgaggcataaacgacacaacatgaggtggataaatcgaggccattgatagcttaaaagacttctcctagtaattagagcatatattaattatatctatgggtccttttcatgatgtcatttccttgcggggaaacttcttggaaaaggactccaaactcaaaaagtgaaaaattggtttaggaatcatgagaaatatgtatattatcccaatcccactacggtctatgaggaaaggtatcgtattttatagtttcacacatacgtgaagttggaaaatttagttattaaagacttgggtaagtatgcaactccctagtcaatggaagagaaccaatggtgtgaaagtaatagaagaaacaggttgtctaaatatacttagtgggggttggttggtccgtattataatcattgtacataagttactaatgggttctgtcctttcacatgggaaaacctattaatttaactataccaaaacttcaatttgtttcagccttttgataacagtgtttgaaaggagagatagtcttcatttattaagttaactttctcaacttcgataaagactatacttcattacatatctatccatttacctactttttaactgtaaattgttacctacatcttcttggcttaacctaatgatgtgtatgtacagtacaacttttaccatcagcttccaacttggaaagcgacaattatggctttggttatagactaggaccatgtttgttggatggtttcatatgtttcctttagtcttttatttatttggggagacaatgacctttagtttggacatataaataagatgaacatgaatacagaaagcttttcatcaaagggtaaatatcttagttttaggtcacctcagatatttgacattatagaaaagcagatgtgcaaagtaattggacattgcataaacatatatgtacaagccaattgagagtgatttctcaggctgatttattaccagagtagataccataatacacccaattacacaaaacaaggaagtgtcacttcataagaactttatttttaagatgcagtgcatttcttttttcgagtccatgatatgaacagtgaccccattaaggctaagcagctactgcctcattgacttgggaagttgatgttcccttcgacagtgcatctgcacaagggttgtcagattgagcaaattttgcaccacaaccaccaccaccacagccgccacagccaccgcaaccacctgcaccacaccctccacagccaccactagacaccatgtttccacatccaccggcaccacaacttccacagccaccactagacaccatgtttccacatccaccagcaccacaacctccacagccaccaccacaaccaccacttttcaccatatttccacattgcccaccacctccgcatccaccacagctatcactcttcaccatgtttccaaatgcacttccacatcctcctccacagattccactggacaactcgccatttcctggcactgatgcatctcttttggccacaaccatgttaaacttaacttcacttgttgcagaagggatggagttggttccgttggcctctttgttggtgtcattactattttgagttatgttgttaagctctgcactcttagcatcaacagcaaagtcatcatattgctgctcatttactgtatccgaaaatattgaaaatgatatgacactggggattaacatccattcttccttcacctatttgttattttccaatgaaaaaaaaaatcacaattagaacaagtccaatcatctagtcagtaaacagaggtcaaggtcaataccttaacaagtccagattttaagtcgagcaaagccactgctttgccataaggatcttcagcagagaactcaaccgcagttatgaagtctttttcatttccatgtttttcacaatgtttaggttcgtagtctagctttctaccaggataaaatttcacctgaaacatgaaggtagatttgtcagcattgatctacttaatttgaacaagcaattttgttttctttggtttcttgttgttggatgaccgtgcttcctattccaaaaagacttatcacaaaatcatctctaaatacaacatttataagatatttcaacataaactatacaatcaagcatgattgtttttgtgctggtttatgccagtctcaggtaaacaaacatctttttttttttttcaccaagaaaacagaagttttgattggagaagtcattatacaagtgaaatggatgattgcttaccattttatcacccacaagctcaaaaatgtagcaatctccactggacttcttacaagggaatagagaccactgacaattcatcatagaccatccagtcccaataaattctgcaagagtatgaatttcaccagacttcatcattccaattacctccttccgagcatagctgttttctctcaccttcttttcagtattcctaagatgtaatgcaagaaaataatatagataagtgggagcttcgcgatggatcataaacacagatataatacaacaaaaagaaacatacatcattgctaacaaaccttggccacactgaagcagagatttcaaacccaattgaatgtagtgcacaaatttctaaaactcaggattatgaatttttaaaaataatttaagagattactatcagcttttgggctaataatgcctcaataactcccttctgctttacatggtcttcgtctttcaaaagaaatagctaaaatcttagaatatctcgtgctactataaatgcattttctttgaaactagaggaaaattatgcaatcataacagtacaagattttagtttggcttaactctgtgaatatgagtagctaaccagttgagaaatatagtgaatattagaaaacccattctaattgcatatggtaataagctgctgatgtaaaagtcattgagcatttgatgtaaaatatgttacaagttttaaccgtgcataggtccaacaataagatcttttaataacaaggagctaaacaacttaggaaactaccatttctcatcacctgcaagtatacggtttcatatttaaattgtgaccaaacagaaaattgaatgctgctattacctcattatggaaatgagtagaccattatgtatagggaaacttcaaaatgtatccactgatatgaatttgaacacattctataccttatttggaggttcatgagtttagtgccggtttcatcaatgacatggattctgcccgtggcatctttagtcttcccaggaatggggaaacaagatttttttaataactgtcgagaatggaccatttcaagcacacgttgtgcagctgctggagcagtaaatgagacagcaactcgtaggcgaattggttttgagctcacatttccagaacttggtaccaagtctaaccatttttccacagataggtcagaagctgagacacagaggtcttgaagagatagtgaagtagtacccaatgtctttaatgactttgttatcggtaagttcgaaggagaacgagacatgagctcaaatataagctccccattaggttcacactgaaaagatgcaacctgcttcactttggactctgacaaaatagtcagttttcgtttggcatcaaacaaaatatcaggttgtgttttactaaacgtgacaaagagacttcctttgtgcccctctggtaagttattaacttccacaaactccaaaaccacctaaaaggagaaaggacaataaagaaaactgttaggacactgaaagctttctgtcctagaataggctcagatacattacctcttttgagttagtaactcataagaggctagaaacaaatcaaaagctatgggaaatgcattaattcaaccagtagagatcaaaccccatgaatagggttgaggtgtaccaacaaattactatctattagtactccagggcctagatatcagagatactaaaagtaaaacttctgtatatcatttcttcaaatgtataaatgagatctaagccttatgcagaatattctacttgggaatgaacggacaagtaaatgtatatgcataagctaagcttaagttctaaattaggataactgagtcaccctactgtattgtcttcaaaagtacgataagtcagatgtaataatagttgatgaaacttacctccacaaagttcaccttgggtagctgaattattttcttatattcatttgttttaactttctctttgttgatcatatttggtgggaaaggagtgtttgtaacaggagttggagtactgcctctatacattgcccctgctctccaataacgtgtaccaaatgtttcttcccactgtttggtagtgctagaaaacccaacatcaagcttcattcctttagttctgtccgagtctgtgtcatcatgctccaatacctttccaagtagtttattcaggtctttaaagtaagacacaggatgcaattgatgggaatgccagataaggtcaatatcataagttggaacgcaaaagcgcttcaaagatttctccttgtttctccttatcaaatgcaaaaaccctttatatctagccagagctccttcaagaaacaggtcattgttcatatggggtctagacacctgtccggaaaacaacataaaaaaattaacaggattcaaatagtaattcatgcacaaccaagtgctaacttacataaattcctcagaagaccaagaaaccgcattcaaaagagtttcaattaagagtaatagcttcaagatgataataattatgtaacagacagtcttcattacctggtaaaagaaaggagtctgccttttagcagctgaaaccaaatcatatttggtgcatatctcgagtgcataaactttatcagaggtatcctcagaaaatgccaagtttaagtctatgatatagggttcttcaggataaagactgtcccaaatttcttcagtttccctcgtacagaatttatcaacagaggatacaacattacagttgtcaaggatccttccataaagttcctcacagtcagacttatactgaacctgaacaaccaaaccaaaccaaaccaaaagcttgaaaattgacaatttcaattcaattagacaaagttcattaaaattgaaaacccagaaaacctactggattgagcctgtgacagtgccaaatccattcacaatcaagaggtacaaccaaaggtcccttagaaaccggcacctcagaatgcttcgcaagcaaaggaagccaacaagcattgtacctgtatttatcattctattaagcaagacttcaaaacgtaaatacagttcaatcctactttaccagatgggaaagctcaataaaaaggaccacccacataatcattttcaaaaacctattaacccataaatcaaaataaaatggattcagtacttataaacatatatgtcagacacaatttggtttgaacgaaaggaaacaatcttctttccctaattttgatatcaaacactcgatcaaaagggtctattttactaatactaagcttacctttcaaagattatggtgctaaacccaattttggatttctttagctaaacaaaataacatcacacaagagaaactagattctccaatcgaggtcacacgttgtaaaatttaaccaccgaaaatctcaactacataatacgttaactaaaaattgacaattgaaaaaaagaaaaagaaaactaacctatatatagctctgttcagaacagggccatcatagagagagcgattccgatcaacagcggcgagaaattgaagctggcgtttggccacagcaacaagatcaacgcttattcctatattttgtgcttcaatccactcaagctcttgttccatcgccataattacctgctattgattctaagaaagtgattatagcaccacaaaacacaaagcttcaattctaagaaataattgaagctttgatgattgacaagtcaatagaattgaggtttgaaggtgaagtttctgtgctctatcttcactgagctttgcattttcttacatatttcctcattttcgatcacatatttatagtaaaagtctatagagcatctcctagtaaaaatttagaaaataattaatgagctggatatattaaatggtaaaatattgggattgttatattatttttaaaaatttgagcaagttattgttgctaaaaattagtatatatataataaataataataatatgtgagattataattataatatatttgaagagtgatatattattagagtgtttttaaacaataaaaatataaaaagtaatgtgaaggagaaataaatataaaaaataaataacatcaattttattgtacataaatttttaaaataacattatttaatattgaagataattagacttgatatgtattacttgaatcactagaatacccttaccataaaattttgagtgtagatatatttcctattgtacccttgcattatttttatccaattttaaccattattttatcattagtaatgagagtcaatggagatattttgtaaggttaagaaatagtccactaattttttcccctttattttctacacaaagtggttactgttcctttttgaattttacttcttcaatctaacaagtatcattttatgatcttcagtcttttcttttttttttttaggagatcttcaatcttttagttgctttgtttgttattatcaggtcttttaattataaatttaataaagtatttgatttaaaaaaaagtcaataa

SEQ ID NO: 14187 - DNA, 11088 bp, Cannabis sativa
agtgaaaacttaaaacagtatactgcagtatgaaacttataaaaaacaaagtaaaaaatatcgcctaacagtatttttgtaagaaaatagcaaaaattagtacatcatctaaatttttctaaatatatgggaagaattcaaggaatgggatgatatatttgttgacccaaatgtcacatcaatgataaggtcaatgggccatgaggaatatttaaatgggccaaaagactttaaaggccatacaacaaaggaagtctcttttgtcttgtgtttgtttaattttgaaatgtgtcacttttagcataaaagttaaagaaagcttgaccctttttattatataatgcataaaactatggtaaaaataaattaaaaatctttcacttttttcttcttaatgcatggcttggcatgtgggataattgttattggtttataatatcatagccttggtaataagtctactatggccgaaagagcattattgacataagaaaaatgagaaagatacttctaaaaagtggacaacaatgtatttatattaatatccttaaaacattcactcattctaattctagttctttattccaattttggatgagttaaaaacttaaaaacttgaaaacaaaattagtgtgaaattttgtaattgtgagcatccacacacattagctaaagctaaaattttgaagctttaggttaaaaatatcagacataattttaaatatttgtttaacaaagttatgccctttactatttattcattcataaaaagcttcttccaacattatgttttgataccttgttccttgatagcaatagttaacattttcatttttttttataaaaggagaggaattcttattaaatgaaacatcattacaaacaaagctactacaagctcaaagcattaccaacttagcaatatgaacacccaagtttattcttagatgatattttccttctaagtctaatttttatgttctctttaatcatatcactaacatgcttaataatgaacgaactatgctcaaaataataaagattttgttaacctaaatgaaataacacttgatattgtaaatcaaacctcagatgcccaatagcatgtatcatgaactcagaaatgtcaattaaaacttgaggagattcttctaataccaattatgatctcatggttaccatttcaagtagatactttagtttattgataatattaataataagtgatgcactcttcattatttggttttaaggtggtaaatgatcatagaagacttaaaaaactatattgataattaaactacgattcaatatcacataatataacatataattaattgtgtaatttaatgttagataccatatatttaattttaaaataaaataaaataggtgaaatgcatgttagactgtatagtgacccacaacaatagtcatgatttgtaaggttgataaataattatttcaatgaagggctcataactcatctccttctcaacccaatttaaaatgggccagagaaatttttggcccattattaaatccttgtgtcaattgtgggctgcaactcttccaagaaaatgggcttcaaatgttccaagtaaagcccaactgaaattgattgatagtttctttcatcacataatatattcaaaattgaaaattaactaagtgacaaattaataaaagagattctagtattgggtgtacatgtagataacaaaaacaaaaaaaaaaaaacaaaaaaaaaaactatggtgtaaggtataagacatgtttcacataataaaaacaattgatgaagtagttagaaacataacatataccttcaaaataaaaaccggtataccaacaaaacaaagatttatttttattcaaatataatcatttcaacatcgaaattaataaacacattcaataattaatcatatgtaccttattttaacatatatattcattttcactctttcatattatgtacttcatttttgtccattagctagctacattaatcttcatcctcattatataattacactttctttttttatatatatacttgagacaaaagagccatttttgttgagatgtcaagctaagctttcgtatgaactaaaactcatctcactatatatatatattatataattgtatatatcatattcattatgagtattatatacatctatatagatatagacccatttcaggtaaatagtcaccttcaaagaagactaatgttaatatatattatgtatgaatgtatgtatttatttatttacattattattattatatataataaaaaggttacttgaaaagtgaagctaaggaaaagcgacttggggcttgtaattagttattgagtcgctacatctattttcttcaccttctccctctcttctttccaccacctccaaaatccaacaactctttattattattattatttattcaatttttatttaaaaataaataagtgtgtttgttgcaattctcacctatttatatgattaattccttaattaataacattttagtgttattttattgattaaatatagtgagttagtagagctagtatcattttagtttagatttttaaaagttggtattttctagagaccaaaaaataaaaaataaaataaaaaaaactcatagtagtgtatatactataggagtaactcaacaatatgaaaaaaatttagtctatttttattatgtaagttatagttagttttacctgtaaaattttaaaaaatttaaagtacgttttattatttttttctataattttactataaaagagtgatttgtaatataaatatctaaatttaactaaaattactgataataatacttaaattatattttcaaaaagtactaagtgttaagtaaatccacatgaattattaaaaatatttacgacataaattatcaggtaaataattaatttaatatagtagttgtgtggaagaataatatttaattttagtatagtttaagtaattaattattattattattattattatattaaattggttttctagaaatgaagaaacaaatggtatattgcgtaagatgaaaactctcacgttttaattggtctttctctttcactctcaacaaaacaccccatttcttcttcttctcccaatctttataactcaaatcatctaattcatttctcaccacaaccaaaacagaaaaaccctaaccctaacttcttcttcttcttcaaaatccaacaaaaatgaagaacactaacaacagtagcaacacaaagctcattctcctccacccttacattctcaaacaagggaactcaaaccgtctatggcttctcgcaatcgtatcattcttcacagtagcatttctcctcaccttaatctacaccagagactccacaacaacaaccgccgccaccgccgctgcaaccgctgccatgacaacagctggtttctcttcaaattcaccttcttcttcttcttcgttaccgacgaacgtagtcaacacactcttacactacgcttcaagatcaaacgacactttcaagatgtcgtttgccgaactcaaaccgatcgccgatgttatcagaaaatgttcttcttcttcttctccttgtaatcttctggttttcggtctcacacacgaaactcttctctggaaagccttaaatcacaacggccgtacagtcttcatcgatgaaaatcgttactacgccgcttactacgaacaactccatcccgaaatcgacgcttacgatgttcaatacactacgaaaacgagcgaaatcaaggatctgatttccacggcgagagatcagatcaagaacgagtgccgtccggttcagaatttgctcttctccgattgtaaattagggctaaacgatttgcctaaccacgtgtacgaaatcgattgggacgttatcatcgttgatgggcctagaggtgattgggccgacgcaccgggccggatccagcccattttcactgccggggttttggcacgtagtaaaaaaggcgggaacgctaaaacacacgtgttcgttcacgatttcagaaaaggtttggagagagtttgtggtgatgagtttttgtgtagagaaaatcttgttgagtcttctgatttgcttggtcattacgtggttgagaaaatggaagaaactagttaccaattctgtcgcaacaacgacaataatcacactgtcgtttcgaataatacgtcgtcgttttcgtagttgtttgccgaattcggtgtcgttttttgttttttttttttacatatacgtacaaaataataatagtgatgatgttatataaaatactcttttggggtgggaaaagagaagaggtgaagataatggtggctatttatgatcaatttggtcacatcctttttagattttttttttcttcgtttgggaatgtaaaaaataattcttttttttttggtaaaaaaaaattgtaatctttacgaaatgaaatatccaagttttcattatatttttacatttagtgtcgttttatacatttcatgtcgttttgtaacatctaccattttctttttgagagaatatagctattgaaaattaatgaatgagttcattttacaacaataacacgtataggaaaatcagcactctgaatataatcagtatccacctgaaaagaaaatctagcaatgtagcacgccaagaaatatgacttagagatgcaccaaagaagaaagacatctgataaataatattccgaatcagatcattgagaaagtgagtctcaataaaatgaatagagacactgagatcttgcacccattaaaggcaagaagaaatagttttggcttcaatttctttcactaacatctaccattgttgaaaataaaatagccaatttcatcttaaatatattttttctattaattcatattactgtcattattagttcttgtctaatgtctatatatttattattattattggtagcgtcgtttaataaatttcttagtcataatatatccttataggtcgttctctagctattgttgtatatttcagctttattgtcgtttattaatttgtttaacattattattaatattatctaattctacactgtatatgtcctcaatttttactgtcgttttagcttgatatgtaacatagtccttcattttctataaattgtttcattgactatatctcatttttttttccttttaatcttttaatattatattatatgtcttctcaacttgtgttatcattgtcgagaaaagtgtaacgtttcattttcttgctgtattgtcgtttttagatgtcattgtcgtttttgaacatcaacatttgtgtggttggtagctttgaaattttgctttacatttttcatatctatttttctgctatttaaatatgcattttcattttctattaaatttccttgactctattgctgtaattttctactaattttcctcctttcaattcaatctctgctttagagtatatatctgtcttctctatataaccttagcctgcatatttttcagatattgctgtcatagttttattgtcgtttttttattatattgtcgttttttgattatattgtcgtttaaaattttactgtcgttttttgattatatgtcgtttaaaagttatatgctcgtttaaaattttattgtcgttttttattatagtgtcgcttaaaagttatatggtcgtttaacgttttactgtcggtttttaattatattgtcgttaatatttttattgtcgtttaaaagttttcgtgtcatagtgatgtcgttttcttatattttgtcgttttaatgttctatttgttttttcttttcagtagtgttcagaattttctgttttatcctatattttattgttgtatatatgtatatatttctttttagttatagaaaaaatgattctgattctatcttaaatcagaatatatttcgtgataatatatatgcaatttaacaataaaacagtagctttaattggatccataaagctgaactcaagaacagcagccatggccaccgatttcaagtccatccccataattggtattcaaaacaatctttttattcaaatccagtcatgcagacccttttaactattgatcatcatgataagcttttctatatgtgtttgtagatattagtcctctgttggccaagtgtgatgatccaaaaatggctgaagacccaggtgtttctgaggtggttaaacaattaaatcaagcttgtaaagaagcaggctttttctatgtggtaatttaatcttttattagagattttcagtaatgtgtttgctattttctgtatttgaacaaaaacccatgaaaaatcttgtctttatcaatctatttagtttaaattttgaaggcaaataaaaaaaggtttggtttcaacactttgcttaccaagtgtttgaataaacacccatgaaagataatgtctttaattgttatcagtttcttaatttagtttggattattagtataataagaaagaagcctttttgtctagtttgggtaattatgattatgattgtaattaaatttaaagacttgtttttgattcataattatatatgcagaagggacatggtgtaccacaatctctttttaatcaagtaaaagaacaaaccaggaatttttttcaccttccatatgaagaaaaagttaagatcaaactcactcctgctactggatacaggtgtccctatatatatatatttatatacatatacagtagtgtatgtgtgtgttctgggatttgtgctaacataatgggagaaatttttcatacagaggatatcaaaggattggagaaaacataactaaaggtgtaccagacatgcatgaagccattgatgtaagtctttattttctttctcactgtcttacaactcaattttgattcttcttttattctttctttctatgacatggactattttgcaacagtgctatagagaactgaaaccaggggcttatggagatcttggaaaagttatggaaggatgtaaccaatggtatgtcaaaattttggctcacaattgtttctttctatggcttctcagctatgaaaatctagctttaagccaaaaaaaaaaaattactactagcctaattgattgacattcagctttaggggttcatatctctcttgtctcttttgaagataatagtatattccttgcatctatcttatacagactttagggatgtaaatgggagcggggcggggatggctcccccaccccgtcatgtttcaaaattcttatcctcccatacccgtcttgtcccatttaaaacggggtcaaaggcatggtggaaggggttatgttgcccttccccgtcctatccccatcgaataattccatttgagccctcattagggtgggtatccacgagtttggggactgggcgggttgatgtttatcgaaatttgatagtttagattctttctattgatgaatgaggcttatgttttgttgtttcttattatgatctttatgcaggccacaagaccccccaaaattcaaggatatgatggaggaatacattaatctttgtacaggcatgatgataaacacaaaccaaccaaccaaaccaactaacttttcttatttaaattctaatctcataattttcacattgtatttttggtctgaactcattatttctgcatcatcttatctcagaccttgcaagaaacataatgcgaggaatcgcattagcattgggtggatctccatacgaattcgaaggagacagagctggtgatgcattttgggtaacacgtatcatcggttaccctggaaaatcatcagaaaatagccaagagaagcctacacatgacattggatggtaataactaatataatgaattgatttggtgctctcactttctttatggcttcatacatttctgatttactttctttctttctgtcaaacaaatccagtggagctcacactgattatggtaagcttctctctatatacactttcaatgttgtgacttgtgagtgtaataataataagagcatcaatcttattcccctaattaatggattttcatggcaggtttgttaacattgcttaatcaagatgatgacataactgcacttcaggtacaaaataatgatatgttcacccacaaattacaccaaaatattacacacagtgaagtgacacttttataatttgcgttatcgttgttggtataatttatgtatgcacaacattattactcatcatttttagtcatttcgcaaaataacctcactctttgtttggcctcaaatcggaaacgatttcaggtgagaaaccggtcaggcgaatggatatcagctcctcctgttccgggaacatttgtgtgtaacattggcgacatgttaaaggtaacagaaactcttaactaacaaatatggtttttgttatgtaataataccattcctctaagcaaacataattgggaagaactgcagatttactccaatggcttgtacgaatcaactttgcatagagttatcattagctcgcccaaatattgagtttcagttgcatatttttacgaggtattttacttactattcgtgttaaatagtttcgagtaaatcaaatagagtaaggagtgttgaatatccatatttggatgttaataatttttttttttcgggttgaacagacgaatttcaatgcagctgttgagcctttggatgtatgcaaagtcagagtaattggtgaggctaagaaatttgatagagctgtttatggagagcatttggtaaagaaagtcctcacaaattttgtgtattaagatttaagatctcatcaccttaataagggataatttcgcaaatacacaaaaataacaaaataaaaataaaaataaaaaaaatacaaaaatatggttgtacgtacagaatttcaaacatttttacaattttatttaaaaaaaaaagacgatcttttaatgtatttttatattgtactcttattaatttgttgttattttttactttttttttttttgtttttttatagaataccaagaaaaatagtgcattatgtaattatctatttatgtaattgtgctaagttgttattctatgcctttaaatgtctgtaaccaaacataatttgtaacttaatactgaattagattaaacaaaagaaattgttcatggcattcttatttatgtttttataaagcaattcatggagatttttaagtgggaaattatgtgatcaaacattcatattgtcgttttagttaattctgtgtcgtattaattggacttggggcgcaaaagaatgaaaattgcttttgggcaccattcaacaaacatgtgaatataataattaggggaatttgattttttttattcatattattattgtaggttaaatataagaagttaaatcgttgctcaatattggtagtataggtatattttattgtatattccaaattacgtctcttatttgaaaaaaaaaatctacctaaattttctcagtctttctctttttcctaccagctcgttttctctttccttttttttggttctcaccaaactccaccactaaaaccactgtcgaatttcggtgaccaccgcccatgactctcccttctctctctagttctctttgttgtgtgaccatgacctttcctctctttggctctctctagtgcatgaccaacgacccacgacttgcgactaccactattgaacgaataggcaaacgatattgtgatttcttcttatattttttttgtttattttttggtaaaaaatcgagttttagtgaaaattgcattttttgtgagttttttgtatatggtacgatggggtacggtagtggtccaatggtgaatataatagtaggtagaagcttcatcgttccaccaataattgggtagaaagagactttaactgcattacactctttagttaaaataagtaaaatattaatattcttattctcatagaacttggttaatattttatcatatttcatcatcatcatctacctacctcaattaatcaatggtttatactatataagtattaaccatatgttacaaaatcaaggaggtattgtttataaatctgtaagtgacaaacacaattcaatagtactaaacatttcattagtttttcttttcttttcttttcttttcttctttcttatttcatttcattcaatagtacctacaaatatatattgtaaataataaaaataaaatttaattaaataagtgttacaatgaagcagcaggtaggtattaaacaaatctaaaggacatgtagtaattagtaaagctaaaatacaagaacaactaagaaaacgacgacgttttattcaaatgattaatttgtctttgtcttccattttctcaaccacgtaataatgaccaagagcgaaccaacacacgtgtgttttagcgttcccccttttttgctacgttcaaaatgggctggatccggcccaatcacctctaggcccaccaacgatgataacatcccaatcgatttcgtacacgtggctaggcaattcgtttagccctaatttacaatcggagaagagtaaattctgaaccggacggcactcgttcttgatctgatccctcgccgtggcgatcagatctccgatctcgctcgttttcgtcgtgtattgaacatcgtaagagtcggatggagttgttcgtagaaacgattctcgtcgatgaagactgtacggccgttgtgatttagggctaattaattcctggagaagagtttcatgtgaggagatgaaccttttctgagaacatggacgatcggtttcagctcgctaaacgacgtcttgaaagtgtcgtttgatcttccttgcttgagaatgatacgattgcgagaagccatacgtacggttcgaacgagctagctttgggttactactgttatttttctgtcttcttcttcttttttcttttttaaataactgttattaaattacgtaaactaaactaaaattaaattattattattattattatttttgacaataaaactta

SEQ ID NO: 14188 - DNA, 17655 bp, Cannabis sativa
tggcttccattgttgaaagttacgagcttttttctctgaaacgattgttagggttttggagggaaattcaattttgttttgatttggtttttgaaatttgatgcagatgcaaatttatataggggaaaggggactgccacgctggcaatccgcgacgtttcatttcgacgaatgggattaaaggctttaatccaattagatagattatttaggttgcagaaatgagaagatggtggcacgtgactttcccgtgcggatttaaatttttttttttttcgttaaaaaaaaaaagcgatttaaattgcatcaaggatcattgtgttataaaactaacttttgttgaaaaaagatattaaggccctgtttggaaggtgacaagcaaattgtaattaagtataattgaggtaattatacaattttttttttgtttatttgatcacgtaattaaattataattatgtaattagagaaaattgagaggtatcaattacattctctaattctcatgttttattataatttagtgtaataacttaaaatattttattttaaatattaagtattaaaaattattattattaactattttgttaagacattaaaaattcataaataatcatcatcttatatctaaacatatctttttattttaaaataagtgtaattacttctaaatgcactttaattttttttttaaaaaaaaaaaaagtaaaattggaaaatacaaagatacaaagaatttttttttttttttgaacaatgatttttcatggaagataattataatgagctttcatataagataacattaaagatttaccactttaattcctttcactatattgccacatattataattttcaagaacataggcttaaaaaacaatagttaatgataatgatttcaagatggaaaactaaaagagtaataacaatctaacttaacctagtgaaaagttcaaccgattcaaatatatagtgtagaaaacatgattttatgaggtttacttcaaaaatagttttatgattgaatcatacatgtgactataatggtctttatatcaacataaaaataataattatactacccgatcgaaattaattcttttacattagtcccttccgaagtttattttctacctctgccactgcagaatcccacatgaatttctaatcctttgaaagagaacaagttttaacgacatcagtagtagaaagaaatgacagtatatgtagaatgagtgtattaggtaatttcgaaattctgtattcattatcgaagtcttccaccatggatgttgttgtaactctttcttcagccataaattattgacctatcaaataccaataccaaccaacaacacaaagaacgaagaacaaagaaagaaaaagaatgttcctcaattgaaaaatatattaaatgattagaaaatccaatgaattacagatacaacatatagtaaaaaaataataatgataataaaaacctagaatcgttcctacttacttaaaaattattaagggcttgtttggtttggattttgggtaagctaaaatcaactttttaaataagctgtatggaaaagctaggtttaatgaagttttagcttttagaatttggtttcccttttaataaatattttaaaaagtcaaaattatccatatttaattattaaatttcccaatataaccctatttaacctttttcgttttcttttttttttgagaaaaaacctgttattattaaaattgaatgtctctaataacaacagataagattggggagggtatttccccaaaccaacaaacatcttcatccaatcgaagagcaaatttagctaaatcatgggctgcttgattagcgtctcttttaacatgagagacctttgctctaggaaaataggataaaagattacaaatatcagataccaaatcatgaaacgtggttacataactagtagatgacataacattaacagcagaagctaccaacatagaatcagtttcaatgaaatgaactggaatttgatgttgaatagcccatctcaaactgtgaaaaagtgatgctgcttccatctccttcggtgagaaacaccctttgaatggcattgaaaaaccagcaagaacttcacctttagaatcacgaataacagctccgaatcccagtttgtttccttgagaatcacaagccgcatcacagtttaatttattgtatccctccattggtggttgccaaattgatgaaggtctcacgggaatagaaggctgctgaacagaagcatcaacaaggtttgcagaagaaacagcagcagtattccgtggtgaattcgctttgtgatattgatccaaatatgcaaccgcaaaattacatatcatagcagctggtttaggctttgttccatggttctccttattgcgttcagaccaaatgctccacataagacatataatcatagtcaaatcaacatcagaatgtaaagctgccagattggaaaaaatatcaaaacctttaatatttgctatgttcggcaagaacacattataattaaactttctccaaacagctttggcacgatcacagcgaaaaatagcatgaccaacagattcccatccacatttacaaagagaacactctgttgaagttataatcttcctgtgggcaagattcacagcagtgggcagtgcattattaatgaagcgccaaacaaaaattttaactttctttggcacatgtaaattccagatccggttccaccatttcctatgtgatgaggaggaagattgatcatccatagagtccaaattaacagctaaatgatactcagatttcacagtataaagacccgtatttgaatgatgccatataagcttatcctcctttggaaaagggctaagaggaatagatagaaccctatcaatgtcaacagcaccaaaatgttgttctaagagatgtgtgtcccattgccgatcttcagaaatataatgttgcactgtaaaaaaaggatctcccccataaacataaggggtgaaggtagtgtttcccgggagccaaggatctgaagcacacctaacctttgtaccattcccaatcttccatcttaatcctttaacaagcaaatctttgccatcatatatgctttgccacgtaagagaaggcatagtacctttctttgctaaaagaaaatccccatttttaaaatatctggctttgagaacctgtgccaaaagagagtctggtgcatccaaaattctccaagcttgtttcgccaaaagagcctggttgaaatgaatgaaagagcgaaaccccataccaccatcagctttagaagaacacatgtatttccattttttccaatggatcttagaattgttggtattagagccccaccaaaaattagccatcatagactctaactgattacaaaacttcttagggaggctaaaacagtcatagcatatgcaggaatagatttaacaacagccttaagaagtacctcacgtcccccaatagaaaaaagcttagcttgccattgattcataagtttccaaatacgatctttgatgttgctaaaaagctcttttttatctttgccagcatagaaagggagacccaaatatttctcatgaagatcacaaatcggcatgttcaacacactatgaaaacgatcttttattccttgagaagcatttggggagaacgacatgacagttttctcagtatttagaagttgtccggatgctcgatggtaaatctggagtgatcttttaatggcttggcacgagtcttcagttgcttgacaaaatagtaagctatcgtctgcaaaaatgaggtgagaaattgttggggcatttcgggcaatggacaagcctttaagcctacccaaagactcttcatgctttaaaagtgctgaaagcccttccgaacaaatgaggaataaatatggcgacaaaggatctccctgacgaaggcctcttttcggaataacagcccctttgatagctccattaatgttaaaagagagtgtcgcagatgtaacacatttcaacacaaggtttacccagttaaaatgaaaacccatcttgatcataacctcataaagaaaatgccattccactcggtcaaaagctttactcatatctaatttaagagctgaaaaccccatgcttcctcgctttttatttttgaggcagtgaacaagttcaaaagcaagcaacacattatcagtaatcagcctatttgggagaaaagcactttggttcggagagatcacatgaggtaaagcatctttaaatcttgcagcaatagcttttgtgaccaacttataaagagtagtacataaactgattggccgaaagtcacttacaaggtgaggttgatcaatttttggaattagagtaatcagagtcgtagcaatagtgtccatatcctcaccatcattcaaaattcgtaaggtactctaagtgacaagaggccctacaatatcccaatgctgctggaagaacattgcagacataccgtcgattccgggagatttttcaggtgccatagctttcagggcagattcaacttcaagaggagtaaaaggctgaagcaacatttgattgatatccggagtaatagccgtatgaatcgttgagagaacataatccagagcctcttcatcaacattgttcgaagaaaaaagcattgagaaataatcaacaacctctgcactaatttcctcatctgtgtgaacaaagccaccattcctagcttgtaactttgtaatcttattaatcgaatttctggttttagcccttgaatgaaaaaacttagtatttgaatccccactttggagccaatcaattcgagcacgttgatgccaatatagttcctccttttctagcagatcatctaatattttgtcagcttgttccatcctgtgaatatgatcagatgtagtagcatgactgttatgaagttgagctgagatcttgtgtgcatcggaaatgtcacggcccattttaccatatttctgcacatgccaattttgaagagcatcagaacagtctgcaatattatgcagcagcaaagccatgggattagtttgaccattttgttgccacttctcttgaattaaacttctacattcagaatctttgagccaaaattgttcaaaccgaaatcttgacttcctcttagaagaagatgcagtaaaagttgtaggagacacaacataggcaatagctcgatgatccgaatgatagaagtctaagtgcgcaaggatattttcaataaaaaaatctgaccactgagcattaataaaacctctatccaaacgctccttaacaacattgccattgtgatttttgtttgtccaagtgaaagtatctccctggaaaggaataacattcagtttacaaaagtcaatggactttctgaaattttccataagcatatcaggtctaggaggaccccccattttatcatcattagacagcagttcattaaagtcaccaaggacaagccaaggaagattgggatcctgaggcataaggctattaagcagattccaagtattgatccgtaaatgggattcaggtgctccatagaaagcagtaaataaaaattgatggcaattatctgacgaaactaaaacatcaaagtgattcattgaatatgaattaagagttacatcaagatttgccttccacaagagcatcaatccacctttcaaacccaccctaggaacttcaagaccatgactaaacttaagagacaaacgaaaacgatcaatagaattacatttgagctttgtttccataataaaaagtaaatcaggagactgttctttaagtaacagtttcaagtgcctgaatgccgaagggtttcccaatctcctggcattccaacttattattttcatggctgatggcggggttgctgtgaaacaacctccgctgaaaaagatgaatgcccttcaacaaaatctgcaggcttatcagaaaattgttgaataggggtatcatcaccataagaaaactccttgctattgccacgacatcttttaagcatacttcgaaaattctctggattcacttgtcgtttgaacgacttgctgaaagcagggacatcatcactagtctcctcaataataacagattttcctttgtgcttgcctaccccagtagtggttgtagcagcctcagtaacaggggagatagaggatgggtgagagctttgggtagactgtgggtcctttagaagtgaaggtggtatttgtggtatatcagcagagaagatggtggggttatacgaagggaaaggaagaggcatttcaggacatttatcaggtaaagtggtaactggtttttcagtagaggaagactcagcaatggtaaggggttgagggtggggtttaataccagtggtgaaattactgttagattgaagagcacgaattgaggagaccatagttttccgagttaaccgagtaataaaaggataagcattggtcttggaaaaatccattcggtatcgctcaaaaccagaacttggaagctttgcccccatcagttgaggaccatattcaagatcaggatcaatcccagcatgcaccttttccataaacgatagacacttttcaaaagggtgccccaatttgccacaacaaaagcaaaacacaggaaaattctcatagcgaaattccaaccagtattcatccttcacacaaggcagagaaaccattttaccacgcataagaggctgattgacatcaatcctaacccgagttctcagaaaagaaccccaaccctcatgtaaagattcttcatgaacatcaacaaattctccaatccattccccaactttcttagccagagcccttgatttacttaagaaagggagacggtgagtttgaacccaaaactgaacatggctaagatcctccttagtaacattttggagagaagaaggcagatgtaataggatcaattggttgaaaaaatgccatggttcaccagaaagaatccttcgttgatcacctacacaagccaaagtgaaaagaaagagatcagaatgcatctcagaaacaataacttcaaaacgacatttgttactccaaaattcgcccatctttttgataaaagtttttggattaactaagtcagccaaacaacgtgcaaccagaaaaaattttggtgtttggttggggctagataaatcagactcgtcaagagagtgaacaactctctctttttcagacaaacaaagagttgaattcatattgttcagaattgattccatatgagtatacgattgagagaaggaaaacagaaatcgcagaaataaatcgtaaagattattctgctttatatatatagaattaaaacagaagatggagatcgtggaagaggacttagcatataatggaggtcgaaaatagtgaagatgtgggcggttagtctagattgcactatcattattttctttctctcttactgcaattttaaatttgttggtttagtaaataaattataaaatttatcatatctatataaattatatttatatgagtgattatacttttattgtaattatgatggttacattcttgttgacttgtaataatatgttaccaaaatataaaaatttatttttttaaaaattaaattaactataattaaccatttgcttaaaataattaatttttaatttaaatatttaacaactttctatgtcaataagtgaatgccatgaaacttcttggtctgccaacatacacattaagggataaaaagcagatatttagtggtgtcaatgaaaagatttggaaactgatgcatacctagaatgaaaaatttttctcaacaggggtaaagaagttctttagaaaatagtggtgcaatattctcacttatgctatgaattattttagacttacatccaccttttgtaagcaacttaaatctataatgacaaatttctggtggggatccaatgcgaaaggctctaaaatacattggcggaattagaatttactttgtaaaacaaaaattgagggtggaatggggtttcactcttttgtgcattctaatcaagctttgatagcaaaacaagctcgaaggattctgcaaacaccaaactctttgcttagtagggtgttgaaaagttgctatttctcaaataatactttcttgaatcgcaatcggggcactcaccttctatgacatggcaaggaattctatggggccaagaattattaattgatgatcttttttggaagattggatatggcagaatggttagaagtggtttagatccgtgaattcctagccacaaatctttctacccactgtgctatttagggccttctaatagtgtggtggtaaacctaattacggaagaacgtcaatggaatatatctttgctgaagcaatagttctctccattggatgttgaaagaattttaacactgcccttaagtttttttcctagtggagattctcttatttggcactaccttcactcggggttgtacacagttaagttaggatatcatttggccgtaaagttgttgttgatacttctccctccacctcaccagcctcatggtggaactatttttggtcgttacagctgccacagaaggttaagatttttgcttggcgagttttccatgatgctcttccagttgccacttctttgtttcggtggaaagtaattccacttgctccctcagtaatcgagcttgtttggctgcaagaatgcgcgtactgtttggcatttttctgattttgtgtttgatattggcaccatgctcgttcaatgaaacagggagattaccttgtgcatctctcaaacatgtacaaaagctgatatggagctcattatctgtactatgtggtcgatatggtttaagcaaaataaagtacgacatgggaggggggttgcaaaaccagccaaggtggtgtctttttttgccacaaattacttgtagaacttttgaacagcccgagccaaatatcaactggatgcccctgcagctcaacgactcccacaaccagtccaagcatctattccatggagtcctcttgcttcgggagagttaaaatttaaatgcggatgtggcttgtgataccagtagaaatatcattagtgttggagcagttattcgagatgctcaacgtggtgtaattactgcctttttaaagcccattatagaaatttttccatagcacgagatggaggcaaaagctatctttcacatcttgaactgacttttcacaaatgcaacaaccaattgcacaagttgagactgatactctgatggtttcaaacactttgaatgcaccttcttctacaatttcttcttataataatttaattgtggatatttcaatgtaaaacacttaattaatatggttgctcatagtttgactcgatatgctctagaatttgataaaacttacttttggttgaagaatttacctccaccgatatactatgttattgtaaatgacttatccttttaatttatatagcaaagtatttctctaaaaaaaaagtttgaattaaaataaaataaaagaacctacccccatattcctaatcgtaacagattcactgtaagagatccaaacccaaaagaacaaacctcatcccaccattccaacaaacccagtcgaccccttccctcccattgtcactggtaagaacaggtcccaaactagcaaaagactcaactttgagattttttattttttattttaattcattaaagatatattaggaatattaactcaggtttaagtttaattttttacttttacaattttaaacaaactgggaaatagggttttacacgagtattatttttcacacctaaaagaataatagccatgagtaaggtaaaacaaaatgttagttgaaaaaaataaatatatttaagtgtataaaattaaaaatatatattttttatgccgtaaatttttcataaaaatatatgaaaaaaaatcccataaaaatgattttttatttaaaaatatcatataaattttattaaaaagacacaaaaaaaaaaaaaaattctcgtattttgtgtaattttttataacacaatatatatattttttaagaatatgatattgtattaaaaaaaaaaaatctagagcagggttacatatataagacgaggaatttctttaaagaaatttatcttttaactaaaaagcatcttaaaccaattcatgaaaaattaaagattaatttgtaaaaaagaatacgttataaattaaaaattatttaaataatttattgaaaaaatcaatgggaataataatgggtaacgttatgtaaaatatcaaagttattcatagtaaacatactcaaattgtattttatttgtgtttatctagtgtgactgtgaaaatatatatagtatcttaaaagatattttccatttataaggaaaaaataaaaagagaatttcaaagaagaaaaatcttatttattatacctatatatttcacgtttaaaattcttaatctattctgtatcctactataactagaattcatttattattatatagatttgcatttaataaatatttgtttttccataatatcaatttaatgtgatagaaacacaaaaacaagctctgcattggaatataatcactgtattataattaaccatgtcgggatcttcacgacgtccgcgactatttcgaaggcattcgagtcgagaaattatgaataatttggcctcagtttcaagtagtttcttacctgctttcggaactatagtcgatgaaactcatcacttacatctcaaaaaatttgttattgctccttatgatagacgatacaggtattgtattgtattgtattatatgttttcttttttattgataaattttgatttaattgaaaaattggcagatggtggcaaacgtttctagtagtattggtgatatactctgcatgggcgtctccatttgagttggcttttaagaaagtgtcaatgggacctctcttacctcttgatttgattgttgatgcattctttgctattgacattattttgactttttttgtgtcttacttggacaaaactacctatcttttagtggttgatcacaagaagattgctatgaggtaatattacactcaattctaattacataagcgttttcgaaacatgcctgtattgtttaattataataaatgagatttgatattgaataaagatggttttgagacttttgaaaaggtatttttgaattttgtttgaatggtaactagttaattaatttcaggtatgtaaccaaaatgttatttcctatggatgtggcctcaactctaccttttcagctcatacacagagtcgttactggtaaagtccactccggtgaggcatttcggtttctcagtttgcttaggttatggcgactcaggcgtgttagtcaactcttcaaaaggtgctctccattcatctttcaattttttaagcaattttactactcataattgtgtggaaatattatactaatattacatttcgacttcaattaactcagattagagaaagacacgcgctttagttacttcataacaagatgttgcaagctaatctgcgtaagttttgaacactatcctgattgattagtacaatttagtatcgagtctcatcttatatatgtttgttatgttgtttgtaaaaaataggcaacactattctcagtgcactcagcagggtgcttctacttctggctggcaactcgccacaaaaacccggaaaacacatggataggaagccaagtaccggatttcgagcaaaggacaatcaaattaggctacacatactccatctattgggcagttgtgacactcacaaccgtagggtacggtgacctccacgcagtcaatccaagcgaaaaggctttcactttgttctatatgctcttcaacattggcctaacagcctatgtcattggtaacatgaccaatttgattgtacacaatgctatcagaacatttgctgtggtaactaactaactaactaaactcaatttcttccaacaatgtcataactacaaatcgaaaatgatttgttattgttttttttgtctagagagattctatcaatgaaatattgaggtatggtagcaaaaacagactcccagagggactaaaagatcaaatgttggcacacttgcaactcaaatccaaaacagttgaattacaacaagaagaagtgattgcaaatttgcctaaagcaataagatcaagcatatctcaacatctattttatcccactattgaaaagacatatatcttaaggggagtctctcaagatttcattgctcaaatggtaaaataacaaaacaaaacacctcatttttattttgttacactacatattattacattaccaatttttgtttttttttttttgacaggtttcagagataaaagcagaatattttccacctaaggttgatataattttacaaaatgagattccaacagatttctacattttggtttctggattagtggtacagttttcttttctatatttatttagtattgtgtttcatcgacatacatatttgataccttgtgtttttaataatgctcatttggtacttttattttaaaattgtatatattttataccctaaattcaaatttaattagtaaaattttatcaatttgatcaaacaattttcagttatatgtaattaaaaattcataaaattaaagagagtttgatcgtatccataagatttcattaatcaaatttgagttggtactaaatttgtaccgaatgtatagacaccctaaaaataataacaattgttgttatgaaaacttgcaggaggtgctagtttacaaaaatggaactgaacaggtaacattttttgtcacttattctaaatttgcatatcatatcatgtcatcatgactgaatctgaatctgatgttgtttttttttttttttggttttgttagcttttgtcaaggctaggatcttcagacatggccggagaaatcgctgtacttcttaacattccgcaaccttttacattaagaacaaggaagctttctcaggtcatcagaattagtcatgatcatttcaagcaattagtaaagccaaatagtcaagatggaaacattttactctccaacttcattcaggttagtaattaattcttaattatttttcattgttttccctaatccaaatcgaatctaaaagaaaagccatgtagaaattgtgtaccctaagaattattttcgtcgcaattttaatattgtgatccataaattagttaaactagaggatgattttttttttttatgtatccatctaatttgtcaatcttgttaaaaatgatattcttgattagattaagttttgactaagtgtgactaattcaattgtcagtatttgaagagcttaaaacaagagattgtacaagaaataccttgtcttccagaattattgagtgacctagctactattacagaggtacaatattatttattcttgccaaatataaataattacttttctttatcatatagacatatttcattcttatattaaaaaaaaattgctatacagtaatgctttgtaaaatgtacaaattatacttatatgatttgcacatcatatattttatttttaaatatttttaccaactatgattaactttttgtgtccataaaaatatttataaatataccctatgcattggtatttttgtaatactttatagattaattacgaaaaaaatcccaaaagaaaattgtaaaaattaccattgtagtggacaatatatctccattttaatagtttttccaaattaattaattagatatttgatatgattgtgctaaatgaggattaaattttataatttgcaggccacagacttgaatgaggatccacaaaatcaagaatctgtagatggaaatacaagggtaatagaagaaggtaataaagtctagatctttttttttttttttttcagttaatgtattaaatattttgatagatttcataaatttttctgatataatttgcagatgtgggtggaaattgttgtccatggtgtaatgtgagagttattatccatggaaatagtcctaaccaaaatacaacaaaagggaaacttgtatatttacctcccaccattgaagatctttaccgtttggcaggtaaatataggctaaataatttttatttttatggatttttacttttggtaaaaattacaaaattatgattttttttaagagaaaaattaaagaaaaaaaagttaaaaaatacgtgaaaaacaatttaggtagctagacctctttagtgtaattagttaccgtacaatgcatcccactaaaatgagtgtattgatataactcctaattgtttcgaaattttaactctaatttttttatagttgtgtacattatagttatttaagacattttgtgaaattttgagaaattcaaaataatttataatataaaatttaatgttcaaactatctatttcacacacgtataaaataaaaaagtcacacgtgcaataaattctttgaaccttgttttcgacatgttaaatttttctaaatttctcaaaattttacccgatgtcttaaataattataacgtatacgaccataaaaatattagactaattttttttagatgccgaaacaaataaggatgcatcgatgtacctatttcaagatagtgtattgtagaattttcttattgttttttcgtattttttttaacttttttctgaatttttttctataaaataacttttaaactatttttgcacaaattgtataaaactcacaaaatgtgtaatttttacaaaataaaatagtatttttcaaaggacttttctgcaaaggagaaaaaaaaaaccatttttataaaatgtagggttaactttgcagttagaccaaccaattaacactgaagaccttttttttctttcttaatgatctcaatttaacaatgtgacatcttataaattttcttctaaggaaaatatatacttaaattaataatggattatatttgttgatgatgttttgtagagaacaagtttggaaaacgaccaaacatgattgtgattggtgatgactcagaggttgaagaattgaatgctttaagagacaatgatcatctttatcttatcttttgagcaaacattattttttttatacaaattttttgcacatttgtacaaaaatttacaagtcgcaaattttagtgtgtgtgtgtatgtagtagtacttctaaactacatgttttgatagagaattagtaaagagtacaaatggtgcttaatattagctagaatgagatatatattattatttgtgtaattttttttattaaagtagtaaataaatttatttttttttttattattttttttgttgggataactgataaatgttaaaataacaaaagttacacagtaggtggggagatttctttaatccaagaaattattgtctatcctaaaagcatgcttagccaatttatgaccctcaacattaaagatgccccaagaaaactagacaatagaactttaatatcagaaaagataacccgtagttcattgaaatacactgtttgaccctgctgagaccaaaaaaagtgaatcagaaaaaaccctctacacgagaagtcccacatctcatagcgtctatagtagatctataagtactaattcaacaatcgataacaacaaaagttgtataacattataactccaataatcaataactcacacaagaaccaaactatagttcaccaaaactataatcacaaaaacaaaagctattgttaatatcataatcatcaataattatttcactatttcccttaaccattaacaaaacaactaaaaatttataaacactgccgtctatttcaaaaacaaaagcctcttagtgcctctagacagtagagtgggggacgagtggacgacctaacagcagctggggtcgggtaaaggccagcaaagcaacaaagaaggccgagtaggaacataaaaaatattagctaaagacatgtataatataatttatcatgaacgggtaaaaagaatataatttttttatgagactaatcatataaaaataatagaaataagtaattcgaaaacttatttgtgatttgcaactcctttgtgtaaataaattcttctagttccaaattttaattaatttataaatactcaaatgacctaacataacacaacaacaaaacagagaaaattggatatcgccataaattctccttggtaggaatgtgcagaattgatccaatccaattcaaccgaccgataaaattggatatccaatcatgatttgattggatcggatgatatttttgaaaatccaatattggatcggtcggttcttggatgacatgtaaatcaaatagatccaaccgaccaatccaatccaacaatcatccaatattaaaataaaaaatatatattataaatttataatattaaatatattatattttattacatatataaaaaacatttaaaaaaaagcaacgtattctctctctcaactcattctttgaagtcggctgctcactgcccagagaggtggacgacgatggtgactcactgcccagtgatttgatgacgacagagacgacaacatcttctcccctactcgctgacgacgacggccatctcctccctaagtcgccgacggcatcttcaccaacaacagaagcgacacagctcctccctccccaacgacaatgcaactcctccctccgcaacgacaacacatcttctccctcgcaaacgatagcaactcagttactcaagtcttttaactttctcttattttttatttttcatagttaaacttagaagtaacccaaatgaacattttaattaatttggagttagcaaagttaggcagatggtgacaccttaagaaacttttaattaacagttagatttttgttctaataccctgctgattttttgtttttgttcttttattagtatttaattttttatacatacatatgcctttgctcaattgaatgaatatgaattgtgtatgcgtgtacctatttttaattgagtttttgatccattttaggatttgtttggtaaaatgaagagagttatgatatgagagtgtttttcatttgttgtgttgatatagaatagaagaagatgtgttgaaatccaatcagaaaagtttgtcttgtgtcacagtgagtttttaatataattgcatgatatatatatatatatatctaatgtagggtatacccggtactacctgtatgtggacacaaaataaatatataatatgtgtgtgtgaatggaccaattggaaccttttcccattattctcaaacatggaaacaatcaacaaagaaaagagataaaacacctagtggaatggaagatagtgataatatatgtatttatagaaacaacatctaaaggttataggttaaaattggatttaaaatgaaatagatatccttaatatgtttacacaattattatgaaactttttttttttttttttgaataaaggcgtttttataattaaaataaaaatcagatctcatggtcattacaaagga

SEQ ID NO: 14189 - DNA, 8238 bp, Cannabis sativa
  modified_base (1218)..(1221): a, c, t, g, unknown or other
  modified_base (7690)..(7696): a, c, t, g, unknown or other
tgcttgtagataactacgatcacaaataaatctgcttgtagataactacaatcacaaataaaccttctcatagataactatgctcgtagataactatgctagtagataactgtgctcatagataaatctactcatagataactctacacgaagaaaactcaatctacttgaagatgacccaatatgtttactcagagaagaaatgaagatactttatagtgaacaactcgtagtacttggcaagatgaacctcaacacaacgaatttctcttcgcaagggggcatgcccaaatatcaccaattaaagtggttacaattgaagaagaaaacttctaaattggtcgcaactagaaaaagaagatagctttaaattttattatatatatgaaaaaaccatatcatgatgaaacttttcatataaaactttaaaaatacatataaactagtatcaaatcaacttggtccagaacataaaaagttaaactagttacatatataaaaaaagttacaaaatgtgaaagttaaacgaccatatgtattacaaattacttattaattttaagtattactttgagctcattatgcttaaaagtttaaataagcatatctatagtacatactcccaatgcatctggtcgtagtatatactcctatgcatttggtcgtagtacatactcccaatgcatctgggtcgtcgtagtacatactctatgcatttggtcgtagtacagactcccaatacatctagtcgtagtacatatactcccatgcatctggtcgtagtacatacttcccatgtatctggtcgtagtacatactctcatgcatgtggtcgtagtacatattccacatgcatctggttgtagtacagactccccatgcttctggtcgtagtacatactcccaatgcatatggtcttagtatatactctcatggatctggttgtagtacatactcctaagcatctggtcggattacacattcccatgcatctggtcgtagtacacactttcatgcatctggtcgtagtacatactcacatgcttcaggttgtagcacctactctgccatgcatagatcatgagaaacacaaacgagttgcttgagcctcctttcctccaccaccgaacctcctcatctactaaaaacttaatccaacaactcccaaatctcacctacccaatttaaatctctctcttcctcctcctcgacttctnnnnaccaccatcgccattcgccaccgcccacctattcctcccccaaccagaagctcattgaattcgtatttgtttgagacattagatggtggtagagggtatggttttttggccaaaatgtgattctcgatggattattgatactttatcgatggttttgtctgcggactgctatttttgtatacaatcattgataacttattgacaacctatcgataaatgtcatcgatatactatcgataacctatcgataaatgtcaaattgaaaaaattatattacataaacataaatcattgataaaatatcgataacccacaacagtcacgttttggctagaaaacatcataaccacaaccattgaaggtttgaaacaaacacaaatccaataaaaaacaaataaagacgaagatgaagatagagacagaggttcaaggcctctaggttttttgacgcttgagtgctatggatgtccgatcggtcttgggcctctgggtttcgtctaggtttttgggagatgaggaggttcggcggtagaggaaaggaagttcgatggtggtggttggtggtctcggtgcctgggtctagttggtctcggtgctgcgaggaagaggaagagagagtacgaaagagaaagagacaaagagagaaggaaaataaagggagcatattttgggtagaaattgaaaacaatagcatttaattatataaattaattagtaggtctaaattttattaaatagtattcttttaagcatttaaaatgaaatttctcttttaatattatgtgcattatttttaattttaaaattaattctcattaataattttttgaaatgaggccttaagcggtaagaggttaagacgccacttcactcatctcaaagaccttgctcaatggaatcctaatacatgagatttttggtggtgagatacttatgcggttatgccacatcagtgtaaaacgtgagataacatctcatattctttacatgtatataactcttttttaaaatatagagttaaataaatggaatacaaatactcatattagtgcaaataactaaatttacccaaagtataacaaataaaaattctaaattagaacaagtaatttttatggaatctaaaataagtacccaaaatattgaaatccatgacaatgatcttatcttatttcatctaatctcactctaataaatatttaaataaaagaaggaagagaagtatagaaggtacactagtaaaacactacatactactactactataaaaacagctgaaatttcgtgtaagaaaagaataatagatgttttttttttttgtttttgtttagtctttggagtcaaaaagaaaaaagtcaacctaaaattttcagttccttattggcgggaaaggttttctgatcctaagcaacacatcctccgtacacctacttgaatataatctcatataatgtggggcccattttttccgcacttagatgttgttttgattcaatatataaaactcagtgatcacacgtcatcactttctcacgtgaccattgattaaatgtcaacatcttattggccacagataataattatgtctcactgacactgctcctcccaaaccacgcttcatatcacgccacgtgtaacgttacacaaaactagtaaaacagctgattctttctcactcgagaaacgcttcaaaatttaaaagaagggggtagaaacgtaatttcacacctatacactctactatgtccgaatccttatttaggagtacttatccacgtcatcgatccgcgtgatgatggataaaacactgttgttaccgttggattagtaaccagagtcgtattccccaaccgtttgatcaacactctcatcatcttccttttatttattttattttattttttcgatccgatccacaacgaaaccccattttaaaaaccttcacaactttacctattgtctctccaaaaccaccattttctctctctatcatttcacttaactttctctctctagaattttctcactgaaaaaaggaaaacaatactcattttctcgagaaacaaacaacagtcatggcaactgaaaactcaaataaccctcctcaacctccgccacaatcaccatctcctcttccacagtactcagaggtaaacaacaactaacaattttctttcttctctctgtaatttctttattttaaattaatttttttttcatattcatgcagatgataattgcagcgatcgaggttttgaacgaagccaatggctcaaacaaatcagctatctcaaaacaaatcgaatcaacttacggcaatttaccatcagctcacactactctcttagctcatcatctgaaccgcatgagacaaagtggcgaactcgttctgatcaagaacaactacatgaaacctgatccaaacgcgccaccaaagagaggcagaggccgtccacccaagccaaaaacacctctaccacctggatccgtggtttcaccaccaagaccacgaggaagaccaccaaaacctagagatcctttcgctccaccatcaacaccgaaggcaaagactcctagctcaggcagaccacgaggaagaccaccaaagaaagccaaaacatctccgattctgaacactggcgtggccgtcggcggtgagtcgagaggtaggggaagacctccgaaggtgaagccagctgttgcagccgttggttgttgagcttagagaaaaatttagagtaaagatgagtgaagaagagaagaagagactgatttgttaggctataatttagttttattatgctaatttttatttttatgtttttttttttaatttttagtttttgtctcatccttatccttattttttttttttttattttaattttaattaatttggaaattaatataaattagtggtgttatgtgtattaggtgggtgggtggtgagtgttttgtgttgttgggtttggagggttttgttattctgtgactttgtaattgtgatgtaaattgtttcagctttggctctttaggcttttgctttttcttctcattctcaccaattattccaaaaatttacaaattcagactattcattctcattattattattattagtattataattacttttttttttttttttatttataactacattgtcattttttatcaaatgggtttatgaaaaaaaaaataataaatgggtattttgttgtttaatcttcttggtgttaattaggaattttttatgagtgttttgttatgaaattggtaattttactctcaaaaattagttatcttttgtaatgtttagggaaaattgataatattttgtaacgtttattattgatctgattttatttaagtttcttttgtaaattaatttgctgttaaaattgtatgatttttttttttgaaaaacaaatatgtggaaagaaaaaacagtaatgataagtatattaattagtttagaatgaaatagagcaagggtcaaagatgaatggaagtttcattttactaatgctgaaagtttaagaaaaatattttaacaatgataatagtgtttgtttttttaactttaaagaagaaattatttatttattaaataaaaaatggtatttttccttttgtttttctaattttattaaagtgtaaagaacaaaatatttgtttattgaaatatgctaataaagaattgtttgcactttgagctgaagttattcttgggctttaaataaacacattatttatcttagcttgtttgtgctggaaagtatctattggtttggttggttgtttggttttatttttattttttaattttttaggacattataaatatattaaggatatattagttggattaataatatatatatatatatatatatatttttacaatgcacctttatcgctcttatatttgagagaattttttagttcgttttttttgtatagttgtctgtgttataattatttaaaatattttgtaaaattttaaaaaattaagataaatttaacacgtcaaaaatataaaataagtctcgcgtacaatagaatatttgaactttattttcgagttgttaaatttttttaaatctctcaaatttttacaagttatattaaatgatgccaaaaaattagaccaaaatattctttcagatactgaaacagatagaaagtgcatcgataaaactttttagagtattcgaagcaccaaatatgtatatatttaaaattataccgcttatggccttgtcttttaatctgtaacattatttaattgttttactatgatatatttattttatttgaagaaatttactatgatattttagttgaaagcatgatgaagttgtccatttgtctaatgttatcaatttataatgttaagtaacatcaattattgtcaattgtcaaaatttcatgtccaatgtatgtttagtgaaataaagttcttccatattaaatttttaaaatgatgatagttgattacgttggagctcataaatattataaaatttagttgtaggttgagtttaattttttaaaataaatgtacggtatatattttatttgttattattttatttaaatcaacatgttagattttattataataattattatatgtaaaaattagagataaaaaaacaaaataaatacattttaatttctctttaacttttacattttaaatttttattatagtttaaacaataaataaataaatattaattatatagtatgctccaaatcttttgaagtttttgtgtgttattgctgaaattatatacataattaattaatgggataatttcgataataatgcatacgataatatatacttttatatgatgataaatgattatatattttttaagtttttctctttccttttatatatattgaaaagaaaattagttaacaaagcattatatgttaattttactaaatacaaacaaatacaatctcttttgttaaggacatgttacctcctattttgggatgaaaattaagtttttataattacaaaatgacatagatatattttaagaaaggaaaaaaaatcttctcgtaatattgcaatatataaatatctttttgtaattttatatgattttttaaatattataatatagcaatatttacacactaattatactaatttacaatagttaataaatatatttttttcttgaataataatataacttaccgatgatcatagtgttttataaattactatgtaatataaatccctatttttacagtttaacaaattgtaggaaatgtctcttataatctaatcaagatacaaatatggaattttttattagtaaataattttacaaaaaaagttattactaaaacaattttgtgtagtctatgatcgcaaaaggactagaagctgcataaagtaaattaagtgaaattattttacaaattttaatattttatattattagcttaaaaaattacaatacaaatacatgattaattacagatatatttcacaatatattatgtatatataactatatatagcataatataatcaaatttggtcactcatgtatgttctatgttgtactggttcaacttaattagattaataatatatagaatttaattcatgtcatcatgcactatgaatgtacttaattcatgtaatagatcatgtttaactatctcttatatcatttgttatttgttcttcttaatatataatatgtaattttcttttttaatttcataatatgtagtttttttttcttttttttttaatttttattatcgttacttttaagaaaaaatacgtttcattaataaataaaatcaactgttacagacgaccaaacaaaaacataatcaattcataaaccgaaagtaatatagtaacaaaaaataacgtacaaatataaagaccgaccattccatttgtaactccctaagtaaaacgacaaacaccaccacctacaacaatcaacacatacgacaaagacaaaaacgaaactaaaagtctaaaatgctcatcgaatcgagtctttgaaaccgaaaccaccatcacgaaagaatcacactccacaattcgataataacaatgggaaacgaactagtcaccaatatcactttaattaccgaaataacattattaacatctcgaattacactcaaatttatttttttttaatttttatttaaaaaacattgtaattaaatgggtatttaaaaatgaaggaagaatctttacaactgtcatttattatctttattatgaaaaatctatatacgtgtaaaaactttatacatgttgcagtagatgaaagtcatcatattaacgtttttggatgactccattgcaaattccattggaaagctattttttttttcttttgtttttttctttctttaataccaaagcatgggaatctacatcaactttattattattattatttannnnnnnttattttatttttttttgaaaatatatatatataaaaaaaaaggaaaagaaactcattgccttttatatttttgttttgggaatataatggaatttccttactttaacttcaattcttctttaggtactattttcactagttgaaaaagataagagagtggtggtggtgactctttatctatttatttatttattaaatattattattattttattaaatttaaaattaatttatttattactttttaactcagaggtgccatagctcataataatatctcatatagtactcatagctggcatgtcaaataaacaatataaagtattaaatttaagcacaattttttgtattataatatataaagcaataaatatttaaccatttacacatatttccacatttacacatttatgttcttaatttttttaggaaaaaaaagtacaaatttttatttctacattttcatatgtataacttttttattttttttcatatgttgtgtggtgtagttagtagtgcaccaacgatttaaagtgaaaga

SEQ ID NO: 14190 - DNA, 7990 bp, Cannabis sativa
gagggaggaagggaatgtttaaaattatggttgtgaagcgcacatcacactgaggcgctacatttttgcactaaagcatgcgttttcatatgcatcacatggcgcctctaataacactaacggataaaaaaagatcttagtggcctttttttgcccaaaatgatgatatttttattttatttttttgaaactaggatccccatctaacccaacaatatttcgggactaagaaactataacaattgctatgtaggtacccaggaggtactcaaacctcagaccttgtgggagcaaacaacatgcctgaccatttgagctacccaccttgggtaaccaaatgatgttacatcagctaaataactttaaaaagtggaataaaactcaaacaaaatataaaaaagccaacaaaagccctaaaacatattatttcgggttagcacttagcaggcttaaaatagttgagttttatgagacattttatggtacatttgagtttaatgagacaatttatggtatgtttgagttttataaaacattattcatccttgatatctttaggcgctttaaaaatatttttcaattaaatatttgaggcttacgcctcaatgcgccttgaaggcttatgcctcacctcaaaaaaaaacacctcgaggcttaaaagtgttatttcaaacattgagatggggagctaaggcaatcaataagagcctccaaggaacactttatttcttagctaaattgttaaaatagagaacaatttttttaattttgctccaatcatattcttttctttagttaagattgagtattttaatatttttttataaattgaatttgtttattataaattaaattaaataatgaaaaactagtagtgctttttgattaaaatactactaaaaatttggcaaaaaaataggaagctctctacatttagagagctcctaaccattctctattatagggagccactttttttttatggttggagttcattttgttgagacttactccctattttagctaaggagtgtggttagctaatatggtaggagatgctctaacaatatataaataaataaaaaataaaacccaaaaggatggttaatactctcaaaatttgcatgatttgtgaacccctaggcaatgaaatagccagcaatgaactgccatcaattgccaaagaataatacgaaaaaatattctgctataaagattttatttttttatcggcataccttagctccaaaattttctgaaaaatatcagcagcagcactgtaatcacccgccctagcaagaagccttccctgtcaacttgaagtcaaagttcacaagttgataaagatagcaaataaggttgtcgagtatcaaataccagggatagcacatacaagttaaatttttgataatgaaaataattgtagcagaggtatacaaaagaagaaagagaggtgagacaaagacagcagttagagaataagaatccaaataagctaggattgtttaaggacctaaacattgttagacttgtttcaagaataatcaggcttaacactgaaactatcctaataatacaaagacaaaactcttaatcctaaaaacacgaaagatgtgcaatatgtttcacaagatgtaataaccaatattcatgagttcataagtaggtgacaagccaaaaacatcacactgtataaacaaatcttctaaagtacctgtatgcgtaatttatcaacttcaatcattaacagagatcctaaatccccagtaagaatttccaaagcatccccatactttgcttgttgctccaatatagaaatgtataccatcagagctgcactaattccaggtttttagcatataaccaattaacaatagagcagagaaaaacatggtcatggataccttcaggctcatgcaagctatgggatgctacatgcttcttaattaaaccttcagctaaaaccaaaagcttctctcccccatttccacagaacacctaacaaaagtaatcaaaaagaaacaagcaacttgagagcaagtacatatcataattaaacctcgataatatatgatgtggaaacccaatagaaactaacagcagctctatgtgaaaagaaaaaaaaaagtatgccatattaatccattcccactagaatttatcctgacaaaaacaaagttatgttgacatgggacagcacatggattttccaaaaaacaaattaataaaataataataagtattgcataaacaaaatattgcactgaaatatgtatggtaggaccatggggatcaaatatgtcaagcttgcgaagcaggtttggagaatatctacaaatgttgaacgaaaaatgcatacccaaacaacataaataacaacatgtcatgaaacaaaccaaaataaatttataaaccatcaaagaaaagacttctaaaaaattctatggactgtgaccttctcaatgtcatgcataatgatcaacctatgcacgtttctttcaaaaaaaatgcataatgatcaagaaataaatatttccaacagccttggcattcttattcatcatcataagtaccaaaacttatgatcaaagtagtcatcatcaaactcttacgtccaaaattttatatcatcttcgaacatggaatggtggtacaaaaagtagatcaaagtgttcagttgctgtcaacaggtttacacttaactttggacactgctgatttaaaaagcaacctaactgcggatgaaacctcttaaatttgattgattcttaagcatagtgtctatgatctctacacttaggttgtgtttggttaggaatactggaatggaaaagaataattttttccattcctttgtttggttgtaatttaaagtattagaatcgccaataggaatgacttttccaccaatttggtggaatgactattccattttgaaatagaaaaaaagatcatcacaatgcaaggtgaaaaaaaaaatttaatcaattcttttacaatgtttaaattttatttcactctattcatattcctattctcattttcatttctattcttgtgttttcattcctcccaaccaaacataccttagtactaaacttgattaaaaatttacttatttacctacatagtatttaacttcaccacccatgtaactcgttaaagtatccaaaaccatttaagctcatcctccaccataaaggtactcaacaacccgctcttctattgatgccatctatttaggcaccagctataagctcgaaaaggggctctcatgctaaattgatggctcctcggagctagatcagacaaacaatagaagcaaagcactagtatgagattgaatccaaaagtagaaaaagaagttacagggtaattggaaaattgagtggcctagagttccaagaagctcagctccaattctcacactaaaaagtactcacatatccttcaagttcttacttcagataacactctaacacaatgtttaaaattgcattcgtgaggagcgcaatgaggtgccccctcaatctgaggtgaaactttttcgcactaaggcgtacatctctttgtatcaaattctcacactaaaacgtactcacaatattatccttcaagttcttacttcaaatagcactctaacacagtgtttaaaattgcgtttgtgaggagcgcaatgaggtgcccctcaatctgaggtgaaaatttttcgtactaaggcgtgcgcctttgtatggagcaaagagacgtacgactcacacgtgtaaggctcctctaatctgatgaggcgtgaaaatggcttcggtgtgcgcccagaaaagaattcgtatttgggctttttcttatgccctaaaagacccaaaaggatgttattttggtttctcagcttaagtaacttaagcccattagttaaataacttgcccaataaaacacaaaactaattaaaaaaaattccactaaaaaccctcaaaatatattattaacttggcagtcgttcccctctcctcccgcctcccaacttcctcaatcatgacttctagacttcagagaacataaccaaaaaaaagtgttaagtctttttccttcaacaactggaagttgaagcttcttcttctttcctaatagctgaagcttcattctagagtagaagaagagataaactttaggctaaataagatttttacccccgaactttgacataaaccaaatcatgctcccgaacttttcgagtcgttaaaaattccccctgaactattgaaattgttggattcaacgacttctatccagtttcattcaacttttctaacgtgaagatttttcccttgtaccgaatcattcccctaaactttgatatgtaccaaatcgtgccccctgaactttcatccacgttagacttccattagtaaaattggacgaaagtcctcaaatcaatttcaatagttcgagaaaaaattttaacggcctgaaaagtttgagaggcataatttggaatatgtcaaagttgaggggcaaaaatcttaattaagcctaaagtttattttagtttgaattttatgagatattttatggtttgtttgttttatgagacattttatagtatgtttgagtattataatgcacttttcatccttgatatttttaggtgctctaaaaatattttttcaattgaatatttgaggcttgcgcctcaatgcgccttgagacgtaaaggcttacgcctcgcctaaaaaaaaaaaaaaaactcctcgaggcttaaaagcgttattttaaacattgctctaacaaaactaataaagcaacaccaaaattcatgatagccctttacccttttagttaactctgttgcccctcatcacatatgtgatcctattgggaggtttatcgtacgaatatgtttttgatcacgagaacaatataatagaaataattagaccatccactgtaaaagattagtaaagaaaacactacgattgtgacaacaaaaaagagcaaagaaagttaaactaacctgtaactggatactacaaactgcccagagcataaacctctcttctccagcaagtttgtacatcttgatagctgtctacagaaaaataaaacgaaacaaaaaaacacttgtaaataacataaattcatctcctatacattatcaaacagacataaatatacatcaactaccacagatcactcaaaaaccagggtaaatacaagaacacaaacctgttgctgtttcacaaatgagtactcccgaacatagcaattaaaaagacccatcattagttccaaattatttggaaatttcccacaagcgtgttcataacagccagtagccaagtccactatcacagtagaattttgatataaggaaaccaagtggccactgtttgtatagaaaattaaaaagacaattcaaatcagtgaaagtttaagacttacagtgatcaagacgttggaaaacaatttgcagcgtactaagagtgaggtcatccattaacatggaatcgtttttgtataaaagctcttttgcattcaagcaaacagataaagcttcctcagctttccccattctttccaagataagagctttaagtgcctgtgaaatccacaaccggaagatattaacacaatgcagacctctgtacatctagtaaaaaattgcttacatgctacatcaaaattcgaaataaattacattgtacagagcttcattggtttaaaattcgaaaaaaaatgaaaatttataaaagaatacgaacctacacatctaaattcacacactcctcccaaaaaaaaaaaaaaaattactttctcaaccatgcaaaaatcatcaaacacgttttaagaactaaaatccaaaaaaaaaaaagttggaataaaaaccagagcatatggtgaatttggattcttagtgaggagagcggtggcgagcttgagagcatttttgtactggcgagaatcaacggcgtcccaaatgggtcggacccggcgctccggtatcccaccagccaatccgaacttggacgccattagagattcccacggttgaaatgagggatttgatttagggtttttaaaggaagaagagagagtgttaacagtggcgttgattattttggaggaaagtactcgttctgactcagcctctcctatgaatgtttttttaaaacacagaagatttgttccaaccccaaacggaaaacctaacgctactgtttggatgcaactaaaacccaaatgatctaacactgcgctcggctttcccaatcccgctcccctttttgcctaataaaactatgtttggtaattgcctcggcctctacaaaattttgtaggggagtaattttcggcataaatacttaattttaatttttgacggtaataaatatttttggtacttaaccgttaaatattaattattaggtcattatttacgtgtcattttgttattggtatatttaaattaatttttttgcaactggagttaaacttacatatttatgccgtaaattacacttttgaagaataatgattgttttctttttctttttaggaagaaccatgatagtttttcccccttaactttgtatacagtatcgtggtctttttatcatattttattcaattttacaggtgttatcagaaaaaaaaaaaaaaaaatagataacactaagaatagcaaagtattcacattctcaaatattagactacgaaataaacaaaacaaatgtagtaaaaaggaaatgaaacaaaaaaaagtgtaatggttcagtcagagtttggtctgcttaatctatttttagcaattgttttagcttagtttatttgatttggatcactcatttatataaaaagcaagtgttcgttgattttacatatacggccagacaagaccatttattacattattaacactacaaaataattaagataaatgttaacagaataaatgtaagagcagtttcgtccgttcttgattaattgcttgaacatgcgacttgtcaagtcgcaaattgactatccatatttcaaacacgcgaactcgtgggctacgtggtgttctactcgcataatgggcatttgggctttttaggttaattgatgaatgtttgagatcatccttaattgcatattcgggcattcttgcgtcgacaacttaaaatttgcgagtttttaacaagtcttcgaacacattaatctttcaaaccaaacatgtgcaaagatgtagtctttacatgtcgcaggagggatatacttgatcatcgtatataattgatatacgcgcaaccagtactagcttctctcggtcttgcttatttctcgacattatgttgtgcatagtgtgcgactagaccttgtctcggtcgcacattctcgcaagttcatatcatgcgaggttagttttacaggaactatctattgacacgtcattcttttccatttggaatcgggtccacgtgttaactatttacgagactgtacttgtatttttaggcgaaaaactcatgccataacaacagagaatagtaattaataaatgaatgataattaaatacatttcactttaatgattaaaaagtacagatataaatatagattattattaaaaaaacattttattatttattaacgtaaaaagagtgaagggtatttaatttatatttatttatcaactaccatctaccccttcactcatttcacgataaaatttaattaattaggtgaaaagaatacgttactgtaaaagttatatttcgaggggtataattaacaagtcgtatactataagcgaggtacaactttgtagtgtaaaaagttcaggggcaaaatgctaattagaattttgaaaaagattgtgaaattattggtgtcatagtgtaattacactatgttttacaaaataattagtaattacacgataaaataataaaataatactgtattctgtcgcgtgttcatgttaatattttgaccataacttcttcaatacaa

SEQ ID NO: 14191 - DNA, 8390 bp, Cannabis sativa
atgaaaactttttcattctaagtagacaaaactaaattaatgtttttcttccaattctgtcctttccattgttgttcagctaagtcataagcattttttttttcagtaatcaaaaaataataggttgttcacttctcttattaatcaacggaggaagagaattcatttgttgctattgtagagtatgtatgtatgtatgtatcatcatcacaccaaatatatgtcttttcatgttgaccccagacatgaagggaatgaataaataacaggggaccacgggacatgtcagttaaacaccaaagtaacttccactatagttctaactgtgttttcccatccctgattcaacaaccaaactcgatatttgctttacaaaagattaaaggcatactcatttaagtacaaagttaacagtaaatttggtaagaaatggaatacactactaactacatctatttgaggatgttttcaaaagtacaatacaaacaatcattatctgcaactactacaaaacaaggaaaagacaaatggggaaagagaatctcagctcagttcagttcagctagctcaggacaaattggggtagccgctagtttttcaaactcttgcctttcaaggagaacattttgatttttatcatccatgaactgctgcaattttctaatatcttgctctttattctccttctgtgaattgagtatggcaagcttcgcctgtagttcatttatcttcctagtaacatcgtcaatctcttccacaagtttaactttctcaccggattgctcgttgatcttcctttcagcttcttttgagtcgtgtcgagctcgtgcttgtctatctttaattgacaacagtgtacttgcacgatttcttagaactgaaatatcaaagccatgcttttctaactcttgtagtgtctccaaagtactgtgaaaggaggtgacacgatcatcgacttgcatcctagatattctgtcaaccaaaccagcaaaggtcaccatatggccaatagccattccttctctatgttcttctttacatttgtaaagtggacgaaaatgtggtacttgtttcatctttccaaatatatccatgtcatcaattgctttccagactggagagctctttacaaacggcaaccttagattatcctcaggctcactcccgctgaaggcatgaacaacaatagccttcttaccaatagttgctcgttctctatccctggttcgtgggtcaaaaacggccctaccaagtgatccttgaaaggcacagaagcagtcagtccaaccgtacttgaaaatgttgttaggtgaaataaggaggacaaagggttcctgaataaaggattacatagcataaaatagtgacttacttgtttcttggacacctggttgactctgtattcccccaaaccactttgacagaggctgattatcatcatcatctgtgccgcttgatactctaccgtatattgattcagattcagcttcatttgtggagcagttcatcccagaaacatgaacattttttcctgtagaggtatcttgtagatctacaaaatgccaattatagcttcaattatagacaacataattgggaataatacgagaaaagaaaaaacatttgagttcaaattgttctcaaattcattctctacaaccgtttctcaatgccatcaaacaccgaacagagaatgtgagaacgagtagcgcccgataagacaaatattcatggtttgtactcttgtacatttaaatttcttagtttgtttttgtgaggaaaagcctaacactttgtctggtaaggaggaaagaagagtggaaggagaggggtggaggaaagagagagagggatagatgaaatcttttgtttgacaaaagagaaattagaagggaaaggcctccaaactcaaaattttcaatcgctcctaaaattgaggaatttaaggaaaaaaaacaaaaaatatatacaacatcatatttatccttaaaaaataataaataattatattaggaagggtagcattgtaattttagtaactaatttacactccatcctttcaagtccagttcttttactaaataaaataagggaaagctacttccctctccatccttcctatcctttctttccaccctactctctatccttcttaccaaacatagcctaaccgtgtaaccttatcattataacttattagattgaacagcagcttcagctacttttgaattataaatagatcccttaccaatggattgaaattgagatcaaggctgcaaatggccatacctgtggtttccttccctccttgagtaggcagaaaaactcctccatttgttttacaagcttttacagtgtattcctcatcatgtccatcttcattataataacaattattggcctcaaaattacaaacatatctaaaaactaacaacagttataaatatgtaccttcagctgaagtttcttgcccgagacttgctacctttcgaggtctacctctctttcttttattattgcacccttcagatgcattctgcttaaactcctgcacaacaatgggcagacatccataaagaggaaatctgaatacaatggttatttcaagccaatctatactatgtttcggaaaacaacaaggctatgaagcaagtcagacaaaattggatcactggcaaattgagcttgacacaacctgagtgctaatagcttattttatataaaatttactgcattgttattgtaaaaaacttaatataacatgacttcaatccttttatgagtaacgtggtgcaagagaaaaggcgtatatgctaatttctctcaagctgttcaatcagcacaaaagaaaagctttcattatattttgtaacaaatcaaacttatgtgtaatttctaacaagcaaagtttgtgccattgaataaaatacttcttttgctttggaaaaaaaaaacattatttagaagtaaattgcttactgcgctattgtcatctgaaagattatctgaattattcttcgaatcacttggtggatttaccagctcttgatcaagaaactgaacaggacctttggccactgaaccttgcgctccctcagcagatgatgatgctatggggccttcagcttcttttcttatgccttcttcaacagctttctcagcagcaacttgtttctcaacagctttctcagcagcaacttgttgctcaacagctttctcagcagcaacttctttctcaacagctttctcagtagtaacttctttctcaacagctttcacagcagtaacttctttctcagcagcaactgctttctcaacagctttcccagcagtaactgctttctcaacagctttcccagcagcaaccgcttcctcaacagctttcccagtagcaacttctttctcaacggctttccctacagcgacttctttctcaacagctttcccagctgcaacttctttttcaacagctttcccagctgcaacttctttctcaacagctttctcagcagcaacttctttctcaacagctttcccagcagtaatttctttcacaacagctttcccaatagcaactactttctcgaaagctttcccagctgcaacatctttctcagcaggtttcccaactgcaacttccttctcaacagctttcacagcagcaacttctttgacaacagctttcgcggcgacaacttctttcacaacagctttcacaccagcgacttctttctcaacagctttctcagcagcaacttgtttctcaacagccttctcagcagcaacttctttcttagcagcaacttgtttctcaacagctttctcaacagcaacttctttcttagcagcaccttgtttctcagcagcaacttctttcttagcagcaccttgtttctcaacagctttctcagcagcaacttgtttctcaacagctttctcagcagtaccttcttttccaacaacttcaactttcacagaagtgccttcttttccaacagctttcacagaagtaccttcttttccgacaactttcacagaagtaccttctttttcaatagctttctcagcagtactgggaccttcaatttttttggccttacctgatgctgaagggagttcagattctacttttatcccttcctttttaacaacaatttcaacagcaccagtacttgtattcttggtcttgcttaatgctatgtcagcttcagtttctcctttcatgccttccttttcaacaactttttcaggggcaccactactaacatttctagtcttacctgcaaaactttaagcatcaaatttctcagaaatgaaacgaaattgaattgaaatgaagctgtctgatgcatgcctcgtaattttttcttttcgttctcctcagacatacatacctactactggtattgttgttcttttgacactcttcttagttcttcctctacgctgcacattatcggaaattttaatttcacatccaccacctttatgctgcttactcctctacaaattggtgtaaaatatatcaggtataaattataatggacagcaaaaatagaagaaacggaaaattgatcaatctttcataggagacgaaatgtgaaagtaaacattagttgcaccagctttcatatcactaagttcgcctctagattttttccattttgtttaaaaaatacgtgtcccccttacctttgcattagattcaactataaaaggaacaacaggttttcttaaacgtgtattcgccactacttgttctcttgctgatgcaggtgttgtggccaatttatatttccgtgctttatatgatttatcatatgacggagatcctttttcttgatgcatagatccaccattgttaggggatgacacagaagtagtagaaactgattcctcactgtaatcagtagaccgttttctcagattcttgcctgaatttgtaggctgaggtgagtattcttcatcggtacagtcaagtaagcccaaacttcccagttgagagacaacatcagcattgcttacacgatgggcaccgtgctccaaattttcttggaaatctaaattcagatcaaccaatccttcctgtaacagaattcacttaattaagctaccgatactgcataatattaaccataaaacctttacgaaacgcttcctgtaacagaattattaagctaccgattccccacataatattaaacataaaaattttagaaaactgatggtaccaaactgtctgtttcaaatacaccaagatgatgatgcaactgaacacaaaccaaggtgacaaggaaacttaacaacgtgacccctgggccacacccagtcagaattacatcactcagcaacttatatagtatcatttgttgcattctcaaaactaaatagctaagtatgcattatatagtaattgaaaggaaaatcccatacctttgtccacacatgccattttccatctttccattccacaaaaggccttaattctgtttgactaaactccttggatttcatcccatgcttgaaagagacagtgtacctcttcccaggtagaattttggtgatttcacctacccgccaagaataatcgaaaaatgcatctactttctcataaaggttataagctctatccacatggcgaggaactgcaggacggatatgagtgaaatctacagtatctttccaattcttagccttagagttgtgatacttcaccaaaaaggtattatcatcattttccttaatcacaattgcaggaatccaagcatcacttaaatcctcattgtcaaaatgcacctctacatcagttcctgagctgaaagtagaccctgtcattttctttagaaatttgaaaggaaaaaagattaaaaacaaacaaaaaacaagttaattttggggttaggaaaatattatacatcaatagcaccacctaagttgaagtggaggataccatttttgatgttcaaaatgataatttaaaacttgcaaagcttaaaaaatatcagaacacaacaaaggcctattcatgcaactaaaaatctctcagactaggcatggcaacttcaataagaccttcttttctttctaattttcatgtccctctataactgttctcttacatctgcataaaacaagtacaaatcacaatctaaaacatcaatcaaaaactgcaacaaaaccataaatcatggattagaaaaagagaaaagaaaaacaagatgatgttatgacaaccaacacaatccaaatcaaagcaacaatttcagaattcaaaggaaagcaacatatatgcttgaaagaggaaaaaacaccagttaatgatgatacctgctctttcttagggcgaacccattttccgttaacccaatcttgatgaaaccgcatgtgtttcctctcaaattcaatcaaatctggcggattttcaaaaaagactctatacctatcgaaccccaagactttcttgacaaccccagtccaccatccatctctgtaatcggcatcaaccacgtccccaacctcaaaatcttgagaaccagcatcaggtggcaaaggcctcaagtgatacaaatcaacatgctccctcaatggctgaaatccatcttcggttacaagactccagtactcaaccaaaacttttctcctcttcttcggggcagcagaggaacccaagttctccaccacaaaggctttgaaccaagcccccctaaacccttcttcgtcactactaacttcaacctcggttccctcagagaaaagttgtctagggtcgttactgtcgaaggagctcaagctcaacatattttcctcttggctcgctcttaccaacaaaaccctaattcactcttgtatctacccaccttttaccggctcaacaagtcagactattcatactacacacatatttatatatattatatgttatatatatacacgtataaatatatataaatatacaataaaaatacaatctttttacagccctattatgtggtggtggtccctctaccaaaaaaagacaacccacacatccattttcatgctcagtaattagattttatgcttaaatctaacaatgaatctgttaacatatgattattaccttgtataatttatattttctctcatgtgatgggaaccgatgcaggccttgaagagagagaaagtgagaattcaatcaaactgagccaaatctggggtttgagttggagcctcgatcgaggaaggtgcatttatttacacctactgaaattttgaaaactaaaaaaattcttcagagagataccgatttgtataaattcatataaaaaccaatcaatcaatgtaagccatcagatcttgattgatctaatggtttaaaatcagtgtaaatattggtgacctgtcccttagagatgatgatgatgatgatgaagctatatcttcactcttcagcttaagttgaagaaggaagacaaagatggtcaatcctctgaactaagtgatacatatatatatatatatattcaggtacttgctatacacctagaaagctctatcctatttgtaattttcaagtgattttactaatcaatgtattattcaaccatgaatggaaattgttctgaatagactgtggcaatggagatttttgttaatttgaacaaaacacccaaatatagttctttggagccatctaatcaatttttaattctgggcttgcaatttcaatctttaagtcagcagaaaactgatttaaaccaactaatatttttctctgatgcagggccagcagctgtaaatttcttatataataatagatcatgctgaggttgattatctttttcatccaagataacaaaaagtaagtctatatttggaagttaatcttagaaaaaaaaaaaaaaattgtacagaaaaatatttgattcaacaaaattttccatataaaatatgaaaaattggtgtttttttttacttttgattctttacattctcattagcttttttttcctcaccaaaatcaaactttcatagggttgaagaagtgaggatcaaaaactttgagcctataaagtgagagatcacttgttatatcacattgtatgaatttcagcagggtataaatcgtgtttactgaaacttcttaaaaagatgtgttctttggtttggtttgcttcacttaattgactgaagaagagaaggaaaagggtactgagtttgggatgaaaaccgttcttattgaatgaattccaagatatgtggtttgttttatatatatttttaacttttgacacaatttgatcttgaatataaggcttttttaaaaaaaatcaaaaacctttatatttataaaaatttagtgctatgttagcttatcttattattttttaaaatgttgatatgtctttata

SEQ ID NO: 14192 - DNA, 11446 bp, Cannabis sativa
ttttttgcagttttagagggaccaaggaatgttactccaactgtattgaagacttcaactggtttagaaggtttctaataatccttttctttatacactgattgacttttttttggagttatgattttgttagaataatttttttgacttccaccatagaattttgaattttgagttaattgatttaagctcttttcttgagagggtttatacttgactttgtggctgttaatgaaatagcatggtcgagttcggagttcatagttcacttacaaataggcgatatcttaacaaaacctttaagcggttctggttgattatctatgtaacaaactagacatgattactatctatgatcctgctcgagggggagtgttttgttacacattttaatagctgtatttagctggctaattgtgtagttttcttagatagtttcatagttctgtatgtatatttacatcaatttttaatgtaaaagacttccatgtctttgcttgtttgttgttggaactcggaagtgatggataacatgagaatgtctttccatttcgtttctgatgttgtttttcgggaagcatctagagggatgcttgtcttgtcagttgttatctcacccatctcctatttgtttattttatttatagcttacattttgtaacattaatttatggttttcttttaaacaatcttacatctgtactttttaatccttttatccagtgtccaaattcgctccaaagaagtggggtctttctggaacttcccagcttactttgatcgctttccttggcgggacatcttttcttctttatcaaggcattgattttaggccgaaccttgcagcagtattggggctagcatttgtagattctacattccttggtggttgttgtttagctcaattgtcaagttattggcctccgcatagacgtaggatactcgttcatgaagccgggcatctcctaatcggtaagccctagttaagattttacaattcgtcgaaaaataccaatttaacataaattatatttaagtgctggttatgacccatagtttctcaaaaaaacaaaagaactacatttgtttccttgtaaacgagctaattatcggtgttctcgttgaattgcagcttacctgatgggttgtccgattcgtggggtcattctagacccgattgttgcaatgcaaatgggcattcaaggacaggtaattgattcttgtgtgtattataaatgtattctgtgatgttacatcatgcagtctatgatgttctttaatcgaaaacaagaaagaaaaattaaaatgaaacctaaaatgtatactgtgatgttagaatgggtgtttgagctaacattgaagttaatgtgtaggccggaactcagttttgggacgagaaaatgtctaatgacctaaccgaaggacgactggatggtaccgcctttgacaggtgggtttaattctggtaagattggttatgttttgccatttatttaccttttggttgtataattatttcaatggatcctttaaaaaacttttggaaattcgattagacaaatcaatgattaatctcctaatctcattaacacaagttacttaattattgcttgtgttcataaattaaattagatactgtatggtgctttttgctggcattgctgctgaagctcttatatatggtgacgccgaaggtggagaaaatgatgaaaatctgtttaggcgcactagtactcttctgcaacccccgttatctgtagctgaggtaattctctcgattgatattcactcggtccatgttcttttgttaaaaaatcttattacttgtttgtatctttgtcatgggaagatgtcgaatcaagcaagatggtctcttctacaatcatacaatctgttgaagtggcataaacatgcacaccgggctgctgttaaagctctggaaagtcgttgcagtctaagcgttgtaatacaaagaatcgaggatgccatgtcaactgatagatgagtggcaaagagtaaaaatctattataattggtttaggtaagatactactctctctctctctgcgtctttccttatttgtacgtagcaattttcggttaggtatgcattcaagtaaatgtagattcggtttgcagtgttttcatcatcgcaaccacaaaccgatgaagtgaaataacagcgaatatggaaaatagaagtgtttcaattaaaaataaggatcccatgtatacgaaatgctccactaaagtatttggagctcccgattttagagttcgaacaacagttcgacaaatggatgtttactaaatactagaagattggtgttgcagaactaactgggtacaattggtaaagctttcttcttcattagcccattatgttctatctttcccatctcaggaggaggacttttacatggtttgttcttgcctaaatcttatgtatctaatgaaagaatagaattggtgaaggaaacattaattcacaattgatttgtttgtgtgcaaatgcattcctctgaaaatgcattaacactttggacatagttctcttgtagtcacatttatataatgccaaaaatacaatgatatttgtagtagtgtcttgttgaatattgcatttacttttgtcaacactttataaccgattttatagtacttgtaggggtgataattcgtgtcggcgtgttgtgtgacccaaacacgatccgtgacacaaaaaatttgtaagacatgaatacaattcaaagaaatttcgtgtgatgtcgtgttggcgggttgtagttaaattgttattttgtcatcgcgtcgtgtgaaattcttaaatttattttagagagttgacatgactcgtgatatgaaaaatttataaaacacgacctgaataattttcgtgttctgtcgaacccgtaaaatcttgagtcttgttcgtgtcaaacccacggattgtgacttgaattgccacccctaagtactagtactgaattgctaaagcatagtgtcatataagaaactacaatgaaaaatcgctaactctcgtaaaaccctatcttatgattttgcattaacatactcaatatttcttactacatagattacacaactatctagcaaacaaaagtcacttatcttttagtacctatttttgaaggattacttcaaaactacatgaacaaaaacaccacacatgtctcaaaagagagtttttggttattagcttgtagagtaaattcatggcttcctttacttgtgttattgcacctttgattggcaggtaactttgatttcttcacattcattttctttggcaagaacaagctcaaacacatatttatcgtttgcctttaaatcattctcttctcgaaatcttctccaaccagctgctagaaaacaacggccatctttccagttcgagatcctcacaggccataatttgccgttgtgatatcgaagcttcgtattaggcttgaacttgactccattgtgcactggttgaggaatgtactgaaattgtaataaactatagtgaatcatataggttacaacaataccaaaaaaaatggcgatagaaaaccgaaaaaagtgcccattttgttaatttacaaaacggtcttctatacagtgtcgccctgtctttgcaaataggaatttagataagggttcttgataaagttaagatttagagcttaagatagaaaacatagaagtaaaacaaaaacaacaatataagacaagagcaaaagacttaccaacatgtatgagtggatttttgaatttccaatagttgctacaaaacatggattcttcttcattggaacatgttttgtagatgaacctgcaaactaaacaacttcaaataacatttaacaagatcaaaggggacaaagccttataaaatagtctttcttatcatttgaaaatcggaaaaatgctatttgcaaataattatcaaaatgcgcctattatacaaattactatttaaaagaagagcaattcacacattattttcaaagtcattttacgaaataacattttttcgatagttctttgcaaaataatcttcaacttcggtcgaaatttgaagaggttattttacaaaaaaaaattatcgaaataaaatcattttgtaaagtaacataacaaaaagtctattccaccaatcacctttaaaatttagaatacattttcaccaaacgagtaatgttagaaacacactcaaattacacatatatttttttttcacataataatgtataattagtctcaaccatacaattaaaagtgatataatccccacttatatatggctaaaattaaatacacatcactatgtgtacaaattatgtgtaatttgagtgagattctgttctattagattcttcagtcgaaatacgtaaaactccattcaattctcaattgaaagagagttttgcaaattttccccggaactaaaagatcatttcgagattttcgaacatcttcgagggttcaatgggattactcattaccaaacacacaaaaagaaaagaaaaagataattttgcaaataaaatacaaagaatacttgatttctttgttgatccattaatgccaatctcctcattgtgggcatgcatgtaagagtctaaaagctcttccttcttcaatgtctcttcttcctttttacccatcattttagaaggtacaccaattcctttcttgcatccattttgaccaaaaatatcaacctcaaataaagaatgcccatgatatttgaacacaagagaatccccataattgagcatttggtctctaacaaattcttcccaaccattctcaaagtacaaatctttttccaaactcatacccaaagctaccacccaacatttcccatttgtgtgtcttataattactttctttggaactcttgaaatgaatctctgaacaaaatctggtgggatcaactacaataataataccaccaaatttattaaattaagttaaagtttgtaactttatcaaaaataaatcatacccaccaaattaaatatattttttattttcaccttagaagttttattcattgcttttcttattagagatcttgaaggcaaaatatattaataaatttagaaaaggaaagaagagtgtagagattaataccaaatttattaaatgaagttaaaatttaaaactttatcaaaaataaatcatatccaccaaaaaaaattacatgtatttattggtttttattaggatgaatttgattttcaattgttcacctaattagaagctttattcattgtttttcttagggatcttagaaatgaaggggaaaataatattatgaatattaataaatttagaaaagaaaagaagaatagagttaatagttaataccatgtgcttagaactgaatttggggatgaagactttgaaaaattggggaagtttgtcattggagagagagacattcaccattgttgggcctttttttactctgcaatttttaaggttttgttgtgaagtaaagtaacacatggccttttaaaggggaaacaaaaacaagacaaatgtcaaatttgtgaaaataatgtctttcaatgtattttgattttttaatatatttttcttatttaagtattaacgtcacgttagtgttacatcaataaatttcttacaacctatcagtgccaaaatgcacagagtatctctatacaaaagtttcaaagagcatcaaaaacatataatgttcccaaattataaatgttttacaaatataatatatgttcgctaaagttttaattattacgaaaattttactaaacacactttgatgttaaaattctttgattagtaaaaattaatacagtaattaaaaaaatactgtaatgtgccctagctaggaggacatttggtctttcatgaaataccaatttagctcgccatctttagggtagggtggctagggtcgggactgttgcctaagaggcctctctcatactctttttcttttaagatctttttaggaccgtttcatagaacttctcaggtcaagaggcctcctccaatctcttttcagagcttctcagctcaagaggcccccgtagtttctttttcttgtaagatttttttttttgtttttggttgctaaaagatagtttaaaattttctttaaataggctcatgtttaaaatttgcctacactccatcaaatctagagacaacacgtcgtgccgttgaatttagtcttaaggtctacgcacctagcatgaaaataccgaaaaaataaaattactaagataaattgtacaaatgtttttatcattaatatagtgattaattagtgttaaaataccataatgaaagaggtgtgtaaagaaattttatactcttattgatatatcatataattgttaatttattaccgtttatgtgaaaagatgttttaatttattttttatttttaaatttggtcaagagataaaaaaaaaattattaagaaattttaccttattttatttatttatgtgaaaagattttttaatttataatatatgggatttaaatttaatttaatttccttttttagcgataatttaaatttaaattttgttcatatataattataaatgtgattttaaaatttataatctaattctaatatataattaatgaaaaacctataactaatcaaattagaactacataaacttataaacttatgtatgcatgcctatatatatattaatagatttatacacatcgatatagtatatacttattaatatacttgctatattaattatggcaaaaccaattcttaataataaagaaacctctcaattagttttcgtttacactgaaaacatttatggtgatcatcaccaccaagattatgatcatcatgatccaaatccaatcctcaccatcaaattcatggtcatgggacgaactagtgatcaaaacaactcaatcattgatcacctcacaactgacgagttcaattaccctttacacaaatttgattcgtcagattcttcgctcatgctctttcgcttgatggtttcccgcgtcaaaatcccttttcagttaaatactctgtactggaacaatccctactattgtaacatagaggaggatggaaatcagaatataaatatgacgctaataaattatgacaccatgttgtgcatgctctcgaagactgcgactaggatgacacaaacagagttgaaggaacgaaagagtttgactatgcgggtgttcatcgagaaacgagtgattacagaaattccgtcatccatcacttttctaagacgtcggtttctcaatagtgcatacaaagagttctcatacatgtttttatttgttatttttatattattttattattattgtcattagatactaggatatttattgttttctttttatgaataatttttttagccttcaatctaatgtgttatattagatttcacataatttattataataaaatattactaaaaaatggatttaaccaagatttttatgagatcaataaaaatttatattattttttgactcaaaaaaaatcaaattcagttaataaaaagtgtcaaagtcataaacaagttgatgtataatgacaaaaatatcctgactataaaatgcatggaaattaatatgcgtatttatttaattatttcccaatctaatttaatcttctattaatttcaaatcaataaatatcccacaaaataataataataatggttaaaaatatttaataataccaaatcctacgtctctgattatgccacgtgacacaggttgaatcaatggccccacccacttttaatctacaacttattaaatacatttattatctttaataaaatctaaaatgggtttcaaaaaataaaataaaatttaaaatgtacgtgtaatatgaattattatccaatacattctcaataattttcttttcaaataactatatactaatccatatagaattagaattcccaaattaatttaattacatttattttatttaataaaaaccaaaaagtacgtgtggaatgaattttcttttcaaaagataaaatcttaattatcttttttttttttgggtgagatttttgacttattacatttataaattcaaataattaatatactaatccatataaaattagaattcatctcatattatttaaattatccacgcaaataaattattaatataaaaagagtgaaaggtatagagagtttaattaataatcatagcattaataataagttgaaagagagtgagagaggttaatttgggaataatatatatttataaaaatatatatatatttatataatctatggctgaaatgcttggaactaccgtgagagcgcctaaatactatatttctacttggtttagcattactaatcctaacccgaaccctaaccctaatctaccaaataatcctgctccgtcttcagatgatgaggtgcaggatgagaatgtgttcttcacacatctcgataaaaatcaacaagatattgatcaagatcataacgttattaataataatggtttaacaatagaggataatgatttttggctgagtcttaagcacaagttattggtatatatactatacttataattattgttaataataatattttactagctaatttagataaatatttgtgacaattataattaattagttaactaatataatttatttattaattgatttacaggatagtttgaggagaagtagtaaattggaaacagaaataagaaaaatcgctaatcaaatagtgatcaactcatctgagacaaggttttgcagttgcgtagaagcaaaggccgccaattgttgtcgaaaatgtgtgttgagtcaaatctcagatggtctcggaaaacaaggttacaatgcttccctatgcaaatctacctcacgctcttcagaccaatttctttttggtaataataataaatattaattattattttttaattaatattttgatttataataatcacatttgtattaattaataataattaacaggtgaacataaatttgtcgatgtggtggaaaatattggtaaaaatagaacgaaagaggttcgagtgataatagaggtaaatttgaggagtgagtttgaaatgagtagtggactagtgagtacggaggaatacaaaggactagtccaacttcttcccgagttgtatattggaaaagcagagagattagacatggtcataaacataatgtgcttagcggccaaaatgtgcatgaagcataacaacatgcacttggcgccatggaggacttaccaatacatgtgcgccaagtggctcggtccctacaaacgagacaagtcatcattaattgatattaatgatttattattctttagtaagacgagcaacaacaccagtcaaaaaagagtttccatgctaactttggatttgcaaaacatgttacctaataatccacttgcagtgtaggcttaaactcatgaatatttattatttgttatatataaatacttacattacataatgctagctacataaggtaattaaacaaagttttctctattggttaattattttcccctttcaataaatatttttttatttacattttttagttctatttttttcactagggtttcctagtattttgttgtttttttgggtagaacaaaataattaatttgtaagactatacaaatttcttcatttttttttttttgaaatatatgataaattgtatttttttttttttatctttttctccttttactacatcgacaattaatccactttaataactttatcaatgtgtttgaactttgaatttgtttgtttattttgtatgtaataagaacactcctactctattttttaaaatatataaaaaaaatataatattaattttattttctacacataataattttttaacatatataaatttaaaatattatatacattattaaaataaatttaaagcataacgaagaaaaagagaaaaattggtaaattataatagaatagatgtgtcatcggtcaatgcttgctgaagggtggggcagcaagagccactgccctagacccttagcccaaagaggcccaattttttacttgaagaggattaaccacttggagatcttgtttgaccttgtagcaagtcgataaacgggatttgttacacttgcccattttgatcagaaacaaccgcaagcccacgagattctccagttgattggtttggtgcatcagtctgaggatgaaaattgcactactggtcattatgcccaagataataatgacctggtagtattgcttgtctgctgtgtggctcacagtttgatcatatggtctcgaattggatggattgtcctgtcgaggttgttgagtgtagttgttggacgttcttctggaccatactatcgttcatttggattataaggagctttccctctatttggatctctcacgagcggagtgtctttcgatttttgtcgtctagtttattgattaaattgtctaatcagttcggttgtttgcacgaatcgattatcaacagtgcttacattgcttggagtgcttggcttaactgtaaaggctcagatggtaataattaacttgtctggatgtcccatgctcgtctttagactttatcgttcttggacatgaattatttcgaatggtacgttgagagaaatatcgttcgtctaagtttcagattgttctttatatgtcactcataataaggtcgtatcaccttgtgcaaaaattagaataagagtaaataaaaaagttcaaagcataaaatataattttttttttggtattaatgtattatataaatttttctaaaaataattaaaaaataaaagaaaattacataaattgctatttttaataaaaaagtttacacttttaccttcaaattttttttcttacatttttatattattctataaaatcacaaaaaaaaaaaaaaaacacatgaaaataatagaaaaccaacaacaaaacaacataagaaataatatttaaataataagaaaataacaacataaaaatagtgaataaaatctgaaatttatccaaaaaaaaaaaaaaagagaaaaaaaaaacagagaggtgcgaagaagaagaagattgtggaacaagttggaaatggctcatctctcgtccattaccaccatctccacctctcctcttctggtttgttatcttcttcttcttcttcttcttcttcttttctcaatttctctaactcacttaattttgattatatgcttaacaacaacaacaacagtcgaagcaaaggccaaggacactaattcaatacccattttcatctacatcccacttgacaactccaatcgctagttttcggagaaccaatcggttgacagcgttttgtttcaatcccactga

SEQ ID NO: 14193 - DNA, 4406 bp, Cannabis sativa
  modified_base (1534)..(1534): a, c, t, g, unknown or other
aagatatatatattttccactattcataggttttgaggatataaattgaaatgagcttttttgtgtgaggctgcactcatataataattatatatgtatggcgccgaaagagaccactaaattatttgggtatttttcaaaaatagacctcacaacaaagtcaatttcaatgcaataattattaataaccattcaaattcttctcatcaacgtaccttgcattttatatcttatggtaattgtagtaaaatgaattaaaaacaatattgatgaaaaaatttgactcaaaccaaaactgcaaatctgagcttaatttttgtctcattatattaataatcactagagatcactattaatctcttttaataattaatcaaactttctaattactctaattacgtatcttgttttcgaatcgtattattttgtcatgaccagtaatatcactcttaattaaagtatttcggctagagtattttcaatgcaagagatttcatgggtgcatattttggtagagaggaagacaaaactaattaatctaggatttgaaataaaaagtttcttaaaaaatattataaaattagtttcacattgctaaataaaaatactatatatatggaatgaagaaactacttctcttatgttttgagataaaatcccatacactttaaccatacacttctaaattttaacaaagagagttgaatgtattaacggcttattatgcatggtaaatgagtaaatttaagtactcacgaggtataatagtaattaagcataattaatatttaagtaaacatagtgagattatttttgctaaatttctccatcccaaaactcttgagcagatgagcaaaaatgttgtcctccatatgatctttgttgtggaatttggtcaattagtagaagctcattaggggtaagactccaatcaaatatgtcaaggttttcttgcatccttttcttgttgaaactcttcataacaaagcaaatcccttgttcatatgcccacctcaaacaaaccttcatttaccaaaatttataaaatatacaaatcaatattctatcactctgaaatatcatttatttctttttatttctaatattatttttgaattttatttaaagttatttacaattatatatatactcatcctcctataaaaacttctaaaatttgtaatttcctctacaagaaaaacattaggattgtaattgttcaatgtgcaaaaaaaattcaaaaacaagtggttttgaaacttgtttaatattacatgagtcaaacaattttttttttaattaaagtctaattttttcaccataaattattcaaaattttatagaaacttaaaattttctaaataactacaattaatcctatcatattattttttggaggataaatacgtaccattttagacccttattttacaaatattaccaattaaattctctgttttgttaaatgataaaatgaaccttatattttcaaaaatagtataaataggactcctgaactgattttttgtcaaantaaaatttaataataatccgatttaaaggtgttatgacaaaactattaacattttctgtatctgttcatattagaaattgtcttcaagttggttatattaaaaaaaaatacaagttgtcaaaaattaagttcagtgtcttatttttaccattttgaaaaataaagggactattttgtcatttaacaaaacagaaggtccaattgataatttttacaaaatacatggtccaaaatgatatttattttttttagaataaaattagttaataaaaaaaaaagtaatggatttgaatttaaaaccttgccaaaacaatttgaaccataagaccaaaagcatacactgcttgtttatttgaactaaatgaaataatgagaaggaattagaaaattaaatttctgtaaatgtaaaatttgatagtgtcaaaaatttaagaagaaaaattactattctaaatatataataataataatacctgggccacagtttttcctttagcctcagcaatttgtttgagtacatcattttccattactctgtttgttccccaaattgatccctttcctcctaatggagaatatgctgtgatcaaaatccccttttctttacaaaactctcttaattttctctgctgccaaactgggttcaattccaccttaatatttcaaaacaaacaaaaataaaatatcaaaattcaaaagtccactttttattattaactaaaagaagataacgtaattcagatcatttccctactcttttagtcatatgataattctaggaattacgtgtcagttataggggcctaatatctcatcctactttgattgagtcatcggtaatactttatggattcccatcacacagataatactacctacagcctgctaagctagccttcaaaatggccaaacttttaatcactttttcgagagggactatactattgtagtgagtttcgaatctttgacccaaacaaagaaaggatgtcagtaaaagcaatcagtaattcacaacaagtacacactttattattttatagttgaaaacaacaaatgtttattatatacttaactaataattaattataattaggtaaagctaatgaataaaatatgatgtatatatacttggttaaaagctggagggattttggcagtggctagcaatgtttggagctttttgcatgagaaatttgagactccaatggttttagtaagccctaatgtttgacactcttccatcttttcccacacagatttaatatccagaggaataacatcatctctactaaacacaaaatttggttcactaggcttcagtgccactgcccagtgaattagatattggtccaagtaatccatcctcagatttctgttcatttaaatcaaaatatatacatatctttattagtataatcaattttcattagtattaatatatacattcaaatcacacacactacactatcatgtctaattaatttcaatcataaatatttttaagtatgatcacatcaaattttaattgtagtatcattaaaattataatttaaacatcaatatcgaataatttaagtataaaatttaagaatatattaatcgatcatgttttctcaatatatatatacactaaattataatttttttaaaaaaaataccattaaagttaaattaaataacaaaaaaaaaaaaacctttttttgatcatagaaataggctgttaggtttttatgatttccaacaagttctatggtaatttataattagagaaacaacaattttgtttgagcaaaattgatgtcctgccaaaaaaaatcctaaatatatatctttaaattcttataagaaattcatttcaaaaattaaaaaaaaaaaaaaaaaatcttataagaagttatattagaacatagatagttaaaaaaaaaagaaaagaaatattttgtaagtaattattaatattaataattacttgagggttttttggattgctggaatgacacgatcatggtgtgcatcaccacaccatagtttggatgtgatgaagagttgggccctggattggatgaggcccatagagatggcctcagagatggcttggcccaaaacatgttcaattaggtacacagaagctgtgtcaaaatgtctgtatccaagcttcatggcttcaattatggcttccttcgtctccaattccattggtggaaacaccgccgttccgaaccctattaccggaatcttcacttcttctcctgatgatgatttaattaccaaatctggaacaataatcttttccatgttatttctctatagttttctataatgggaattgtttttattgttataattggtatttggtgtgatatataatatataattgataattgatgcacaccttaaaagggaaaaaaatgtcatagtatatatgaatattgagtgtgataagattaggatattattagctgctacaatattatgtggctgaagaagcactacgtactacctattatctctacatgtataagggtggaccaagggagagacttcagttgttttcttaaaaaatatataatatgtattttaattagtttaaatatatattggtaattaaatatgatttataaatatagtgttaatggtataataattaagttattttagagtttaaatttcaataataatatttttaatatttaaagtttacttttcttgttatttttttactttaaataattataattaatggtaaaaaattacgggtttttgtatcaattttcaacatgtcttatcatataaaaaaagtacctacaatttccttatcttaaagtctagatccatctttgtttacatcaaaattgaattatatattgcaaag

SEQ ID NO: 14194 - DNA, 7282 bp, Cannabis sativa
accaaccattatcatgttatcacagattcttcattattatagtgcttcaaaaaaacaaaactgaaaacataggatccatcaatcacgaagaaaagtatataatgaaatgttaaccttattcaataccttttttttttttttttttgtagagagagatagagagagaaaccttattcaattctttattaaaggaaaaatattcaaatatcatgactcaaaacaagtctcaaaccccaaaagaagtgcatgaacatgtctcagagagtgcaccgattttttaaaggttaacatgcatatctatctatggatttggcagagatgttctgcgcataagagaagcaaggaaatggcagtttctctatatgccgaaactagtggcaaatgccatctctgtaattgagtagtttctctccaaaaccagataaaatcaactcaagcagctaagctttttgaggcaatctcaaacacgttctccgacaaaccattggtggacatgatcttctccagttgtgcctgcaagtacaaacagcatatagtttttcaatccaagttttaatcacttaacgcttcagcaaagatccagaagaaatgtttaaactttgacacagacatcaaagatgtaagaacaatgattaagtaccaataaaaattgtggctattaccttggcatggttttgtcgggtttcatcatagcgtctccacctcgagaaggctgacaccatccgggaggcaacctgcaaacccgtgatagtaaaattttaatgtaacaaagcaaacaatgacgatagtaaattacataaaaatactatctgcaaacaagattgagggctgtgttctggaaaagacctgtgggttaattttgtctagttgcaaaacaatttctcctaggaacctatagcctgagccgtcttttgcatggaaattcacaggtgacccacagaaacctccaatgagggagtatactttatttggattgcggaggtcaaatgccgggtggttcaggaggtttcggacattttcaacattaccaggaatgtcagacatggcttgaagtgcaaaccatttatttacaacctgaaaaataataatttatatgcatcagtacttgcaaaactttctttaaaaaattaaaagaaaaggatcaatactgaaattagaaattaccaaaaagtcattctgccacttgttgtagaaatcagccaaaatatcatcacgacttttaccagggctttgagataacgctgccaaggctgcaaattgatcagtcatatttgttgctgacctatactcattcagcgcaagctcggtaagagcaggttcttcaagggatgccagatatgctacaagtaaaacaaacatacaaacagttaaagaaaagctctgaaaaatattacactgcaagcttaattttcaaaacagaacagaccaagagcaatattcttcaaagcacgccttgccatgttcgaatggtcaaattggtactcctttgagctcctattgtttgtgacctgttaatgaataaaaagaacaagttaagaaattaacatgtcttggtgatgatgccccaacaactatatataggtagcatgtattgctgtattaatggaaatcataagaagatgcgtactgtggtgagcaattcttctttaagttcagaggccaattgcttctttataaaagtacgaacagcatgaacagcatcaggatctgcaacttccatcatgtccattatttctccttcaccaggtagtgttattgcctttgcaataaattcctgatcccaaacaaacaaacaaaaggtaggcaaaggttaaccagtgagctgatatctgcaacttctccatatagatatgttattaagaaaaaaaagaatgaaatgggcaagtcctataatactttatccaaacttgagtcacttagtatgcttctaagtccatgcacaaactgcgggtttagcaccaactgtttgttctgttgaaaatcagcaaccaagctgagcatcatcttccgtgctaacacttgtccagcctcccatcttgagcacaaagagaaacaataagtaaatcaacactcagttgcttagctatttgtcaaataaagtgtattttatggtacacataccgattaaactcgtctgaatcatgagcaaggaggaaagatagatcactatctgtgagatccgattcaagacgaataggggcactatagccacgcaatagagatggaattggccgctccgttacatcagagaatacaaattcttcttctttctatataagccaaacaacaagaacaacaatgcatgtgaaggaaataagaccaacaataaatcctcaggaacatagaagagagccagcaagattaatttctaagttcaaagcattttgcacacaagcacagtccagtgctcacccaacaagagcaatgaaacactatgcaattatctttaatgggtacattattacttccaagattttatgatcgacacggtaagaagatttcctccaaaatgacaacaaaagatgacatggtataaaactacccccaaagcatcctcctaagcacaaacagagggcattgcaaacacaggcaagctaaattcaaaaaataactttaaccttagttactcgaagaactgtactgtaaactggcttatcgtcacttgcaatagactccagtttcccatcatgatacactgaagatagaggcatgtctctgcctgtagagtccagcaaacccattgccacaggaatgaacatgggttcttttactgattggcccggagttgggggtacatcttgactgaaaatatccaaccaagagaaaaactgtcagcagtgtcacctgaagaaaaagagagagttttcagcaagtatacctaaacttcaaagagtaagtgcgggcttcagggttgtaagctgatgtaactttgacagtaggagttccagcttgtgagtacctgaaaaattatttcatgaaaaatcagaccaattggaaactatggtcaaggagagaaaagaaacaagataaagacaaaccagtgtaagaaattggcgaaatctgcatcgttggcatcacgcatggcagcaaaaaagtcctcacaagtaacagcttgcccatcatgtctcttgaaataaagatccatcccctaaataaaaaggatacaagtaaaaccttccataatgcatcttcctaattcccatatgaagcaaacatattgtcattgatacaagtatttattaaggcaaacacattttaaatcttacttttcggaacccttgactccccaataaagttttgtacattctgacaacctcagctccctgatgagataaagcaagaagaaaaccgttcatgcaattaattattgttcttgtacacatgttcacatacaaacataacaaagagaagtgagagttgaataagaggtcaaaccttttcatacacctgttagcaagaagaaaaaaagaaccaagagtcagaaatttacttactacagaaaatagaaactgaaaagacacaaattaatactggaacataccgtcactgaaagtggaagttgtcccaaatcagaatcatttcaaatgtgagttaacaagaaaggaaaatctcaatgttaagagatggccagttcctgcaaagaaaaaactcacaaaaatcttcaccatagtgaaagttactgaaacatacctgtgtagaagttatccatctgccaaagcaggaaaaacaacattagcatgctgccaggccaatagctaatagaacattcaaaaggaaatgatatctaaccttaatgtatgagtgtggtcgtacaggatgggccatgggaccagcatcctgaaaaccaaaaccaaaatgacactttaatgtggcggtttatagaaaataaattatatatgcggataacaatatccaaaggcaaaagtcttcacctaaaaaggagaactagaataacataagtattttaaaaagaacctgtggaaattgatagtttctaagtctcataacatcagcaatccgcttcactgtccggctccccatgtcagatgaaaattcctattatggtaataacaaaaaaaaacaattaagaaactgcaacaaaaaactctatctaaaacaataggtgcaaaaagttacaaatgttactgtacattgaaaaagcttataagaggttatacctgatcacggaagacagtcaaaccttccttcagactaagctggaaccaatcgcggcatgttactctacaatgaatttaggcaaaagctcaattagactaagaacatataatgccaatcagcaattaagaataaaatacgaaaccaacttcaatgatgaaactagtttcaagtggggttgccaacatatcgcgttagataaataagggaataaataaggaacaaaatcccacaaaacgtgtagtgcacaaaaagggtacatgtttttaaatgaactaacctatttccagtccagttgtgaaaatactgcacaaaatgacatccaaaagttagaactatttccatctggattaagactactgacacatggctctacaactactgaaaaaatgtcaatatcaaacctcatggccaataactcccaagattgcggcataatctgcatctgaggcagtttcaggagatgctaacacaagtttggaattgaagatctgtaaataaataattcatgaagttattcaattaaaatagatgagggacctatattgtatgaactccaaaatgtgccacagatatacatacatttaaactcttgttctccatagctcccctgaaaattaattggaaagaaaagtattatcaataagtattaaaaagacaaaacatgagttaaaggtacctgaaaaaatccaagcatgattatgaaaacatgcaaaatcacaaaaaaaaaaatccataaaataaatgaaacttacatgttaaaatcaggaacagccacaatgttgaagagatccaggtcatattccaggccaaacacctgttattagcgacatgtaataataaaggccttaacatcataattaatagtactgagcttaaacgaaatttccagttaaacatagcaagagaaaactgacatcctcatcccatttcatagccgccttgagtgaatacatcgcatgtgcagtcttcggaacatcctgtgctggggtccagatccttagggacacttttcgacctgaacgtgtgacaaatatgtcatctctgctctccaacggtccagcaactaaggcaaacaagtagcaaggtttcttatacggatcttcccacagggaaaaatgttttccaccctgaaatgaaagtataaagtgttacaagccatgacactttgaaaccaaagtattactttacatgatgtcaaataagttacctccaattctccctgatctacaagatttccattagacaataggacagggtacagtgttttgtctgcttctatgtagcaagtatattttgccattatatcagggcgatcctgctcataatcccaatgcatcaattcaatgtaaattgattaatgaataaaatttagaaaataataaaaatttacaagtgcctagtaaacctgatagaatgtgattttgcggaagccctcagcttcacattgggtgcaaaaattccctgatgacttgtacagcccctaaattacaccaagtagatcttaagcacaatgaaggatcacaagactttgtaaaacatgaattttttaagaaaaagaaaaagaaaaaaagtcatgcacctctagagatgtgtttttctgaggatatatctcagtaacaatttccaaggtaaatgcaccacttggaagagatcgaagtgtcagatggcgagagtcaacttggtactcatcctcctatcattgggaaaattaataattatgagcatgtaataactactactttgtatttctagcacaaagagacacatgaaaaacattggagataaagtagaatctaaagttctataagcattggtaagaaagagaagagggaaaaaaagctccagttagcaattcattcctgtgaattcacatgcctttagttctttgccgttgattttaactgaaagcaacttcagatcttgaccatccaacaccaatggagaagatgaacctgcttgcaaaaaaaaaattaaaaaagtgtaaataatcttaaaaccataaacttaacagcagtctacttggataaaaaaaaaataaaaaaaacaggagtattgaaacaatattataagaaaatgcaaaagatttactactgagagaaataaactattacgcgtgaacaagaaatcaccacaggaaaaagtcatatagttccaacattatgaatcataagtggaaggaattgttcacactaccttcaactcttgggagcacagtaatttttgagctaacgattgttttctcttcacccagagtaaacttcaaatccacctgcattaaagagttgctttagttttacttattacagaaaaatgctcaaccctaaataaatcactttctttagaagtctatagcatactgtatcaaagtaataatctggcttcttgtagtcctttaaaaatatttcttttggagcatccatttcagatttgtcaacttgctttggttctgtagcaactgaacagaacaatctccggctcaagcgcttagtcctctgaaagaaggtcaatgatttcacatgacaaacaaaatgtacagatgaaaggaaaaggctatctaattgccagataggttatatagtggaaaactataagggaaatgaaatgcacaacatattccattaaatttcaaagcaacatacagatagtggaggaaatggaaaacaacgattccttctgcacgtaagctgcaaatgcaatcaacaatgaaattttgagaaatcttctgttcaagttaacaacttcaaacactttaataaagtgaaccattaaacacaacaaaccggaggaaaacttaacatgtaataatattatggaacataataacaaattagacattagattttattatggagaaagaaaatcaacacacctccgaactaaggaaacgcttatgtttacagacagtttttgctgaattctcaataaacccaacacgactggtagacctaggctgcaaagaggacaaggaaataaataaacaaatgcagcttcgccaaaagataaaagtacctcattgactgactctccactattgaataggaaacaaaatggaaacaataatatctcttcgtttaatcttttcaaagcccagaaaagcacacac

SEQ ID NO: 14195 - DNA, 2944 bp, Cannabis sativa
aaagattagcatttaatgtgttttgttagctcataatctgtagaaagtttaacactatctacaatctacatcctaagattgttagaaaatttactccaaagttcttgagaggtaaacttctaagctttgttaaaggttgaggaaagtgagattgtacaaagcttaagaaattccacaacttgactttgtaaccctttttcttttattcataatggctccttggtattgttcttcactcattattttctcttttgcctgtttgttgtgttgtaatgttgtttctaatttgtctttttcttgttttgttttgtgattttgttatagttttttaagtagtgacatttacacttaaaatatgcaccaaaacattatactccataacatgatttttgctttaatagtttgtggagtgatattaattataaaaaacggacatcacatcattatgtggaattttttacatatattttgagaatcactcacaaaacaaagaagaaaggtcaattttgatatctttactctttaacttggttaaacttaaacacaatgaaatcctctcatctagatgaaatttcttattaatgtaaaccattctttttatttagaatttatgtctttatgttatgcctacactaaatcatatggaaaaagatagtgagtgattgtccttgtaataataggtggtcttctcaactcaaagtacttttatatttttatgaacaaatatttcttattattatggtcggtgtgcatgtgtggcaagtataaaatggttgttgaattgaaatcacactaatcctaaagacccactttttggtttttgaatttaattcatttggatttatgtctacaaaggaaattgtatacttacatgcttacaactcaatctcttgtcttgatccaacttctttcttataaaactaagaataaatatttcaaatagttataaaccacaagaaagtacaaagaaccaaaaccattcaaataaattagtgtctaaacactaaggcaattaaacaaagtgttaaaatatagttattatagcatacatcatagttatactttacaactcctcaaacaaagttgaatgactaagttaggaaaagagggaaaatttgagaaaggcaaatggaaaagttggaaaatgagtgacctaattaaaaagtttctaaaaagaagttggcctcatactcatagtctacatggaaatccatgaagtcttcactaaaaaacaaagctcacatggctcatctatggcatgccaaccttgttaaacaataaacatcactatcaaaattgtagtgaatcttctctttttcacattgatgtctcaattatcttacaatgaatccactccaacaccactacctacaacatagcatgtacttaaacaaaaaaagaaaggaaagaaaaaggtatacaaaatccctttcttgctctccaagtaatttataaaaaggttgcaactatattataagtcaatgcaacatctcaaagttcttctatggctaccaaaatgctaagcattccaagctatgggttcgagagcgagtgcagggaaattcataattcatgggaaagattaagtcaattaggtttagttctggccacccgaacaaggcaggaaaggcaacaaattagagagacttacaaagcaatctacggagaggacttggtaaataggttgcaagagcctaaaatagcgaacaacaacaacaaaagtgaaatttcaccaaaactatgtacaatcttgtcgttgtggatgcttgatcttcctgaacgcgatgctattttagcgaggcaggctctccaacaagatcatgacatcaactacaaagttcttgttgaaatcttcattggtcgaaaatcgagccatatacttctaatgaaacaagcatatcatgcaagattcaaaaggcaatttgaccaagatattgtcaatattgagcctcctaatccttaccaaaaggtaaccttagcaagctagttgtgattttttttttgtgtaaaacttttagggatgattaataaattatgtgtttggtttttagattcttgtggctttgattgcatcacacaaggcacaccatgttgatgttagtcaacacatagctaagtgtgatgctaggaggctttttcaaactggtgaaggaaatctaggggcaatagaagaagctgttgtgctagaaattctaagtaaaagaagtattcctcagttgaaattaacattctattgttataaacacatatatggacatgattataccaaggtaacatactaacatgcctcttctcttttagcttttgtttgaattattactttttgattttgttccaattcttttctatattactcatcaaaatagtgttaaacacatgttgatatataggcaatttgtttttgttttttggttttgaaaatatcacaacttatgtatacattggaaaaatataatttttttcatatgcataaaatgaatatattatattggagttctggtaatttgagtttagtttgcacttccaattaatgcctttagaattttatatttttaatcataaaacaatgatatagaaaatacgaaggaaggagattttgaaatataaaataaaaaatttagttaatgtttgtcatcataactaaaaaattattttttgtttttaaaagcaaaaaattattttttaaaaatagttttcaaaaaataaagttacaaaaaacaagaattttgagaataacaaaatgttgttttctgttttaaaaaatagttcatttttggtcaatattatttttagaaaacattaaccaaacgtaacttgtgttttgaaaacttcaaaaactgttttttgtttttatttctaaaaatacttttttaaaatcaaaaaattaaaaataatgtcaaacatgctcttattttcttcgtaattgttaatgtaattttttttt

SEQ ID NO: 14196 - DNA, 15884 bp, Cannabis sativa
tttgcttgcgtttgttaatgccaccaaacaactttctcgtatcaaagcatgccatctcggactgtaattatttgattaatatgcaatgagccaacttggattcccagcgtctttatcttgctcaatgacctcaaattcatagataccataaactcaatgttgccgtggtcaatgcatttcgtccactgtacattttaaactaagttttcaatgctgatcttttcctcatgaattgtgctccatatgcggcggttgaaccaacagttgttgacgccaccagccaactgcaccaattttgggcaacttagtggactgactctcataaaaatacatcaaagaagtttcaaaaggaaaagtggccacaactcacctcaagtatgtgatatatatctgagtttcctgcgttccaaaatctggttgaagaagtgccccagcaactaaaatcaactggaagaccgtgttgagctgtcaccaagcatggtatttttcagttttatatgcaagaactcttacatctcattccaacaatagtaaccttctcataattctagggataaccagtgttgaagattataaaagtaaatcaagatatcagtaatcccaagaaactgcataataagatcaggaactgggaaaagaacaaagcgtaccttgctaataaaaagtggctccaccttctggggttgggtcccatccaggttgaaaaaatcaaaccagcttttccactgcaagaatttaacaatgcataatccagtttttagcttgaagatgccaatgagagtgggagaaaaaagtctattataactagttaaaattttgcattatcacctcccagcctaagctactggctcgttggtacacagcaccacctacgagtccaacatctcgaaaaacaacgagtccaacaagtccagcttcataaacaaagttagataatgtcaatttttattgaatttgtacgaaaatgaaagactcagttaattctcacattaagacttgttggcacattttagctgatatgaatacattatatgcaaacacaaaataaccaataacacacgagaaactcaaaccaaaccacttacggtgaagaagatcctggtgtaccatagccaaagcaacagatccaataagaacctgtatatcatggaaaaattgattaattaatgaaacataaaaatcgaagcactaagtatacttataaattgagcaaaggttacagacatagaattacacccaaaaaatagaaaagaaaaaaggattaagctttactatcatttaccttgtcagctaatggatcaagatatgaaccaacaacagaattgatccccatctttctagccatgtacccatctagctacacgatacgagaatgagtatgagaagctttgttcgttatcattatgaatgtgagactaaactacattgcatccatacccagtcagttgctccagaaattgctaaacccaccattgctgaagagtaccattcattcataatcatcctgcataacactgtcaattacaattctcacaaaatcaaacaaaatctttgtattgacttagtcatgaagaatgaacaataccatccaagtacagggccggaaattaaccgactcatggagatcacgttgggccaattcacgaaaccgccggtccactggctcgagtcaaccgcattcgtcacggtccagtcggaaggcaccgaagcgaagtccaatttgagcggaaaattgggtctccgccgaagaaggtggaaattcaaggcttcgattttgcgtcgaacgacggcgtttccgcggaggtagagaggagttgcggactgagaaagcttccatggctgcgaggatgagatgaaaagaggtccctgaaatggaataatccaattggaaaacggagagaggaatctagcagaagactgagatgggaagcgaaatagagggtggattaagggattggctagaggggcgtagggtggagctgagatggagaaggttgtggctgtgacgaagcttctggaatttttagggttcgcaattagagccttgagtgacctgtagatcgccattactgaagcttactgtagcagtaatcacaagtaacagaggaagaagaagaccattattaggttttttctgaggtttagtcttagggccttgacgacacgtaagccagtctacgtgtcatgctgtagtggcatcacgtggattcatgctgcggaacacctaacctgacccagccttttatccaaaatcttttgttacctaaataaaagaattgctattggagactataggagtcttttgtgattagttaatttctgaattaattttttttaaattatatataacttcatacataattacactaataaataaaaaaaaaaaaaatactaaacactaataatattttttagtatttcagaataatatatgtttatccatttactcgttgaacatttctattcaatctcttttgagatttggtgctttcgatttatttggtagcgtagatcaaacacattcgatttataaggtctcacaaatcggactgatcatttatgttttggcatcgattgtaattttttactggtcgacttggggagatactttctgattggtaattataaaagttactcatacttttttgctcgcatcatattcatatcgaggtgtttttttctcatgtaatgtgtttttccttgtgcgcaatcttgggatcgagtttgccgtcgactccttgatgtattgcccttgatgtgtttttttcgattatggtctctcacaacatcaattcctatccaagaacaattcttaagatacttgtcttgtaacactaacattatcatatatggtagaatatggttgttgaaaagtaaagattttcacaaatatactacatctaaatataattgaataatgttgttttctagtctcatatcattatcatatatggtagaatattgttgttagataataatctcttagaagaggaagttggtcgatcgatagatctagcaagttgacatagacttctctacaaaagtcgtcttcacaaaattatgatcagtacttgatttttttaatcaaactattttattattattagtggactactcacttgaactccctaatggtttctgattttctttttttttcattatataacaatttaaagtgtttgtgaaatgtaatcgtggaagtcactaatcaataacttaattttatttgacactcaaacttaagttaatgctactaccaataactcaattaaaatttcatcaaaccttatcagaattgaaaacataactaattttcaacttcaatatttcacacttatcatgatagaataaccttttgttttttatttcttctttttgtttttaacaaagcttaatgaaaatgtacataacattaacaagttcatagacaaagaaccaatttgagtacgttgtggctagaaatgacatagataaatctctcttaagaccaaatcttctaaattgccattgaaccatcttgagagaagaaaaaaaactgaaaagaaagactcaaacaagaagaagaagaagagagagagatcataaagagtcaatgatcttcagctctctgagtagtagtatatatatatttatatataagaccatattctaaaggtcaaagtttcttaagtcatctctaagaatcctgtaactgaaagcaggaggtccattcaagttgaaccgatttctttcatcaacttctgaagcagaacataaactaggaatgaaactccgagaagggcttctctgttttcttctcttccaactcataatcatcaagaacttgaaacttggccaagagttgttaccacgcttagaattagtagtagaagccatatctagaatctggggtcctctgggcttgcgtgaatttccatggcggtctacctcaagcttggtgaaatactcaatttccttcctcacaagtgatcctacagtgcctctagtacctattgctattggagctgttgaacccatttctaatttcttcttcttattttttttttggttcagagaacttggtagttgagattttggctttatatattgcaattttttttttttaattttttaattttattattgaagatgacgtatgaggcttcaaggagaagaaagtggtggtccaaggtctttttcttgagggtgatttcaagttcaatgtgtgctttggacataaagcatcttctttagttattttctttttattatttttttaaggctataaatctctaatagtagtgtttgagtaatgttttagtgatgcttttttgttaaagtgcaaaacatgagtttctgcataattggtggtttgggtaagaagtgacaccatggggtctatcatattattcattctagtgtcttttggaataaaagtatgcaaattttgcggacaaaactttgactattttgactatcatagccccccatttgattgagctttttgcacacttaacgcattggacactggatcatgatcaagatcaagatcatgatcacgatcatggtggtggggtagctaatgggtttcttatagtatggactatagacgaatttgaaactcaccagaagcatttttttgctcatcagtcaattttccaaacatagtttttcttttcttttttatttttctaaaattaataatgataaatagaaaaagacaaaaataagtgttttccaatgtcgtgccttaagccttgacttgagagttgagaggtaaagtaagaacataaaggttggttgagttgagtgattacgtttaaaggttttgtggaataagtttgaaggaagaggaacaccacttttctcgacatatttagggttcatggttactattaatcaaagttctaggcaatggaacaggacaaccttgttactttctcattttccattttatttttcaaacgttgtcatacttggttggtatgtgagcagctactgggatttcaatcattcaatgcatgagggtcctaagattaaatttgatttcatcaggcaacagtaatacaggaaaaaagaaaaagaaaaagaaaaaaagctccttcattttttttttcttcctttttgagatttttgaaaaaaaattggcaccttcatctttaacattaacactcaaacgtcaaaacatcaataaaatccattcaaagaagggaaaaagcattacagccattaattaaatgtatgatattgagtgaccaccagttatttaaaattataaaagtggctgcttgaatttttttggagccagccaatattcaaaattggatgaaattatgttacatgtgaaagttatctggttgagtccacagttgaaaaatataaaaaaatttactctttggaggatacaggggaataaagtgtgtttgcaaatttacaatcagtggtcaatcctaatagtcattattagggtggtttgctaaaagttcaaccaagcaacgaaaaattaatgacaaagcaacaaattatcaactaattacctttcttatgttgtttttactttatcactttttagtttacccgctgtaaagaaccacatctgttttaaacttctaacagtaagtttttcttttctttttgtaaagagaaaaacaattttgcttttcttcaagttatttgaaattatattctcaaaaaataaagttatttgaaattatgaaatatgttaattaatggttcttcacgtttaaggcctcaaaacaccttttatcatcacaacaaacttgccacaaatatttgcttaattctataaaatgaagtttttcagatgcggtcaccgactcttagacatgaaaatggaagacaacaaaggcatagatagatagagaacaagtcctcgtgccagctaggcagacagaagcaaaatcatgttatgtcatgtcattaggcactttaaagctaataagtcagtgtgatcaaattcaaatcaaacccaaacccagttaaaagtgaacatgtaacgtgggaatataaataaatcacataaataaaaatgcttctcatttaaaatattcaacgttacaatgtttagtagactaactttctttctctctcactattctttttttggtttggtaaggcctcaaaactgaatgctctctcttatttttctcaataaaataatcactgtcggtgtcctatactcactcactcactccctcttctctctttgtctctctggttttgtgttaattttcatttcctattataagaaatttattatctaaaaaattactgtatagttggaagatgacatgaatacctcaatttgcgatgtgaagcaagagcatgatgtagtgcaacgtccacattggctccctcccggaacaatgagtcatacagttggcatacaaactgcgacatttcttcctcatctgtatcccaaataccggtacagcggtcaccatttttctctggatcactgtcttcccaatcactgatggggctgacaggctcagtctcttcatcttcaccctcttcttcaccgatttcaaacttcccattttcataattactgaattctccggattcattccatgtgagcggttgtgtctcaggaggctcaactgaagagcatataacagccttggcacccgagtctagaaaagccttaatcaaagatgcagtgagcccatacatcccagtgcaaattataattctgtccctccaagctccaacctagaattatcagacacatgatacatatctatcaaattaaactatttatggggttggaggttttcctagtgtacaagatagatgcacttctaaggaaattatcaatctatttccaccattaacaaaaaaaatgtcattcatagtgttttatcttgttctagtacttgcattctagttgactgagtagatccttcaaatagcttctctttttaaaatctaaagttcatagcagcttaactgtgctcttgtgaagctattacttgtatataatttcattgtgcttcatacttgaaagcagagagaagaaaacagcaaaacataggaaaaatcttgaacaataagcctaccatccagcgaacatcctcgggtgttaagtgcatagaaggaactgttctccgaaacaagtatgccccaatttcctgatcatcctccataaccttcaaatacgacaagaaagatcaaaataattacaatttcataaaaacccaatcaatgacggaataaagagcaagtaactacttgtgtctggcgtccaatatatcggtggacaattcctccaatttggaagtaaggtttactcccaaccaaatctgaaacagttgaaatatttgcaagtagtgatccagcttttctgcggctccgcatcactgacaacagactcattttaacactttgtaggaatttatcagcaagctccccgggttcagcaaccacaaacacatcattctgccaactacataaataaacaatcaagaaattagaactacactaatatacctgccaaattcacaagacaagaaccttgttgaccttaatatagagccatgtgcgtcattttgaagagataaatgtataatgccgacttgtggagaattctgtaatttctcatgcaatgaacggactggtaaagaaagttgtcggggcccagcaggagatttcggtggtgatgaagcagccttggtggattgaccatctaaactcaaaggtgggaccatatcaattcgaccaagcctatgagttccaacatcgggactgaataaaagtgggcttgaagggaagcttccagtaaacataggtgatgcaaatggtgttgggaatgttgttgcagggattgtcttcacaaatcctgatattccttgcataagggataaacgtatcccgttccgcgaacaaaatgactctagtgcacgagcatggtgcaaaactcgcccagaatctggactatgtgaagcttctacaagcagaatgttacgtctccaacctaaagatgggcttttttcgcctttattacagcagaaaacaaaaataaaaataataagttctagagacaaaaatgagtatccattaaggtaaagcccatagagagacttaaataccagtacttgaagcctttgccttggagagatactgagacctaaaattctcagataacttatcttcgtgttggaaaggtagcagtagcctctcacaagcactcttaaaggaaagggaattgttttgaatatattcatcaactgcagcttccaacttcatccagacagctggatcagtctcatctagctccatatcacatcgttcatcaactgcagagggaaagtttttttttttaaacaactgcagagggaaagttttggctttaaagaaacatttactagttgagagagttaaagaatcttttactagttgagaaagttaagtaaatgacacagaagaataacattccaaattctttcaaccaaaagagattctacagtcacactttaaatcaacaagtacctggattaaaacgaaaatattgtatttcggggagcatagggagtaatgtgcttaaagcttcctctacccgatcaactgagcatgcactttcaatcaaaacttgtccagtatccaaataacgccaaccacctttgcgtgtctgcaatatcaaaagaatatataaattaaaaagctagaacttgaaagtagaaagaatacaactgttcatctaagttagatattttggagaaagagagagagagaccttcgttggtactgaaccgcacccaattgaaactaggcaatcaattctagtatcaggccataaaagttgtgcttctctcacggcaaagattgtaggattgtttgccactattgcaccatcttgccaacgatttgcatctgcagaaattgcagggcattaatgtagagaatcagtatcaggagagagtataacattgaaccataaaaaaaaaaaacacttaacaaaaaggtgaagaccattccaacaaaaacaaagaaaataccatctgagtaatcatcaagatagtacggtgcagcagatgatgctcgaatagcttgccatacttgatgtttacagcttccaataaaagcactgcgcttatagccaacttgagcacctgtagtaggggagcctaagatactgatggccgaactctctgaactcgcaagaggaatttctggtgttccagcagggtactaaagtcgaaaccataaaaaccaagggaaaaaaaaacagctgccataattcaatctaaagaatatgggttaaatcataaaaaacagcatcctgcaaaatgaattctaaatctcaaacctgataattacggaacacaaaaggctgagctggcatcacgctcaccaatgttgacacagcaaaaacctttggaacatttctcacagcagactctattaacagatctccatcctcatcagcgcacatttctttcaacaacctctcaaattcatcggcactgtgctgcaagaaactgtgtatgaggaagataacaaataatgacatacaaaatgccgtagccctaaaaccacatatcttctaaaatcaatcagatgtgcaatgtgttaaccactcaagattatgttatagaatcatcaaattatttgtagaattggttacatataagcttttcaaatttcttactgtttataataattaaaaaaaaaagactagagaaacaatatagggaggaggttttatagagcttcgatacgcactttagatccgtgtacaactaccctgaaactctgtgatgagcttttgtaaagttgatctaacttctctctccaagttgcagcctcattatcccttggcacagaatcagcaaatacaagttttcctaatatccaatatcagtagagaaaattaagttagagaacaaaaaagtacatttaagaaaaatggtgggggttggggtagtgtagcatctgtacttattaatttattaacgtacactatacttaccaagatttttatatatttcttcacattgagctaatgtcatcagcttgatgccaagggcaacagcaagcatgccacccgttgatgtgccgcatataaggtcaaacaactcatgtatttgttttccagtgcctttctcaatttctttaagaatctgaacagttgccagacctttcataccaccaccgtccattgagagtatgcgcaacccttgctttggcacctgtcttccccttatagcgcgccgtagattctcattctcccctacaagttcatgaaatcaatacaactatcacactaatagtgaaaacaacaaaaaatgattagatcctagaagactaaccaagaattgccaaagcacgagccgcagctttgctcacacgcggctcagatgcaacagtcaatcgcagcagaagttctcgcagactttcagatgtaaccagaagacgtcgattttcaaaacagaaggcaagatttccaacagctagcaatgctaatctttgtacctgatgacaaaaaacccaagctttctgaattagaacacagccaaaatgatatgatctctccattattaggagaaatagagaactcgcctctggatttttgtgggcacataaaacttttagtgacttcaacacgtctttggtcaacattttctgggaaacattatcagatgcaaatgccagcttcacaacaacttgcaatacagaaatgacttcctccctggaaacagacttaagcaccgtttcaatgggttgcatgatgtcagatttcatcaactgcattgcaatagatacatctgcagcaagagatgaaagagcagaacaggcttgttcaacctgccataaaacagaggcatttagactgtagcttagtaacagagtgacaaatcacaagtacacatgatagctataaaaaataccaacataccacatgacgatcatcaccagttatcatacttataagctgccggactgcattctcatctttaccaacaaccgcacggtttccttgatcttgcattatctttgcaagtgccgatgcaagcaaagggtgatggcaagatgaaaaccggaatataagagagaagaaggcacttagcttatgccttgatgcaacaaaataggaaacattttccatctgcattaccacaaagatgaatataaacattttaatatcagtacttggatagttcaaatacaaaagcagtcaccagtattgcatttaatattacctcaatatgcacattcactgatcttaaattatcatctgccacaatcctgatgttggcaagagacaaatgccgaagtttgtgaaggggcaggatttcaggaagaaattcaagaggattgccaaacagcctaagaacccttaactcagccatagctctgccacaaaactgaagaaaaccattaggcccagtaaaatattaaaggctccaaaagcattgctgaaatagaaaatagaacaatgtacaaactaacaattaatgttacaagaaatgaaacaatgtataagctaacaaatgtattttaaatcactgaaaaaaaatgacctgaaatcaaggaggggccgaacaagtttgttgtgttccaatgataattccaccaaaccaacacattgtctaagctctactgcttgatttcaattaaaacaaagagataagtagatcatataacctcttcaatgctgaagcaattttagtttaaccacttatgtcaagattaattcacaacaaattttaaaaatttataagatagataaaagctatcatgcttaccaggtactgaaaccaacatgttactgtccactctcagaacttttaagctcttcaactcaccaagctcaggtggtaaaagtgatagtttgttgttgtcaaggtaaagcttctcaagaagtggcaagcgagtgatctcaactggcaacacctatcaagtagttattcaagcagtaacgataagaatcctcaattcaccatagcaaagctctagtagctatcaccaaaaacaaaaatttcttacagcgctccccggaactgtactaggtgatacaactcatataatattctgaagaatggatgttcttaaatcatattgtataatctacgcttagtataattaaaatattcagtgtctaaattaatataaagtacatactgacaattagaatctagaaatctgtaatcaaattgtttttttttaccatagaagccataagctaaagctgcaaaccccaaaaagaaagacaatacagaaaagatttgcacatgaaaaagagcacaacagaaaggaaaacgactttctgaaaatagccaatctagttttttcttatgagactcaattaagtacaacaggttgcctactaaactcagatttcaagcacaatacattgagttggtctacgatgcttgaacaaaaaatttgttctcgttgcatgatccctctccgaaagaattagaagctattaattccatcaacgagataccggaaaaaaaaaatgtaagattttaaagactcaccgacaagccacaattacaaagactgagcaaagtgacggtcttccaatgctcgccacaaccggatacaccctcaccaacttcgggaagttttgaagtaaattcggaacgcaacaagcgcgttaaaaccccagtgccatcgctctgctggcctgagccggccgtcttgtttaaagagacggcccgcaacggttccctcctcttcacgaccttcatatcaacacctacatttcgatcctcctcatctgtcgtcaactcaacaatcaccgtgtcctgcggcatcggcagtgccaccatcagttgcgactggagcctgagcgcgacctggtcctcatcatcaccacccgaccaatccaaatcgatccgaaaccccagttcctgatcttgagacagtacagacgaagacgaagatggggacaaggaggacgatgaagacgaggatatacgtccaggattctccgccggctcatccgagccgtagtttaaaataagatgaaagacctcagacggcctcttccagcccaatccccaagacattgtcactaaatcagatttagagtgacaatttggctacaatcggagtgacctaaaggccggaaattgaggcggcgtcagcgtgatcatcgcggtgattgaatcagaagggattgtttaaggtgtaaaatgatggaaacatggtgatgaagaagaagaccagtgatgatctagggttatgatttgaggaagaagagttaagagatcaatggcggagtagaccagactccgcaccaaccaaaagaagagcttggagttccaaacacagatgagaaactgaaaccaacgatttatatacattttccatttttatggttctaacttctaagtgcaatttcgttaccggcaattttttatgattaataattaatataattattaattattattttctttctcctttaaataaaaaatatatattatatattattttgtcatgcaccttacacaattcaattttaatttggttttgattgtttatgtattaaataattttttttaaattttgatatttattaaattgtgtctcactaaattgtgttatctaaactttcatttatatcaggcttctattaataaaattgacaaaaaattttgaatttaataatttcaataatagttcaaaaaaaaaatttaacaacctaaagaattcactaaacaattcaggacatgagccgatacatataaaattaagaggtgaaaaatctaattaattgtttttatattaaatgataaagtttttttttaattattatttaccccatttaaatataatattaatacatatagattcaaacccattaagttagtgtaataaaataaaagttatctatttttactattttttattttagtattcttactattttcattttactatctagtgtaagataaacataaattatgttatagctagtttatcttcttttacaacttatactataaagcttataattcaaacttaattatttatttttatagcataatatatgattggcaacaaattgtcttttttttccttattataattattttttttctccatgtgaaatacaataatgcatgaaagctcactccgttcctttccaaaaaataaaactcaccccgttttatatattgcttgatgtatttagtttctgacgtctagtgatgattaatgttctttttacttaaaaataatttatgcttctaaataggcaacttgctttcttttatatctttcaagttaactacataatattgaataatcaaaataaaagaaataaaacacttggggtcatactaaccgtgaacgtgttgttttttcttttaatttattttttaaatactagaatagagcttcaaagttctctcgattttgcctatatctagtaaatggtaataagtagatgtagctgtagcttgtatcattaactccacgtaaatgaatcaacatctcatgttaacaagtggtgtccctattatattaaaccaatcaaaatttaacacatcaattaattttttatttataaaaaaattaaacctttaataaaatcaataaaaatagttatcatatttaatatgaattaaattagttaatgtatcaaactttgataaatttaacacagcatgagacaacaatttttaacagaaaatcttaattccacctaaataaacttcttgcatttagttggaggtaaaataatttttattttacttttgcttgattttattttaaaactattaaaatatcattcatattctaactatgttgttattctttccaaccaaacatcatctaatagagtattgttatatgagtttaaattaaaaaaaaattaaaagaaatataaaacccgaatcttaaaaaaaaattaatattactccaattttaatttaaaaaataaaaccatttataaacacaaacatgttaatcatcaaaatttaatttaaatttgatattttttattcccatctaaacatcataccaaacatctcactatagttttactaaaactctacgcaatcacaattaaaatacctcctttcttttcttacgatggtcatttagtcaataattacctgctcactatgtccaaggaccagcctatattttatttgcactgctgcttttaccacctgttgaaatcttctgcaccacgtgtttttcacaaatgcgtggaaatttttgcattacaaaatcaacagatagggaaaaagagaagtaaatgggtcaatttcttccatgattaataatggtttcaccatgccaagaaaattgtaacactacagtgaccatctagagtagcagagtaaggagacgcatgcctgtgtttgtttgttttctgctgtcactcattcatgtgacaaaattgcaatcatgtggggcaaaccagagccaccaacttgaaatttgaaagtatataatgttcctttttcgaataaataaagagcatataatatacttaatttctttcattccgtactccatactgataagaaaatttgcatgtcaaacctgaagatgtgtacttggccaaaaaaaaaaaaaaactgaagatgtgttggcatgaatagcccagatacatacaagtacttctactagaatacaagacaatgattttcattataacatctctatcagtaaatgatgatttaatccatgagtaataacagtagatgagatgaaaacaggaattttaagtcttgaaacaagggggcgaatggtctggaaacaatttatcgagaatattgaagtattaagtcttgagtctataatcggtccaacaaaccaaggatctattagtattgactactcaggccatgttaagaaacctataagtgcaaaagtgccagaacagtctcagacataataggaaattcatattt

SEQ ID NO: 14197 - DNA, 6023 bp, Cannabis sativa
  modified_base (701)..(712): a, c, t, g, unknown or other
tgggcgtttgcccagaacatctcaggttttgtggagccctcctcgatacctgatgctatcctttgtaatgaccgtgaggtctaattttcctatctatctaacactttattttttttaaaaaaaaaaaagaaaaagaaagaaaaaagaaaaaaaaaaaaaaaagaaaagctaaaagttttatcttttagctattataaagacaatgatgagagtgctattagtttattggatagttattggaattttattcttaaaaagaaaataaatgaaagactatattctaggaatgagaattgttttttcccttctcaagccttaaccgaacataaaagaatttgtagtttaactctcatttatttatttaaaataataataataatttgtttaaggaaaacaataagatttttcttataaaagcaaaatagtaatgggtgcttctacaatgcacttttaaaatggatgtattgatgcattctctacttattttggcatttagaaaaaaaaaaaaaatagtctattttttctttcaaattcgtccacgttttaattatctaagatatcttataaaattttgagaaattcagaataataatatagaaagtaatcttcaaccgtttatttcacacgagtataaaataaaataatcatgcgtgcaacacaatgtttgatctctattttcggtgtgttaaatttttttaaannnnnnnnnnnnttgtaggatgtcttaaataactatgacgtacattatcatgataaaaaatttgactaaaaaattaggagaatcactccatataccgctttttaacttttttttttttaaatttttactgtttgaggatctccggtggttgttacatgggttgtgatgtagatttgggttgcgatttaagttgctcagtgtattttcttataatttttttttttttataaaaaaaaaaacactaaaaaaattcaaaaaaaaaagttatttcagattcgaatttgtagaatttgtaaaaataatggaaatttgaattggttaacgacataccgttttatctacaaacgacaagaagttatgaatcgacatgtcggaaggtgtgtcgtttaattatattccaaaaccaaaatcccacggtgactgcgcgcgcaggttcaagctctcgtctggttcactaatggcgaaccttccgattgtccaattcgaagagaagatcatagaaacggtggaacagaatccggtggttgtaataataggagagaccggttcaggtaaaagcacacagctctctcagatactccacaaacatggatacagtaaatctggagctatcggcgtcacccaacctcgacgggttgccgcagtctcagtttccaggtttgcatttaagaaaattattccatcctatgctacgctccatctccgaagactgtacgagattgtttaactccactccacatactgtgaccgcagacgagttgctcaggagcttggtgttcgtctaggagaggaggtcggatacgctatcagatttgaagatcgaacctgtgatagaacctttattaagtaaatctgctaaggctttgtattgaaatttctttgatttcttcttgttaccctctttttgcttaatgcttgttgtgaacactcttctcagatacctaactgatggtgttcttcttcgcgaaagtttggctaatcctgagcttaatcagtactcagtaataattcttgatgaagctcacgagaggagtctaaatacgtaagtttcacaagcctacgattacttttgctaatttgtaattgaagaaatgtaaaggggaaaattttgtatttgtgtaaggagtattgaaaagaatcaaaaaagggtttagtgttggagatgaactagtaattatacattgaattattcttcctaatttcagtgacatattgttgggattgatgaagcgtttgattaagaggcgtacatcaaatttaaaagttctaataacttctgcaactcttgatggtgaaaaagtatcaaactttttttcaaattgcccagtactgaatgttcctggaaagctataccctgttgaaatattgtacagcaatgagcgtcctaaaagctatcttgagtcatgtttgaaaacagcgcttggtatgatcagtgttcttagtttcctctttgcttgtaatatacttcttttacagcattagtatgatgatttaaccgatttatttataaaagagtaataattgagacactcaaattttatattaaaaaacattatactaatgatttaactgctcatatatttaaagttggatcgaatcatttttatgggtgagtaaagatgcatgtcaaactatattgtataatgttttgatttgagtatgaatgttgtttgtccctattatcatttttttttctctcttttatgagtttaaggaatattggtacttatactaaccaataaacataatatttttattagatttgcatgttcgggaaccagaaggtgatatcttagtatttatgactgggcaggtgtggcctctctctctcactcttgatgtgtggtcgggtagggtgttttttggggaagggggtgttcgcattgtatatgttacaactttgtgtttgtacccattttataactaatcataaggtttgatcttaggatgatatagacaagctggtatcaaaattagaagataaaataagaagcctagaggaaggatcttgtatggatgtgataatccttccccttcatggttctttgccacctgaaatgcaggcaagtacctaagtacttcagcttcccccttctcaaggatatcaatgtctttaaattttaaataagtgtccttgtctcttatcttttttgaccctgcaggtacgtgtatttagtcctccacctgcaaactgtaggcgaattattgtttccacaaatattgcggagacttctttgactgtggatggtgttgtgtaagagtaacattcttgctttagcatttctgttgtatttgctctgcctgttcttgtttatttttgtttaatctgacagttacatatctacatgttatgtgcatgaatgataggtatgttattgattctggttatgtgaagcaacggcaatacaactcatccactggcatgtattcccttgatgttgtccaaattagcaagtaagaaatttttattgtcattatgtaatgtatttgcttttgtatttgttgctttccagtacattagttaatttcatatttttttttccacaatttagaaggtttattttgtaaatttttggtcatgatcctggttaaaaattaaaagatgggttgagaatgagtagctatgcctgctaagctacggttttatcatatatgtctaatagaaatcttatttttaacagttatatattctagttgattttgggtttccttaattgcagagtacaagctaatcaacgtgcaggtcgagctggaagaacacgtcctgggaagtgctatcgattgtatccttctgctgtttacaatgatgaattcttggatgtaacaattcctgaaatacagcgatcttctcttgctggaactgtcctttatttgaaatcattggaccttcgagatattgatattttgaaatttgattttcttgatcctccttcctgtatgtacacgttcttttgatagtttttgaatattcctacttttggtttctttttattgtcggttagttaaaaattacaatattggctttcttgatattttgatttgatcttgttgtctttgtggcagccgagtctttagaagatgctttaaagcaattatatctcatagatgccattgatgaaaatgggttgatcacgtcaattggaagaacaatggcaggtttgaaattctgagtcatttttgatagttaatagtagcttcatgttgttatcacttgcatcatgaaataaatttcagcatttttgtttccatggatggacgattagattctatgagagattcctaattaaccctgtctccagatttgtcttttttctttataatacaagtatgacttttactattgcaaaacttgtgtgttgggcaaaattatatgtaaaaggactagtatttagagactgtactgacttaaatgattttttgcagagcttcctctagaaccttcactttcaagaactttgattgaggcaaacgaatatggttgcttatcccaagcattgacagttgcttctatgttatctgcagaaaccatgttgcttcctggtagaaggtaaattatgaaattttcttgggtagtgaagtttgttaggatgctaccatgttccactttctccttttcattttcctggcccttccagctttctgcctttccaaaataccaccccttcccccaatttttttttctcttttccacattcctatgaaaagatcatttattagctaagcttttctaaatgcagcaagaatactgagaagaaaaggaaacaggagcatttggatcttcctgatggatctggctggggtgatcacatccagttgctgcaaatctatgagtgctggcatcaaactgactacgatattgattggttaaaggatcacggcttgcaggtaaagaaattaagatgagtttatgactgtcatgaactattcaggattaagtgactaggttctgtcacagagattatctaacagtgttatgatgagtttattcaccttgattcatttgatctttgtggtgagaagaaatgaatcctaaccatacgcatctgttatcatacatgatgaagcataacatacttgaatcctactcaatgtaggtgagagggatgaagttcgtcaaggatgtaaggagacagttgggtcagattatgcagaaaattgcgaagggttagtaagctaattctctcatagtctttaattatgtttcaaattactacttggattataaaacaattttagacctacaatggaaaagaaaaatgaacaaacttatataaatttgattccatgtgttttcttcttccagtatttgtttcccctttcctatattcctcatatctgtaggtaccattttgacatttcatcttctttcttgaaaccaggtccattagatgtacagacaagccgaagacggagggaaagcgaacaggactattactatttgcgaaaggcgttgtgtataggttacgcaaatcagcttgctgagagaatggtgtatcataatggatacagaacattaggttttaaacctcaagtagtacaggtatttgtttatttagattattataatttttctaagtttactagtgcataattatctagaagctgtttaacagaaccctgcagttttatgtgcaccattaatggattctggctagagatatactgctaattgcgtggaatataccttttgttttaggtgcatccttcttcggtgttggaaccagacgatgaaggtaaactaccagactacattatatttcacgagctcattgcaacctcacgcccatatttgcggacagtatgctcagttgatataaaatgggtgatgcctatcagaaacaagttcagtaaccttaatatcaacaaattgaggtaaatcagttttccaaaagcaatttcaattgcaaattcgtatttttcttagtcaaagtttaaatgcgaacgtgataccattgatcttgagattttgacttaatgcagtggtggaagtggccatattgacgaggatacaaatgggaagctctcagactcgccaaaaaaggaggtagtcaccggcactgctgaggtccaagatgatcgtgatagtataatacaggcagctagggaacgatttctggcccgtaaaggaaagaaatgaactcattgttcattgatcaatcggataacctagtgatttatttcaggctgaattagactacgtttgataatagagtcgatgtagaaaggaagaaatagagcacttattttttatcaattgggcttgcttggtatgagaggtaggaatgatagaagaatgtgtatgttttatttgttattttactat

SEQ ID NO: 14198 - DNA, 6591 bp, Cannabis sativa
ttttagtcacaagtaaccttttgttgtgactaaaagtcacatttaattacaaaaaatttatgttgtcactaaaagtagcagttttttttttttttttttttagtgtatcgtagtggtattttacattcaattaatagcttttaaaggtgctgggttcgaacttattatctctttctttttctcatccctccctcaccactaagctaaccttagtgtctttattttgagtcaatgaaaggcgacaaggcccttgccgaaaaataaataaataaaaagacactaccataaaactactatttaacctccgtgttgaaattttttttagaccgtcgctaataaaattaagttagtgtgtgaaattatcgttaatagtttggaattgacgacaatttataaatattactatgtattaccgacggttgtacaccattacatagtttgaaattgctgacggttaagaaatgtaagctaaaggggacatattatataactccaatctcgctcagatctcatttcaaacatttctctcatttcaaatcgaccttctctctcgttccagtagcgcctcgtcctcctccgtgaccgagccaccgctccatctgcccatcgaatcaccgacgatcactctccctcctccttgctctctctgtcgactctcccctttcttgttcggcggcgtccccatttccttcgttggagcctccgtgcagctccttcgttggggattcattggccacaggagttggtgtttgaggttgagacaaatgatgtttcttttggagatgaagtttgtgtttgagatagttttttaggtttgattgttgaggtagaagatggtgtttcttttagagattcagtgacaacgcaagatggtatttcttttgatgactcggtgactatacacgagatggtgatggagatgatgattgtggttcaacttttggaggtggttgagggtgggaagcagcagggtgagtgggcaccctgccaataggtttgaacactagtcaagaagcaggttcagatgatgttgggtgggttggatgcaacactatttaacactatagcttacagtttataactctcggctatactagctgacaattttaaattgtgggtgacgattttaaaccgtaggctatagtttttaccgatgattttaaaccataggctatactatagttgatggttttaaaccgtagactatttttgccaatagctttccactgacgcctattctacccagttttgtgacggtcaaatagacgataattataaagactaccataaatacattagttgactatttaaaattgtcacaaaaatccaattttttaatagtgagggtattttcttttgagaattgctatctaaacgtgtcaagactcgtttggtaggtcatatgaaggtcgtaatttattcaataacaagtaacattacatttgaaaaatattacattattaaaccataaattttaatacaatgtaagtcttattctttaatacataaaaaaaatctgtataagcctgtattatgataatattataaaaggtctggaactggagtacccgaccatagatatgaccccggtctcgaactcagacccgaacctagactccggacctaaactcgaacctcagacttagatggggtcaaagttagattgattttgtggtaaagattaatataattttacacaacctattaatataaatcatacaaaaaataatattaatacaatatacctaatacaatactaaactaaacatggaaatgaacgagtcatacgtattatccttatataatttaattaattaaattattattattaaatattactaactatttaccaaataataacaattaatttttcacatagataatacactctctcctctcaacagccccgagagaataatagtatgtgcagttgtgtacggtaataattgggatatggttccttgttcaaagaatcaaagtgggaccatccagctggctaccgcacttgatagtttgacacgtgtaggaatgtaactttagtgtcctatgccttcacgtacatattttcctaatattattgcgcccatttttctcctaaaaaatgcttcttgcaataatgcctttttcttttttcttctttaattacatttccatttctattttaagaacgtacatacgtttatgatgtacaattttcaagaactcatccaaacaaaataaaagagaagtttaatcaacacttaataattgctataaaattgttgtgatgatgactggactggattgtgcattaattaaagtatggcatcagatgaagaatatacataggtaaaaattgcagcctccaaatatttttgtttccattaacaattttaatctcatcgccgctcccatttgtgtttgtatatgtatatttagattaaataatactaccagctactcattttgtctacggcactaagtatctaagcccttgattataattacactaaatattattgtatacatatatatatatttttggataaataaagaaatatgattaatatttgggcttcgtgaccttgatgatcccgtatttatcaagtgagctaattaaataggtacacaatataatgagaaaaaaccttcctataattaagtgtttttgtgtaatcttcattttttttttgacgtacatttttgtgtaatcttatatatatgtagttctgtctcttatgagtgaataagtcaattaattatgcatgagttttgctgccctctaaaatattatgaatgtttataaatagtcatgcatgtaatgtaacctaacgtagttggggtacacatagagggacgactagaatacggacaaattggaaagtaacaaaataatatcacgatgaagaaaaaataagttatggccggggctacgtatagtaaagagcatatgacagaccaattaattaataacaactttcttgcaagaaagaaaaattaataacaactatcctttgtcagctagacttgatgaataacgtggcttttatttaaattgggaaatcgggttgaaaataataagtttgaaaacttgaataaacaaaccaattgttaacctaaccatgatactttgccaaaaaaaaaaaaaaaaaaaacctaatcatgacctgtggtttgaaaaactactccttatcttaacatttcaccaatatttatatattatcgttattgaaaagaaaatcaagtttgataggatataaacgtcatttaatagttatttttgctatttaataaaaaaaaatttatttataccctaaaatttgttaaagatagctattttaatagtttttattttatataaaatttatatttttaattgcactaagtttttttcaattttttcattcaatttatattcttacaaaataaacctatcaaataaaaataaattagattttaaatattatgagcaaaaattaaaaaaataataatatgaattttttttagaaaaaaaattgtatacatgagtttaaaaaaattatgaaaataaaattaaaataaattttcaaattaacataaaataatatggaatttttttaaaaaatatattaagagtaagtttttaaaaattatttaaatttttatttttgtaataataaaattatatttattattttataaagtccaaatagaattctctttattaaaatatagaaaattaaagagaatgactgaatatatatgatcttgaagtccggcttgtgaaggatttcaaaaaaagaaaaagtcggcttgtgaaggctatatatatttaggttattttatatgcaaattcattgtattttcattgcttttttttcgatggaaaatttatatttaggtaattttatatgtaaattcatttgtattttcatggtttattttttttttatgaagtttgtattttcattgctaaaactgagaaatattttttttcttgtcttttccttttttaaaatattcctctaattttggattggccagttaattcaccttatcttgttgaaattcttagaatggtaaataaatttaaaaaatttataacaaattatagaaatgagttttgtctctctctttttcgtttttggaaaataggttttctcttgcttatatgtttaaataatcttattttgaaaacggctatggtcatagtttctatttgttgagacattatccgaaataggaactcaagttgatgatccacaataaacaaaccgccacgtcatcaactccacactaaaatttttacaccttatcttatccaaaaaaaacccagaatttcagagagcttgttacctaaaggggtctcaagctgatgtgataaccacatcaccaacaacttccatcaagaacgtcctagagttagccacgtgtcaaaagccccgtcaccgttgtttttgtttcttacctccacgacctgaaggggtgtcacgtgttgcacgtgcgaatgccttgactagtcaaacacccgaccgataatgtgatcgtatggctaggaacccagctaatgaaactaaactatattataaaacttgttaatttatgaaaagtgggggccaatttaattgtttagaggaacaattggggggaggcgggtgcaccaagacggcaggtaggcccgcacccaagtggaacgcatagtgcttggtgtaagtgagggttttggggaatgttagagagagagattatggtatggtgtggtgtggtttgtgtgggagacagagacactaatgcaaatctttgaccgttgacttttttttttttaaaaaaaaaaaatagagatatttttcttttataatttaacatctcgagagaaatggtgtgaataatgcttaggcattgaataagtgtaaatcaatttaatattgaaaggaaaagatgtgatcaatgtattatatatttgtatataattaaatttttgtgtgtgaaatcctcaaatccctcgtcttccccattgtgtcccattatttatgaattttattctttgttttttttttgattaacttattattacttgtgatgatgtattggttgttgttacgtacataatacatctaattaataatagattgatttgtatttagtgaatttgtcatgtaatgtgaaatggatttttaatatatctcatattaaatattgagaatggttaatgttcattataattgttggtgttgttaaatataagatctaatatatttaaaactttaactcatattggacactattaatattatagtatcaaataataatactcttaaataataaataactaattgtctacaaataattataaaatttctagtgttacgaaagagtactctttatagagattcaaacattgtaagatttaaataaactttttgttatatgaaagatcgccttgatgatgtggcacaaaataatatgatccatgttagtttacaaagggattgagtgggagataagtgtcgaaaagactatctagaagatcgctggccagaaaacctaggaagtaaggtaacccaacgtcatgtgtaagttggacggactgtgccagccatcacttcgagaaactaggaggacatatcctgaatggatgtccaaccaacaacctcgcggaggaaatgtacatattcatcctaactacctaatccctaccagagctgtcttaaacatttttaaggcgatgttcttatcttaaaatttgggcccctaacaaaaaaaaaagtgcaattaaaaactaataattttttcaaatattacggtgctactattatatattttacaaaattaagcacaaaaaattcaaactattttattaaaattattatttatcccaaaaataacaataaaagtggaattaagaatagaaacaacctttaaaaatggaacttaatatcgttcctttaaaagtgggaaggaacagcgttacatttcatttattagaaaaaacttaaaaaggtaggtaaatagattgggccctttagtttattgggtcctgggcaatagaccaggttgcacaaccacatagtcggctctgatccctacagaataggtcaatctgggtgcctaaaagtgtgggattgcgataatcaagaaaattgaggatatcctgtgattgactcaataaaatccgtacttgtttaatctgtaattaaatataaatattctacctcttcctcactataaataatggattatattacctattcagggactggattctgcattctcaagagagttattacgatatcaaaatacttgtaacctttacagtacagataacaagaaactcacttcactagggtcatgtgatcttattatttctcagataaatacaagaaaaaggggagtaggctattatcgaattcgttttgttgactctgtgtcattgaatagaaatgaggtcaatattttagtaatttcattgagagcaaaatccttcattgctctttgcacacgatctatgttttaattatcttcgattcatcttcgttgtaagaataatggttcaaacaaggagggtcgaattgttgggattttatgccctaaataaaacccatttcaatgtaatctgatttgttatcaatagaa

SEQ ID NO: 14199 - DNA, 7288 bp, Cannabis sativa
acaacccaaatgtacaactttagttatagctataatcaattgtgtcataagaaataattttatttgcaataaaaaattatttccatttttctatgattattttttattttttaaaaaggactcaactaactgtagatatacatacaatacaaagtagaggaaaaagtggtataattaaacatggcagtggccactcaaagcaacgttgctttcgatagacttcaaatggccgagaagtaattctctctctctgatcaaaacccatatacgaacacttcccaccgccatttttaaccaccgctattcttcattccatatatacatttcttctgcatatacaacatatatacacatttatatctatctatatttgttcaattacacgagctacggctgttctggagtgaaatttgcttgagaaagaagaccttttgaagctgaattcgattgagttcagctgaattttcaattgggtgagacatttatggagaatttatctgccttgactttaaccgaatccgggtcaatcggagtcgggctccaaaatggtgaatccgggtttgattcggttcaattcggggaagaaatacagacactgatcaccgtaacgccggataacgcgagctccttcactgcgcttttggaactaccggcgaatcaagccatggagcttcttcaccatgtgccggaatccaatggaaataaaattgccggcgatccgctccacaacaaacccttccctcaacaactaccgttcggttccaatctgacatttctttctgaccccgcgttgattgaacgcgcctccaagttctcagtgttcgccggcggccaacactcgccggagacgacgagttcggttccgtcgaactcgagcgctaatttggataaggtaaagaacgagcctacggagaccgattcgaacccgaactcatcgcagccgttggtttcggatccaatggtggaggagaagagtcagaagcccttaatgaagaggaaggagcgagaaaagaaggttagacaaaaattagggttttctattctagggttcctctttttgtgaggcaaaattattggtccatgaaagtcaattgaagccatctttctcttttttttttttttctctctttcgctatctgaaaattcaggcaaaggtttcttcgaagaaaagcaagaatgaaatcagagaagacgcggagaagcttccttacgttcatgttcgagctcgtcgtggtcaagctactgatagccatagcttagcagagcgagtaatctcttaattaaacttaaacccattttaattagtggctaattatgattaatgagtgattaaagatttcatttttatggtatttttctttctaatcattgcaggctaggagggaaaagattaatgctcggatgaagttactacaggagctcgttcctggttgtagcaaggttggttttttgttattttttcgattagtcaaattcttaattcttataattatatatataatataaagttgattgtgatttggttgatgtattatattcataaacatctctctcaatatgatttggaaaaggctaattatgtgttttaagattatgtgtgtcttttaataacggttttgtcattagtacctttttctcaaaagtgcctcttgcctttttttttttttaaaaaaattaaaaataaaaataaaataggattattattctcttgggtccttatttttcttttctttttcttttatgataattagtgcttgcttgcttttgtaccaagagaagtgcttgatgagtggctcccagtgtagcagtattagttttttttactgcacttgatctcttttcattttctgggatttttcttggggaaacattgggggttggggttcggtgaaatgtcccttttgaggttagaattgtcattttcaaaattattgatactcctatttaatatttattattttctttttaatgtttggttgttctttcttcttcatttgtgacataaatatcggttttagagatagtgattacctataataacaaaaacagaaaattggaggaaagaaaaagacttgggctatacttgtactttgggtttgagaaatgactattttacccttggggagacagatataatgggctatgagatgagaccaaacatgtttgatggggatgcattactattatttataagtctggtatccatccttggttggatgacggacaaggatggagaaagaaaacctcttttaacaaatgccaaccaaacgccatgacctaacttggtgtggggacctgacgtgatagtcttgtttagccaatttattttattttattttttcctaatataagctacttatatgtgtagctttaccttagcttataaatgggaaggagtgtgtaacttttggtctttggtatactaaatgagatgacccccaaattgaccaggacaagatgctattaaacagaatcagccaataaatattttgtttttgggaccaccaataatgattttttatgaagtttcagaagtgtaggggtgaagtttttgaatggttttaaatgtattagtattaattgctctctctctctctctctgcacttatttgcaatttgactgtctttacacagtaatttgcattctgttggtctattgagctgtgctggttgatgacagcaagctgggaccgtacggttcaatataatgtactttctgggattttctttgggtgttaaaggtcaacacttgggggggcaccaatttactcctatggtttcattgtttgaactggagtctggatctagtccttccgtacattcacttctggctatgtttgtgccccaccatgatcatatccattaaaatttccaataattgtattaacaccagtcatcaatatattcaattcacaaatatcacgtatctaagtattcagtgtagtaaaatggggttggaattaggaggatgaagttcttcacattcaagattctaagtaactaaagctgaaggacttttgattcacctagtgttctaaataaatcttacaaatgaaattttattggaagattatttttccaagtactgattattcctttactatgttgttgttaacctgaaactaaaataagccaaaatagcaaaatgttcattcctttgtttaagagctgaggacctgacatatttttatcatagggaggagaagctcgtactaactacttaatgatccatctggtggattgaagagttaagcaagcaactctctagttaggtgttttgagtgttgtatgtccatatttatgcaaaaacttgtttaaattcattactttgcgggttttaatgtttaagttgattttcgttttgcagatttcgggaacagcattagttctggatgaaatcatcaaccatgtacagtccctacaacgtcaagtggaggtaaaacttgcttaattcttattctcagagtgttttgatcgatggtctttcactcacacttcaaagaaatatatattattagaaattgaaatttatcatccttgaatattaacaactagataatgcatctcgtttgagtaaaaggctgtcattccattcgaaaatcctccaatttcagcgggtctctattcacacgctcaatagttatattctatttatcttttgtttccttgttcttaatctttgattttttatatttcccatttcagttcttatcaatgagactcgcggcggttaacccgagaattgatttcaaccttgacaatatactagctactgctgtaagttttcatattgtgctttacttcatcattctcatacatgcagtaaaattaggaactgtagatcttttgtggttatgcatgttgtcaaaatgaaacgcttatcacatatacttgtacatctaacagtcaaggaagattaccattacaattttatatttctcaaataaaatcaaaacttttggattctaatatttctcaaatatagtcttatctgcgatcacagtgcatatgatagcatgtcactcttaatatgagaaggtagtacaactccattaggacctctgtagttgtaagttccttagatgagatctttcacttgtgtacaaactagaatgtttggctttcttatttagggaaaacaaaaggattgtattcaaagcaaaatatatttggcaacactataaaagggtatctttgctcattaccctaagtcccaactcctttgtcaatttgattcttccatacatacttgtggcatagttatgtttccctgttgggatatgaatgggctgtcacaaatgtcaaagttttgttctctcaattgcctaaagttgttctctaaaacttgcagaatggatctgtaatggaaggtagtttgcccaatatgggttcgcctctgatgtggcctgagttccctctcaatggaaacagacaacaatatcaacagcaatggcacttggatgccattggtcttcagcaaccactttgggggagacaagaagatagtcatactttcgtcacgccagagaactcgcttttgacttatgactcttcagcgaattcaggttaatttactctctaaatcaacatcataaactactactaagcatagcaatttggcatggtgcacacctcttccaatttacaaaccagttcatatttttgctttaaagtatatagatgtgcagttttccatttcttataagaaagcaatgaaattaacacaaatttctatcttcttgtttgttgacagcgtcgctgcactcgagccaattgaagatggagctgtgaaagggcatagtagagagttcttccagtagcagctaatagtgtatatatcagatatagcattagcatttagcatgaggtagaaatgagagtatgcctcaaaaatttcatgtttgccatgagctagctctatttgttagagtcagctaagttccttcacttagagggaaaagaaatttggtatatgccaattcttatattattattattattactactactactactatataagtatatatacttactaactatctttaggatcattcaatctagatacttattttgtgagatgattgattgattactattgtaaaatcattgaaccaactattattgaagtttttattttctccaaactcctgttgtgttgagatcattgaatgaagcattgtttatttactgttatcatcaaattatcaatctcaaatcctttcactatagaaaaattcaatcttttgggaaattatcatttgttttttttttcctctctacaagatttagccaactcaatttcttattccaaaattcaagtaactacatataagaaatgtatgtaatcaatcaatgattgaatgtttcaacactccaatttttacttctgtttaaattaaccacctttttttaatgttataatttgtgaattatagcttatattttaaatttggcattacaacataagttgttaactcagctgaaacagttaataatcttaatataataatagcttaactcaaatttcagataagttttagactaatcaaaagaattgaaacaaattttagttttattttaataatagtaaaataaattaaaaaaggaatttataaatttatcaaaatttatcgtcttctctctatttttttggaaacagtacgaaaacaaagaagaagaagaagaagattcaccttcaaacgatgaccaatccttatccagaaattataatcattctcctcttcctactagtctcgacccaatccactcgccacaaatcaccacaaacaatatccgtcaccgacttcggcgccactggcgacggcattcgatacgacaccaccgcgatccaatccgccatcgacgcgtgttccggcattgaaagatgccgcgtggtgtttcctccgggaacttatctgacagccacagtccgactcaaatccggcgtggtattggaggtgggagtgggcgcgacgatactgggaggcatgaggatggaggattaccctagggagcaatcggagtggtacgttgtgctggcagagaacgccaccgatgtgggaatcaccggcggcggagcgatcgacggacagagctgggggtttgtggagaggtttgatgagaagaagaatgtgatggtgagttggaatcggactggagcttgctccggtgacgagtgtaggcccaggttggttggattcattggttgcaaaaacgttgtcgtttccaatgttttcctaaccaagcctgcttactggtggtaagtatactattacttattaatattcctatttttttaattttttttttcatatcgattatatttctattttattagttatgtttttttagctgtagataattaatcctttttttttttttattttaatttttgaggtgtttattaaattttaccattaaatgttaactgaaattgttactgtgtatacgtgacactaaattttcgaatccaccaaaaatatgtaatttatacataggtgtgcaatacaattagaagatttaatagaagcctcaaatttacaccaaaaacaccaaaaattaaatagaaagagtattgccataaaaacaccaaaaattaaatatataaaaattaaaacataaaaaaatttctcactaattacttgagaggataagttttgtttataggatttttcgttctgttaaataataatttaaactaaattatttttcaaaacaaaaattaaattttaatcaaaatagaacttaattcaagattcttccaaataaataaataaataatttaattgggtggtgttatgactaaattaattttttattttaatttatttgtgttaaagattgttattattattttttatttattcgtgttggagattgttatgagagttttccatctgcaccattatttattacaaaaattaggatttgctcttaaaagttgagaattttcagtactaaattataaaacactgaaaaaattacgggtgttaaatgtccgtaaataaatcatgagtttttgtttggcaaagcaaaactgttattatagtaacttatatggttattttaagaataaatacactatagggatttatttgtaaatacagggaatatacagtattccattgaaacattgtaaaggctagggattgtttaggtaaaaacttcaaacttcccaatctgccttctctgtttttttttttctgttatttaagcttttagtggtcctaacctcctgggaccttcacaatttaaaaattacgattttagggctctaactaaaact

SEQ ID NO: 14200 - DNA, 6166 bp, Cannabis sativa
gcggagcggttgatggatgagttacgccaaatggtgtcggtttctggcgaaccaatccagaggttaggtgcatatatgttggaaggacttgttgctaagtttgccttctcagggagcaatatatgcaaatcattgaaatgcaaagagcctgcaagttcggaattgctctcttatatgcatattctgtatgagctctgcccttacttcaaatttggatacatgtctgccaatggggctatagcagaagccatgaaagatgaaaaccgagttcacattatcgatttccaaatcggtcaggggagccagtggatcactttgattcaggcttttgcagccaggcctggaggacctccccatatccggataacaggcattgatgactcggtgtcagcttatgctcgaggaggagggctcagcattgtaggaaagaaactctctaggtttgctgaaactttcaaagtgccatttgagtttcactctgtagccaaatccggttctgaggtccaactggcggatcttgttgttcgacctgatgagggtttggctgtgaactttgctttcatgcttcaccacatgccagatgagagtgtcagcacacaaaatcaccgggataggctactgaggctggttaagagcctgtcaccaaaagtggtgactcttgtggaacaagaatctaacaccaacaccgcagctttcttcccccggtttgttgagacactggattactacgcagccatgtttgaatccatagacgtgactctccctcggcatcacaaggagcacaaggagcggatcaatgtggagcagcattgcttggcaagagaagtggttaacataatagcttgtgaaggaactgaaagggtagagcgacatgagctacttggtaagtggaagtcaaggttcaaaatggctggttttacaccatacccgttaagcactttggtcaatgccaccattaaaacactattagagaattactgcaataagtataagcttgaagaaagagatggggctctctatcttggctggatgaacagatatttggttacttcttctgcgtggaattgagaaaacaaaaggaactggggcaaggaaaaacaagtagtttttgttgtttacttattttagtttactttgttattggtttaactttcctatgaggagggtgacatgacattagccatgaactcttctcacattaaagttagccgtttttgtttaaagccatttccagagaacttaaaaaacttcctgtgtttcactgatagagagggaatacatgattttgttgagttattaaaggctttgtatatggataccgagtaacgaaatctcatttttcccttttcttataccattgtatcatgtgagtgaaaaagttaaaagactattgtaacacttttggaaaagaaaaagtttcttgaacatatgctaaagtaaaggtattctatattccattctttgccaagtttcgatgaagacgtgaaaaagtgacagagaactggctctaactttgtttagccagccaagtaacaagaaaagtaaccaaatccattcaggtcacttttttcaaatgcaattaaaatattaaggttgaaatcttgccgtgattgaattgaggagtgagactattgcacgtgcagagataggcaaccaattttagcagcataataatgtcattatctctcaatgtgatgggtgctagctgtgtggtatatgaatagaataggatactgcaatggggaccaaataatgaattataaaacagagaatgtttcaataagtcaacaaatgttattattatacccacctggctcatctcatttattcacatgtcattttttaaaaacaaccaggcgcaccaacctttgtacttcattcatgttacagtgtacttactaccatgaaagagtaggaacaaaacattagcctactcagtaggctagcaagcaatgaaattatctaaatcaaggagacaaacgacctatttagtcgacatttcagctttaaccaaggtgaaagcactaaacaataagaaaataaatattcccagcgaagaaattatttactaaggattctgtaagtccaatttcatctctgaaaccttaaaccctacaccaagacagtttcaactttctcataaatctcttctaagttttgggttttcaagaacgttggggtagattacaaatggacaatgtaatatccataaattatgtgccttatacaatctaaaatgttaaatcttttattccagttaacatagataatctaaatctacacacagagatatatttccaatacatgcttttttttttttttaacatactagctacttccccacatccaaagtagaacctcacttggacgaatagacaagggaaagcgatgaagaaacgcccaataccaatatgcataacccgacatattaacatcatttaaggtctccatgtaaattacaggaacttgattgatatatcactgactcagttgttgatgttttctaccgtctggcttaaatggctcacttgtattatggtggctttcaagacccagtttgttatcaacaacctggttaggttttgacttaacaatacctgactccccattttgctggctctttatccaacttgtacagctcgaactattattgtcattgcccgattcaacggcaacattttgaaggggacccctttcttctttgacacccgacttaacattttgttgttcatctggtttaccatcgagggtggggcaagattctatggccgtgttggagtcaggtgtgtttggtgatgatctagtttgtaactcaccatttggttgttctttgggtggtttactttcatgttccaatatggtactaacacccatatcaagagaggcagttttaccatctgacttggcagtgttgtcaacttgatctgcagttggaggggcacttaattcggatacattatgggtgacagtccttccgggtggcatgtcatgattgtgttgtccttcatatgtggccatcaccagttttgtgtcataagatgccctttccacatgtttcttaacagggcatccagaatttgagcatctatagtaactcctgcacagagagattgcagaaccaaagtcaagaaaatgctaaatgcagaatcattatgatcttattcaacaaaatcaagattacatgctactggtatacggaaaagtaaaagataaaggaataaaaaaggtcccaaacggatctacagggtcaattattacactcataaatcacatttatcagaatgcttgtagcagagcaattaatttgctaaggctcaggtcagatatcacacattgtggaaaacatcactgagtgtgtaattatcttaaaattattgactccacgctatgcaagacactgaagttaaatgacacacagcattgactaaattcttctttctcattacgcaggaaaactcgtctgaaacactatagatttatttccttgttatctttgagaacttttttaactgtggacatcacaagagatgaaagaagacatgtatcttaatttggagcatttaaacaaaggtgcagacacacaatacaattataacagtctataagcatgaaatgttacaaaccttggattcagatttcctttcaccattttctgtccatatttacgccacctaaacccatcattcacgatatcaacctcacttagagtctgaacaacaactcgtggcccactggttgaggttggtttatcttcagtggttgttttgctacaatgtctgtctttctttctatttcatgtggagaaaaacaattaagcttatgtctattccattatataagcaaataataataataataataaaggagttacatactgtcgcttggagtctggatcatcatcgctatcatcttttatcttagtcgattgagaaagtgtagactttgaactatcattagaagccaaagctgcaattttcggaatcagaggagtatgtacatgctcattttgagtggatggtttcctatgctcatctactgatgttccttcaagacaaaccaaaatgttagtcgaggtctcttgaggaccaaaatgtagtaagaattataattatctcagtttcttgctcacctttagcagggtttaacgaggccgccccattttgtttctcttcaacaacagacaaagcgaaaccaacagccactgggttgttatgctgaagttttggatgatcatgctgaccaaagtaaacaatattgacaatcttcccttcatgtgaacattccaattgctttttgaccagacagtttggatgggtacatctatagtaacttcgcacatattcatttcccttcacaagcttctggccatattttctccagttatatccgtcctcagacactttctcacgaactatcgatggagtgcttccttcctgaccagattgtgaggttcggactccagtttcagggacttttgatgctttcatggatattttaggggaagattttccaagttgactcaaattgaatgcatcaagtgcagaacctcgcactgactctgtttttccaggttttatacatgttaatttcccacttttatctgattctggtgtggaaacatcagtcccacagatctcttgtgacacatgatttccagtattgtttctctctgtctgttgctgcttgtccagaacttcagctgctacactttcttctcctaaaggaaccatttgagcgtgtagtcttatatgtgaatataagagtctgcaactcaattcaggttgccactaccataaccaacgttgatctcaaaccaatttcatacgctacaggccatctaacctaagtagatgaataagcaaaacaagatttccagttcattctcttccctctatggcatggatgactacgctatcattcagccaaaacactgattgaaatagcagaagcaagcaaattcagcccaacaaatacctaatgaaaaacgtcaaattgatcacacatttccatctctaatatagtaaaatcagcactaaccataataaaaattttgggtttaaaacccagaagaagaaattctcaacataacaattaacaaaaaacttccaaagtaaaattagtcacttgttcagagcatattctcttcacatttattcagacgagaatgactaaaaattagaaagaaagagaagaaaaaaacaacaaactttttaatggtattttttccaattcccaaataacttcttgtactgtaagtgattaatttgagttgagaaatctatggaaatcttttattatgaaaatatatcatcaacaacaattcccaatcaaaagaaaagagagagagagaaatattaaatatatataattttgttatttatttataatttcagcttttacgtacaaatttgtaatcaccaaatttcacacaatcaaaattcaactttatttttcttttctcaattacagtttcctgagctcttataagcagccaactacagacaccaaaagttcatcatcataaccttaaaaaaaaaaaacagaaaaaataatgatcactaaattcatgaaactgaaaaatagtaaaattaataatactagtaggaataataattagcgaacctttcgaattttgagctggaacagtaaaccctaggtggagcgcgaatagttccaaaagcaaaagtttggaatagaaaagaaaaacaagaaaagagggagatcggtccgggcagaattaggagagttaggttggccgttggcgtggtgagatgagtagtcgaaggtgtgagtatcaaaagtctaatccattaatctgacttggacttgagaataaccagagtgggtatttcgagctctgctcccctgtcctcaactccacaccgtatttccctgttccctccctcgtacgaagtttccttttccttgtcttttccacacgagctgcctaattgggctttcgggcctaacattcggaacagtgaaagccgcctcatggatcaacttttgagccccatcaattttgttcccatatatacaccagttacaaaaaaaattacgggattttcatttttacatttcaaaagacttattggctttcctagtcaaaagactttgattatcgattactgttcatatcacttaaatgttgtagtttatgcttaca

SEQ ID NO: 14201 - DNA, 5926 bp, Cannabis sativa
ttatatgtataatactgaattcaaagaataatacatatttttagtcaactatccaattttcttgaggcgtccctgattcatcttcatcggtcggccaatattgctgctcatgaattagctgttagagtaaatggtgagctagtttgggtggatagtttttctttttttccttttcgatatgtacttaacgctgacttttttctttgaatttttgttctaaaaaaacgaataatacatatttgatattgatcatattaacattaacgttcctaattaattaaatcattcatcattacagtgctttaatatttgcctttaatttattctacgatctgagggaacaatttaaagaatgataatccaaaaaactatagatgcagtcttgaaacagtatccatatatatacatacataattaaattaatccagatttatataatatttaactattaattagtttatatacattaatatgtcttaacactctatcgcgttggctcgtctttaactactacacctgccggtggatcctgtaaagttcttatcttgaaacgccaaattttctttgacccacaacttttaccctcatcaaaacctataaaaatatatttacacatatatgtatggggtatagatatattatgatagatcaaaatattgtcgatctatatttttcagatatgttgacggaggggttttccgagcctggctggattcgtaaagttgccggccggttcctttattttggatatacttgtgaaaatatgtacttgaccgttgaagattaggatgttaattaatcgaatatgagtgcctatgtatatgtgtgtttatatatatatgtattggatttgggtggtgtttgttgtaaagcgaaacaaaaaacgtgggtataaacaattttaaggaagcccgtgatttaattaataatattattaattggtggtctagtcaaatgacttggagacatatgtttttctatgtatagaacagtattatatatttgtttgaaacgatcttagatattgtacagagtcaacaattaaactttgatttggcatagtgatttagttaatttgttaattatatatataatataacgtatacttaggaagacctagtcttcaaagagtaccatgcatgtatgatttcccgtcacaaaggtctgccagtacatgtaagcttctgcttgtttttttctatgtttcttctcattgccattttgaaggagtgctttcctagaaaaaggaaacgcagccaggttcttaaagtttctttaaaattttatttattttttattttttatttatttatttatatttttgaaaaatgacctccaaatataatgatcatccatagaatgtgctaacatatctaaagtgtgagccacactatagcagtcttagaacgatacaaaaaaaaaatatcaataaaatgtttacaataagtaaggatatctctaattatacaacatatataagactaatcaaccttattataaagaataacatttatcacagtaagacaatcagattacaccaccatgccctctggtacgtaaccaagacgatagacaagcatgatcccagaatagatacccaacgcctcagtaacatcatgagagaaacaactattctaagtccaagtactaaacgttaggagaaaactcccatcacgaaaaatttccctgaccctagacttacctttgaattcaacccagtatcacaattaatttcaccacctcaaaaggtagtttaaaccaatgaacaattggcatatcacagggggattaccatgtgaaagtgtaggactattggcagaagagtttcattgaagataatccatactccaatcaaacaagacatcatcattcacacacaaaattttttagttacccatttattcttgtcgataccaaattctccaaagacaaacaatttagaacaaggcatagataaaacgtcaagacaagcataaaagaactcatagatattctaaccaagaaaaataagtgcctagagatggagggaaatgacctcacagatagagaaaattttatcataatcctaaagagcatgctgggtggtctcatgaccttttaaacaaaaatggtaggtaaaaactgtaggaattcatatactattccagtatccactttaaattgagtaataactttatttctcaaaattacacactatattttcatactatgaacatgatcacgaggaatcgcaagtatagcactagcctcaagcgcagtgaaggagctagcaataagaggtgcatttcaacaactattaggcaataatagagcatttacaaaggcatcgttcagtggaaagtgaggagaggaagaattattaccacccagactaagaatccaccggtcatgataaactgacaccttagtaacataactaatgagccatcgagctccagcttcaaaaatctttttcccccataagatagacgtctagataaacgatattatcttagaatcttctgccattaaaaaagaagaattatgatacactactacaaaaagagcattcctgtcggttagaaaattagatttttttcaaagacccacgagagaaaaatttagtaaccattaaataccaataggaataatacccctttagcgtcagttttcctcgttagcgatggtttagaactgatgctaatgagctaactttttttttaaagaaaattaaatgtacatcccaatattacacaaaacaaccctataatatatatttaggatttcattttacattcagttgtaatttttctctttctctctctcaatctcttgtgcagccacgaagcatttgctgatctaagtcgtcgccatcaagttaggtaaccaccactttgtttgtatatatctctctcacctcagatctctctcgctctcctttctcattctttccatctcatttctagaccaacaaccccctcgatctcacacttctctttctcgcctgtaaattttaatttcttgcaagttgtttagcgtgtgacaatctcgggtggcggatctctaattgtcgataaagctacaatttattatatatatttataagcattgtacatatatattgtatatatattaagattttaataatgatatttgagatattagatttgtgattattgtttttgttgttgtataatggtagagttgagatatatatctcagaatttatttattttttctaatgtgtcggtttaaagctgaaataatagttgctcactatacctgacgattaaaaagccacaacaaaggaattatcaacggttcaaaactgccagttattgtgtcaattattgctgacggttttaaacagttgagacataggcatatctgactattttaccgtaatggctattcaacccaattttacgttgatcgaataggtatcggtcatagagtttgacggcaataccattaccctagtattttaaatagtcgagaaatctccttttcttagtaattgatagtatataaattgccttcataactctagccactagagaactaggagcataatacaatctcgttgcttgcttagcaaaaagatcttgtttaaagagagtcccagaaacctataccaacatcagacttgtgccaacaaaatttcttccaagtacaccaaatgaagttttttctttttctcattgccacgccactaaaattgtgcacacaagctatgaatctctttaatgaaagaagcaagaggcttaagaaagattcataaaatacgtggggatagactcgattaaagatttaataagaatttccctgccacttaatgagaagtatcgagacttttaatcataaattctattctttatcctaccaagaagagactgaaaaaggctcttcttactctatctcgcagtataaggaagaccaacatatttcttaagataagcaaccaaagtgacatataaaatggtagacttaaaaaaattcacagattgcccaaaatttttcccataccaactcgaaattcttttaaatcttgaacaagaaaactcagtagccttaaaggaaaagaggttatcatcaacaaagaacaagtatgaaatagagggcccagttctaccataggagagactgtgcaataaaccattcaagcaatcacaacgaacaagaataataaccttctacacaaataaggaaaataaaaggaaagagaagatcaccttgacgaagacccttagtaggatttaacaaatgaagaattttcccatttatattaaataagtagtcaaccggggatatacattcttgaatcaaattaacctaattctcatgaaaaccaagcttgcgcataaggcaacgaagaaaggactacaccacctaatcatatgtgttaacttagattttgttaacaataatgaagccttataaataaattattgatacttataattaataaaatatatgtagaacacaaagagttcttacctaattttgtagttaaatctacatactccacgagtcattcttatttttgaatatttcttgggaaagtactttgattacagaggaataaatatgaatctttactcaatatattcctacaatcaatcgagagggacagaatatgattggctctatcccgtatttggagggtggggatggagcatttataggttggcactctctaaaagcagtgatgacgaacctactggatgtcctaagcaataaaatagttcttagcatctcctcccacctttaaaaagggcgtgctattggtatcacccaaacactgatagccaatctggctaaagtagaagtatcctgactggttctattttgggatagacttcaagtcaaagaaataccctatctcataagggaaggttgagtccagcctaactcagcatagaggataaacatcgtcgaaaggtactttataccttttggggtgatttgggttgggcaaactctaaattatgtggcaatgtctctgaagtaggggtgtaagagcaatactacgctctaaccacgccatctagttaagggccaactgatgcgctcgttggtccctcgatagctgctcacactggacacctcctaccagtccactctccctaatcttgtcaagtgtcttgacgctgataatggatagaggagaggcccattgatctcgctgctacccctgatccagaacctgaggctcgacagcctcccccataacatggtctacatcgaccactgcaggctgaccaagcctattcaagggtcgcccaacctcatcttatgagcctagagggttgttgaggataatagaacatgtcctgtactgtctcctcctaacaagtacaaccttcttaatctcaaactcactattcgagctcttcacatcttggtcaactataggcgcctctacctagccaacctctagctctctaccatctagaggctatgcaacttcctcaactacacagactctaaccctagtcaccagcctggtaatgtgagggttaaaatgtggtgccttatagcaagtttgtttgacccttgccttaatggaccactataagactcaagatcacttgagaagctgctagaggaacggactggatactagtccatgaagggaagaccaagtgaatctctgtcgacgcgattgttacctcccccaattgtcactcgagatcacctgcacagagagataaggggaggtgagaaactagacaacgcaacaaaatgcaaataaagttctggccaattgaacccaacggtacctgccagacaatctaatcgtacaaggttgagtatcagcgaagtgccatcccaagtgtaacaacttggacaaatgttgagtcttaagttgagcattcaactataatagactcaccattaagtttcatacaaagtttctaaaggaaccacatatgagactaaggtt

SEQ ID NO: 14202 - DNA, 11890 bp, Cannabis sativa
  modified_base (3453)..(3456): a, c, t, g, unknown or other
  modified_base (5240)..(5243): a, c, t, g, unknown or other
  modified_base (6935)..(6938): a, c, t, g, unknown or other
cctctaccaccaccaccgccgccacctcttcccccaccaccacctcttccaccactaccacctctaccgccactgccaccactaccgccaccgccaccacggcatgaaccacaaccacttacaagagtaaagaaaagaatgtttagagtgaggaatatggcaagtgaggcagaggaagttttggaacgacccatctttctctctgatctctcaaaacacaaaagtgtttggctagggtttagaggactgatgggatatatttgaatgttgggagtgatggggattttatagggagtcgagtcttagttgatcactctacctaaaaataaataaaaataaaaaatctaatgtataatacgaacaaataaataagtccaagtgtgggaagggaatcatgtgtgacctcttgggattttagctggcatgagaaaattaaagcaagttttttaggcaaattatttggatgtttatgagaaatagggactggcaaaatattgtcatgttcctctttttttagcaagatccatctcttggatctcattaattatttttctcaatgtttaattttgcaataatgtttacattattattactaaaccctactttggctacagttcccatccacatgacatgagctttgagagttggtctaattggattgaaataactaaatggaaaggaatggaaatgggccccaaataatcacatgttgtggaagtatttcaaagctattgcccccacactacatatatctacttctgtagaaaattgcaaaaacaaatcaagattatcattatcattcaaactttgatatcggttggattatgattattatatatttacatatatgtatatatgtatatatatatacatatatagagagagatgagtctgtatatgtgtgtctttaaagattaatatacagtaagaattcttataacaaggacatatatagtttcatttttttcacgggtttcactctagacaaattatatatttagtttgggaaagtttcttaataatgtacttgctatattgatcacttttttcaatagttaaggctccatggttattcaatcacttatatctttttcattgattaaactttttttttcttctctagaattaattataagtttctttgtcatggtgaggtcaagttgatgttgaaaatattaatgtaatatgattaatttctaaaattttcttcttgttactagagtttttaaaatattcataaatttactaatgtttttagagttttcttagtatttactagtttgtttgagtactcttaaattttacagaattctccttcacttgtgttacatagtaggaattgtgcagaaaaatgtaaaagctaatcatttaataatatttatagaatagtccataaagtcatataaatagagatataatcccaccattttataccaagtcaaaaattacaaaagttgaattataaaatatagcctctaaaatattaaagtatctctaatactctttcttattttctaacaaagtggtatcagagtcaagtttttgtgaagaaaaatgacaagtggaggaatgatccccttccaaatttaaatgctcatcaagagcaactatgccaattggagtatcaagatgaaagcgctactaggagctcaaaatatgtgggatattgatgagaaatgtcataaggagcaaaacgatgttgctctttctcaaactcaatgagatgccttgagggattcgagaaagagtgacaaaaaaactacctatctcatttatcaagcggtgaatgaagatacattcgaaaaaatctcggatgcaactgcgaccaaagaaacatgggagaaggttcaaacttgcaacaaatgagtggagcaagtgaaaaagattcgtcttcaatctcatagaggtgagtttatttatggaagattttaaattcatttctgattattttgctatagcattattaattttcaatcagttaagaagatattgtgaagaaattagtgaagtaaaggttataaaaacgtattcatcgtgagtccaatctttgagtacattgctacaatcataaaatataatgaagatttagaatctatgacagttgagcaatttgtgagttctttacaaacctacaaggagaaacaaaaaaggaaaagaaaaaacatgaaaaaaatggagcaatcactacaactgaaaagaaaaaaaataataatagtaaagattaaaaaggaagatggtaagatcaaggaagcgaacatggacgtggtcgaggacaacgaagtgaaggaaaaggtggttgtaataacaacttcaataatggagaacaaagtcaaaattaacaacatgagggcgcagaagaggaaactcatggtcaaggagcgacaaattccacatcaagtgctacaattgctacaagttcagtcattatgccttcgagtgtggtgttagttttacagtactaaatcacatacgtagcaaaataataattatctaattatcattataccatagttccaagaatctccacatgtatacacattaaatccgaagaaaaatttacatgaaagaaataaatacctcttgatgactatctgtgtatcctcgaaacttgttgtaatttagatctaataaatctcacactttagtcttccaaatcgattcatcaaacacaaggagtagtgtgggctactaggagtgtataatttttcctttttgaattctcaacacatgagcaagaactattcttgagagaaaaataattttccttctctctggtgtattttgaaaatagtagtgaagaattatatcttggttttcacatcaggcttctattataattgtgaatattcaattaattaaatcatatttaattattcaaataaatatctataatcgaatcgattactgatatttccgaggagggaatatcttaattacttgagagaatatctcaaccaaattggagagcatatctcaactactttgagaaatatctcaaccaactaaaaatatctttatttacttttcaaatttaaatatttatctaattgaattaattaattagttaattaacccaaaaggttaacaccaatagggactcccactatatgagtgcatgcactgtgtttggacacaatgcatgtggggcctcctatgtcttatttaagataaggaatgtgccttttgtcttgacaacttttgtcttaacaatttttttctttttcaccatttaattaatttaaaaaataaataattcaaaatagatttttctgaacaatattatacaactcttagtccctattcttgatagtgttttaaggtggcgatttggggaccatggacctataattttaagctctaataaactagattatttattgagtattatcaaccaaatgctcctgtttattaaatctatgattactacgctataaacatgaaattgaactcttnnnnattatagaattatatttactaattttactgcagtgtccattgatataatcaattccagtgattagcccttcttatgtctcttcgtaattagttttggttaaattaatgttttatacttctaattacttatttatcctttagttctgttaatttactagtgaaagtataatttaaatccaatatgaatttgtgcacaacttttctgtccaaaattaacacataaagagaaccaacattctatccgttaggaaagttaagattccataatcatagatcaaaatattaataatttaacattcatgcatatatcaaaatattcaactcttattaataatcagatatgtctttacaggttttttaggtcataaaccctaataatcatccacttgccctaaaagaaaattgggcatctcccttaatcccatattagttatatgacccataaaagatttctctagaagtatttttgtgaatggttcttccaggttttattctgatgcaatctttaagactgtcatatcacctctctctactacagtcttagtagatggtacttcatctcaatatgcttgtctctcttgtggcttcttgattttttggagttggctaacgctccactattgtcatagtagagcacttgtggttttctacttctagaactacttccagaccagtgtaaaatttcttcaaccaaaccacttccttagatttttcattagctgcttatatttggcttccatggttgaatctgcaataccgatttgcttaattcttctctagactacaactctaccaccaagagtgaatactaacccagatattaatttttgactatctttatctgattgaaaatcagaattagcatatctcataacatttaagtctctaccagaatataaaagcatgagatctctcattctatgaagatactaagaatgtgctttatagctatccagtgttctaaacctggattagattggtaatgactaacaattgctacacccgtagtatatgtcaggcctgtacacaactacaacaagctcccaactactgatggataatggtactttctcatgtcttccatctcttgagaagtctttcgacattgatccttacatggagtaattctatgtctgaacgataactgtcctctcttggaattctccattcagaatctttcgagcatcttatcaatataagttgcttgaaaaaatactaatgttctctgctttctatctctaaagattttaatctcgagaacataggctgcttcaccaaaatccttcatttggaatattttttccaaccacttctttacgttcaataacctttctacattatttccaataagtagaatgccatcaacataaagaactaggtcatatcactacattacctttaatgtatttgtatatacaagctttgtctttgttttgtttgaagccatactctttaatagtcttattaaatgtgatatttcaaaatttagaggcttgtttcaatccataaatggatttaagtaatttgcatacttttcgatcttctcctagtagtacatacccttctggttgttctatataaatagtttcattaaaattgctatttagaaaaacagtcttgatgtctattttccatatctcataatcataagcgataactatggaaagaagaatgtgaatagatttaaacatcgccacaggagagatagaataggtttcatcataatcgatgccttctcgctgtgtgtagcgtttggctacaagcctagctttaaaggtctctannnncccttcaatatttctcttcttcttaaaaatctacttacaccctataagtgtaatatcctcaggtggagtttcatattcccagactttgctggtgcgcatgaaatccattttgtgatccatgtcattatttcatttatctgagattaagttcttctattacttctttataagttaaggtatcatccttatcttggtcagaggtaagaacatgtacttcgtgttcatactgtacatgctgtctcataaccctcccactacgacaatgtaccagggtttctttttcaagaattgtggtgaccattgttagtcgttcaagtgatggtactgaagttaatagtttaaaatttttctcatttctagtttccttgataatcacttgactgcgtggtttgtgacctttcatatggtcatgttcaagaaaaatagcatttattgatacaaatactttgttgtcttgatgactatagaagtttgcacctcaaggttcctctgaatatatagacacttaaattctaagagcaagtttcacagtattgtgtttaagaacatgagcaagaaaaccctaaataaggaaaaaaattcaaaatagattttgttcgatttcataattctattacaatgttgtttatatttttgagggtgtccactacaagaaaaatacaattttttgggtgaagttcatttgccggtgcacttcatgaaccttgctagcaaaaggtggaaactttatttccttgggtaacacttataccagccacttattttgtcgacataagttacctatgctggggaagtacattagtttcacctgcaaaaagtggtaaaccaaccgccaaaaggtgagaacttttggcggttcaattctaccttcgtcggtgaaagcaagtgcaccggtaaaaaaaaggtaattaattttgggcagtttaaattcacttttgccggcaaataaatgtgccggcaaaaataatgaaatttttggcaatttaattcccgcgtagtaaaacgtgtgtgggaaattatgtggaaaagtgcgcacttaagctcactggcaaaactttttacaattaataaaatcataaatttcattttttaatttaggttaaaacttttgtcggcgagtataagtgctccggcaaaaattgattctgaataaaacttttgtcggcgcgcttaagtgtgccagcaaaactcgtttcaaataaaacccatcacggaccctctttttatcattttcttcttcttcttcttcccaatctcagtccaccctcacctcaccaccctcaccacccttgaccatcatcatctccctttctctctctcccatctccctcaatttctctctctctccctccttaatttctcaataaaaaaaattaaagcctactgtccacctctgactgcgcacccaccttcgactaccgttgtccaagtcttcgattccactgctggctttctcgctttcagtcaaggtaaattataatttttattgtattttttatttatatatattgatttgggatttaattttgtgtatattgatttgggtttaattttgttatatgtttgtatatatagatatgtatatatatgtatgtgtgtatatacgagtatatatatggatgtatatgagtaagtgtgtgtatttttgtgtacgtacatgtgtgtatatatgtgtatatatatgtgtgtatnnnnatatgtatgtatatataaatatatgtatatatacgtatctatatatataagtatatgtatatatatgtgtatgtatgtatgtacatgtgtatgtatatatatatgtgtatgtatatatataatatatatatttgtatgtatatatgtatatgtatatatgcgtatattagtgtagaattattgttattaattctattctaattttttttagtaaacaggttttaggtatcactttacttgttacctgttgatatctactcatcgttatatttgaatgttagtatgattttataatatcttactgtagttctgaataatgaaaaaatctattagtagagtttaaatatcttatatatttatctatagtgaaatagcttttgtgaaaaatatactactttcggatgggtgacaaatattaatatttagactgttttggtattgtatttgtagttttcttgcagatattaaaaatttgaaaatgattaattttaaggtattatgttgccgaatttttggtatcataatattttcaatgtaattattatttaatttaattatatgttataaattaaatttttatacaaaatacttagaatatcacttatattattgttgccctgcttttttcccaatatacgtggcaatcctatgatttatgattggccacatggcaattaagttttaagatttgaaagtgttaggaatgtcataattgtaaactcgtcacgaattgagtggacatgtctaagagtcccttcgagagctatagctaggactagagggatcgatgttttgttcctccccaagagttaggcaaagcctttagcaccgggctcaaggatccggagatgaattatacaaacgcattaaatatggcatggaaaatgtctgcaaatgaatctgaaaagacatgttagacgcgttaaacccattcttcgacgattacgctttaaccgaaggagttagtactgatggctacctaatgaactgtcacatcaatcaaagaatgataaatgcttatctcacctaatacctagagaaaccatgtgtaacctattatgcaggcatgcatgccttattatttgaattttgggaacttgaaacaatatagaccttttggttctcttgataaggctataaatattccgaaccacatttgagatagggaacagaaaaaatagtgtaaaatattccctgctaagaaacacctttatattaaatattagtaacttgtgtactaaggctcattaatgccccaatcacgtaaaaagtacttgcattaactctcttctaattattttcacagctttcattaattagttgctgaaaatctcgatcaacatttcactgctttcattaagcgctgtagaagccttgcacaaaaataataatataagaagattcccactacgatggtggtgactagaaattttttgtcaaccatgaccacctcagggtcccagagggccagatgatgaagaagtagctttgcgaatagacgtggaggtagaagaggaagacaaaacaaatgatgtagagtatgatgaaaataaaaaagagcacgacgcctatgatgatggtaggtacactgaactcatggccttgaggtagaaagttgctaatcatgaagtcaagttggcgaaataaaaggaacaaaatagattgatgcaagaaatagtggttgccaagcaaaaggctatggaaacagcgggcatccacgtgcatctaaatgccaggtccattggaccagaaaaataagagaatagtcccaaacattcaaaaacattaaaatcgagagtcaagccttattcgatatccctcagaagggtctccaaagatgaaccccacatccttccctgaaagaaacaagaaggctcaggatccgcaaaaattttgctcgaatttcccaaatgaaaaaggtccacagaggggcaagatcgtaagggagaatgcttgccctcaggactgggaggaccgaaagagcatattcatgcaccaggaaccgaggggagagaggggggaaatcgtaaaaccctcctgctgacttaagacaaaaactcaatgccaagcacgatgatcttaggaatcgcttggagaagaagaaacaagtaatacgagtcttggaaggcaccctaaatgaaggaatcctagctgaactcgctatcctccggaaggatacaactaaagttttccaaaggcaaaaaggggatgattcagagtctaattgtgaagattgagagccttgcgctagaaacatccttgtagcgaacctcccaaaattttttaaaaagcctgaaatgacgatgtccgtaggagacatagaccctactgaccacttgtctcggttaaattatgtattgacagccatgagagtcagcaacgacacaaactgtttgcgtttccggttgatgttaggagggttcgctgaggagttgtttaagaagttagaaccagggtccatagatttttgaaacaaactgcaagtcaatttttgaaggcaattcatggcggctaggaagataaactttgaagttagcgctttgacaaacatcaagtaattacaggtcgagaccctaagaaaattcataaaaagattcaaggaagaagcttccaaaactaaaaaagtggacaatggacaacaactggcgttacttcaggccagaatcagggaaggaactcttttctagaatgagctccaacaagaaagggctacaagtctttaagacttttagaagatggctcagaagtacatcaacttagaagaagcacagataacagctttcaagggatattacccaatcagtggactagggtacatgccaggaatgcaattttcgggagttattcttccattgtacctcaaacaagtggggtacaatttttagtaacaccgggatacacttacaaacttgctcttactcttgctcagcctagttttggggcaataaggggtaacccagttcgcagagtgagttcacaatatcctaccaagttcgtgcctccggcagcaagtgcggggatgctccacaaacctcccaaagcaagagatctttaaaaggaagcatgcaaactaaaaataagaggcaaaagaaaggttatacctctcagtatacacaatatattaatttagtggacacccaggaacaagtatacttggccataaggcaaaacatccattatcatagatctactcctctatacccagacagctcccgaagagaccctaacaaaaggtgtgaatatcacaataatgacgttggtcacacaaccaatgagtgtagaacttgaaagaccaaattgagagcctaattacgctaggtcacttgtatgaatggatcaaagataggtcaccacacatgaatggtggacaagttggaactccagtgcctctaggagcaccagctcaggtcctagatgtacaagtacctccgaaagttcttcgccatcacccgacacctagacagcccctaagaccaaacagaagagtagccttgatcttaggaggaccgcacatcagaggttgcaagtgtcataggctataagtgggtgtacacgcacaaagatggaattctaggggtagaaaaagctagatttaaagcaagactagttgcaaatgggttttgtcaaagagaagaattagactacaatgaaatcttttctccagtggtaaaacacagattcataaggctaatgctaagcattgtagcaatcaatgacctggagttagagcaactagatgttaaagtagccttcctacatggaggcttagaagaaaacatctgaataaaccaaccaaaggggtatgaagtcaaaggaaaagaagatcatatatgtcagctaaagagatccttatatggattgaaataattaccaaggaaatggtacaaaagatttgatgagtttgtacttagaattggtttcaaaaggagctcttatgatatttgtgtatatatcaagaaaaataatcactacttatctcatatcatatgttgatgacatgcttatagcatgcaaagacatcctaaatataaacaaaatttaagctatgttgaacatgaaatttaaaatgaaagaccttggtttagcaaagaggattttaggtattgacatcattagagatagatgaaagagaactctcaaactgtctcaaagtggttacacatctaaaatctttgacaggtttagtttcaaccaagtaaaacctgtcaaaactccctacactttactattcaaactgtctaaaacacgggcctatatagatgatgaagaagtcaactatatggacaaggtgctttattctagtgttagtgttgtggggagtcttatgtatctaatgattttcacgagaccggatattagctatggtgtaagtatggtgagtagctaggtttatgggacaacctagcaaggaacattggaatgtagtaaaatagatcatgagatatctacaaggcacaaaacaacttggattggcttatggattaagctaaaattttatcaacatagcaagttttgtggattctgactattcaggggacctagacactagaagtgttgggttttgtaccctatctagccgaccactaattaataaatagttataactagtggggcctatctatatggacgaccacttagttctaatttttctattattttatcatttttaattccatataatttaaattctaaccctaggtgaaatagtataaaaggaataggatggtctcattctcatccaatccctcatatagcctagtttacattttttcagacaactagagttcttgagacttccttcttccttcttttatttcgaaatctcattcattgttcttcattaaacactactacaaaaaaaggctttttatcccggtttttaagggcattttatcccggttttcgctaaaataaaaatcgggatatatgccagtgggataaaaagtcatata

SEQ ID NO: 14203 - DNA, 9960 bp, Cannabis sativa
ctactacaggaggaaggtattggttgttcatgagaactcgaatttacagattacaggtcaaatcttgttgtgccttagaccaggtgcctggttgaatgatgaggtaagctttttgcttgtgtatatatcttttattatgataatagtgagttgagtgacaatgctagctgtagttgattgactctgacattttgtcttgttgtattcattgtattataaattcttttctgtctgtatgtttatatacttttgcaggttattaatctctacatggagttgctgaaggagcgggagaaaagagatccaaagaagtatttgaaatgccatttctttaacacctttttctacaagaaggttgtttactataactttttacctttgttctctctctgcatgatctcctacacccaaatttttgttgttcaggcacaattatttagttatttgtttgtattgttttgttttgttcttcataaaacactttagttgatagggaattcattctatactgcctcttttatggttttacttgtccctggtgttgctcctagtggaagttttgctcctttgctaacattttcaatcttacatgtatttctgcagttaataagtgggaacggttatgattataaatcggtcagaagatggacaacccaaaggaagctgggatacagcattgctgactgtgataaagtaaccctttttataaatacccattttccacagtattttgtttggtaattttgctaacctgttctaattgctcttttttttcactgttctcagatttttgtccctgtacacaaagagatacattggtgcttagcagttatcaataagaaagaagagaaattccagtaccttgattccctgaaaggaaaggatacccgggtgatgaaagtactggtatgattttgatcctgtgtcggttgccatttaactcaagtgtctctactgatacaagccaaatggaaactcttccctaacattattgtcctctttctctttaatttaccatagaaattttattgggtttcacttaatatagcacatgtagttttttggtaaatataaatgcactggcagtatgtccaaggtgttaactttatctgtcatttttcaaatttgcaatttgagtaatctacaactgtttaacttgtagagatagatggcttaataaatttttctgttgtcatgtggtaggccaaatactatgttgatgaagtgaaggataagagtggaaaagatattaatgttagttcttggaaacaagaatttgttgaagaccttcctgagcaacagaacgggtaatctgtcattttattttaccagttttatcattgaccgcatttatttatataatttcttacttaaaacaagttaatggatatctaaatgattttattaactttctctctataaacaggtatgattgtggtatgtttatgatcaaatatgcagacttttatagcagaggtttggggctctgtttcaaccaggtaaaatgcatagtacattgaaagagaccttttctcctggcccctaatttttggttacaacacaatggttgttatatatatcaatgtactgaatctgtttctcttgtccttgttaggaacacatgccttattttcgattgaggacagtgaaggagattttaagattgagagctgagtaagtagatttttgaagtttactattcttttgacgacaaaagtgatgctcatcaaagaattagctagcaaacaacagcaaagaaagaggttcccatatatgctcgaatgttggaaataactatttccagcctttcctcttgtgaagatgcagcaagcaacatcgtcagaaaatggatgctaagcattcttggctccttattgatccggcagctaagatttacgaggcatcgtagggccatagtttgttctgttatataccatcttcaaagccttgatttcactaacaagttttgttggattgatttttttttttccctcaaactgttttacctgtttttactttaatcttttaccagcagcattagcaatttgtagttgtgtaaagaaatgagtcacaaatgttttgtttaatgatataatgatatgcttcttgtgtttacataaaatggtcattgaatttatatcataacaatagtacaactttcttttcatgataataatcatgctcataataaaaaataaatgtaagtgaattttcgtatatattttctttttacagtacaagattacaaactttctaaaaaccaacaaaatgtcattgaatctccataccatttcaatggcattgttgaaatattgaaaatttccaaactatttcaatatacaaagagtcaagagagaatgaaaaaaaaacgaatctattgaatttcttttttctttcctaaaaatatttgagttcaaattcacattaaccatttaacaaaacagccccctattacacaacccataaaacctggcaagaacctcatcagacttatcttgcaaatataaacgaattacaacaacactacaagagacatgaacagccgcctggatgtgcacagcccaagtctgcactctcctctctcagagatacctcctgctcctaactgtgtagaggcgaaaataaaaataaaaaaaaaaattatatttttgttttcgatccctttgtaccaaggataaaaacaaaagctgggatgagaaattacaaaagagaaaatgaaggccgtcattatacacacgaaatgttgcctcagcggggtactcttttccggctaagtatctcctgctccttaagtctatgctggaaccttgcaagacgagcctggaggctaaccaaacttgcagcctttcgagacagaacaaagctcaattgagccacgtagttgtctattagacttcctggctggtccacttctgctagcaatttcatttcctggtgatcgggaatcatagaaactcaataaaaactcttcatactttgtaacatttcataagaaagtagtctacctgtaaccgacaatactcgtaaaatagaaactagaaaaggaagcaatcacttacttcacgacgaacgatctccattgtatcctcaatctctttcctgtgagcagcgatcaaggcctcctcttcctgtaacaatccaaagagcttaagatgacaaacaagaagtacaaagaaacctctttgtatacataaatataaatgtgtgtgagaatggaaactgcgaggcaagtgagacaataaaaaccaacctccagtatggcattaatattcccatcagcactttcatgctcatgtcgccttgacccagaattagttgaattgaaattaccaatgttttgtggtaactttaaacctgtcgaagatacatctgatgagttgaaattgccagtgttatggggcagctttaaacctgttgaagatacatctgatgagttgaaatttccagtgttatgcggtggccttaagcctgtcgaagatgcatctgatgaattgaaattgcccgtggtttgtggtggtcttaaaccagtcgaagacacatctgatccactatcttttctcagccagtttccaaacttatcggatttttcctctctgggtacttttctacgaggtggtgataccttttgcactttgtcttccacatcacccgagttttgggaataagagtacattctttggctattagaatcacaataggaatttttcatttcaaaccgctcccgatccgttgaaccagaagcaatccctttttcgtcccttccattaggaaggtaactggatgacagacttcctgattgcttatcaaaatcagcactagagttgtagaaggagttgtccttttctgcaactcttctacctgtatctgccactttcacctcttgacgttgttgctcgtaaatatcttctgcatcaccagatacctgatgtaatgctgatataacctctttgttacttggaagaggtatatttgtagcttgatcttttctagcattcccactcttagacaggctctttaccctggtcaagaaataacattttgctgtttaataaaaaatgaaataaataaataaaaacctgaaaaaactactgacaaacaaatggaatgtgccattacctatctgcatatctcaaagtattgagtgtgtgttcgcatgaccctgcatttggtgaaatgcaagagatcataactgtccttgaatttccaacaaaggagtcgcgaaggacttctgtaagcttgcttccacgaaatggtatgtgtatctggtcattgtccaaagcacggatgcactctttaagagctaaaagactcttgttgatttctgctccctcaattctgcaatgaaccaaataacaagaatcaaccaattagaatacagtacagtacccacattggattaatatgaaaatacagctgctaaagcatagaaggcatcttatcacctacctaacacaggcattggatttcatattattcaattcagcaagttctaggttccacacttcataaaggaagtgtagaagaaaacaatctcaatattgtctgcatctctaacaaatgccaaggacgatatataaagcatgtctatctcattgaaaaaacagaaaacaaataatttttcatttcacaagaatgatccgatatttgcatgcaagaagtacagcccctgaaaaaggaaaaaaaaaaacctctgattggtaaagaagtggcttagacctattccattgcccacccctacacagtttgttcaacctcacaaatactcgaggcacatactacataaatcacaaacactgaagttccaaattttctataaaaagaatatgacaataaatgttggtatatatttgataaataacatttacgttttccctttgctgagtaaataacatatcagttataccatcacattttgaaattaagcacttgagaatgggcaagtaatttgccgcataacttggtacgctaaattatgaagacaaaaattaaacaggtaagtactcagttataaaaatttagaatgcctcattttgtggaaatggaaatgaaagaaggtagacttcttctctaagctttagtaccttgtttgtctgtcgttatcagtagtgtcagcacctctttcactaccggcgagatcaatgaaagagattttccccacaactctcccatgtttggaatcattttcatcaatcttcctccttgaatcttttacttcaacgtgctttttcacaacaagttgcaatatagcatgtgacctcgaagattcctcattggccccagtggaacctgtacttctagcagcattacccctctcgataaattctttaacaatttgtacgtctaaaacctcaaattcttgcaagccaacaatgcaaacttgttgtcttccatcttctcgcatacaaagttttctattggaaaaagaatgcatttagcaatttaatagaaatcaaaagcataactgcattactcgcacatattcaccttaaaatccatgctaattaatacttgatgttctcatagatcaaacatagtgcatgatcagaggaatgtaaaacagaccatacacgtataaaagtagcagatacttcaagtaaacatgtgatcaaaaccccacaggtgaaagaatcagaattcagaccttgaaaattcacattcaataccttgaaattttcacaaaagcactcaaaaaaatccaggaaaagtaaaatttaaagataaacacgtacaatacacagtttattagagacaaagaatcaagttttggatcacagcatacaagtggaattgaacaaaagaaaaacagaataaactgataatgaatgaaatgcactaactttctttcactaagaagatcaaatagctttccaccatatatctcgaagtagctaagccacagtttaaatctctgattccgatagactggctgatgcaacaatctaacaaggtcttctgcagctctaagaggtaatggttgcattgtatatgttttgccactgcctgtaatcaagatgttatcatcacttatatcattcacactaaaacccgaatgtctacctctgaggcgggagacttatattggtaaaaagaaattaaaagagatcatccaatcagatcgatagtggcatagagaagagggagaagaagaaaatacctgtttggccgtaagcgaagcaagtagcttttgttcgttcgaaaatggtaggtattattggttgaacagtagccctgtatacctgtctcaatcatcacgcaaagtactttagcaaaaaaaaatcatcatgcaaagtataaaatacaaaacgtcacacaatagctaaaaataaactgaacagatgaactctaaacaagaaaattctgaagtaccaagagcaacatgaaatactatcagataaacagtgtcattcaaattcttcataaatcatatcagccaagtaaatcaatgacaatacctcatcattggtgacatgctcattgagaacagcatcaaaacaaaactcatgcttctccacataagcagtcaaatcgacctataaaatcatgacagaaatattaatcgtacaacaggaaatcaaacacaatataaatatgccagcaccaattcaacattatcttataaaatcgaaaaccataccttaaccttaggttcatggacagtcaaataagcattatcatatacatttacaatatcttcctctttccgagaaagctccttcttgtttaaaggtctttttcgtacctaaagcatgcaaagagatatttagatatacatatatatcacagaggtattctcatgaaaccttatcaaaatggctgtaagttcaaacttccaatgcaatatctgttatagcgaacataccactactttaatcttagccacattgttttctcttggggtctctttttcatttgtagaatatgaaacaggcacatctgcttctggttgtcccctttgctgagtgccagttgctgcattcaagtcattgtcaaatgctctagtgccactgggaacgaatggtgaaggctcaaaagattctggcataacatgctgcacaaaaatgaaacctttcaacagataataaagattaaatgaaaacacatccatgggaaaaatattttattgaacatatccttgtcatcacagcagttcaacatccaaacacagatcaaattctcaaaactgtgcgtagatagataacatcataaattgaactagcagaagagacctttcaacaaacaataaaagataaaatggaaacatatcctcgtcgtcacagccgttcaacatccaaacacaaaaaataaaattctcagaactgtatttagataagtagcatcaaaagtggaactggcagaagagagaaggaatccaaactcagatttccatgcatcctcaaagataaatgaacaagctccttcaacaaacaggataaaatcccaaaattggtttccttacaaacaagtcaagatagctataacaaaaataatttgcatggacgaaaaaaatacacctatcacacacaaaaccaattcagactaatgcaaaagtatctgaaccgagtatataaagcagaactttctaaaaatcccatcttacctcggttaagagttctgtatcgtccatagcatgaaggtccaacagcccagctccaaaatcccctcgaaagtctggagaataaaacccatcagacgcagacactccacctgaagtatgggcagtaggtgtataaggttcagaagcagattctccattgaaattgagatttctcattaacttgaaaagccgttgcttttcttcagctgactgtgctccataacccttcaataaaatcactcatttattatgtatttcatatagtaattctatgtggttagacttgacaggcaaaaagtcagtaaagacatttttgaaaataaaaacactttacgaacgaatacacagactaatacttcaatgtaaatcgaaatgtggatgatgacgaaaataattgataatacaacaaattagcacagaaaaatttacccaccgccagacgacatgtaacgtaaaattcaacgacgtgatcataggcataggtataaagactagtggtactacacaacaggtccgagttcgaatcccttcccccaatgttaaaaaaattaccatcatacaacaacatacatattggactttgtctggtttttttttctttagtaaaatttgcatgttgatcaaatgggcacataccgaccatttatgagtaaagtgaaagaaaaagttccgcgtactaaatttgaaaaaggtttaaagacatgagacaggaactaacctgcatcagaagattaggaaggagacgattgtcaatgccggtgttagccaatggagaggccagatgctgcaaccctgcggattgaagccatcgcgccatgaccgcatcgccagcgtcactagcggaacctgcattgtgcagcgagccaccaccggcaccggtgcctgggccggcatgatcatacagagcagcagccgccgccgcggcattgctctgctgcatctggccgcccatgtggcgctgcgaacgtctttggggagccaattttcaagatctaatatcaacaatcacttcacaaacaaaccccccccaaaaaaaagtcttttttagtaaaatgaacattcacatttattcatatccatcataaaaagaaaaccacgatctaaaaaaacaaggaatattactcacaatggagggaaaatcgaattcaaaacagaacatgaacacggattacaatctctcagaatctgcaacacagtattcagaatccaaaaattaaaaacgaacaacaaaagatcgaaaatgaaaaaatgttaaaaaagttcaacaatgaaatatataccaaatgaggaaaatgaaaataggataatcgagatctaagcgactgaaataacttctttaaaaattggaactgtgatcggatctaacaacatacgatgaatcggaaccctaacaatattttccgatgagaaagaaaaaggcaggaattttgatggctggggctccacggaagaggtgtgtatactgctccttcatataataaagaaaacctttgtttgtgttgacaaaaaataaaactaaaaatcgattaaacatataagtcactgtaaatttggtaatattataattttcaaattaattaaacggccatttttaaatccttttgtaattactaatttgccctcgttcttcctctaattttctggtgcttatacggaccgtttcgaaacgtggtggtataaaatagtgagagtctttccgtttcgttgttaattcaagcgaaacggtaacttgtggacgtaaaaggctgctaacaatgttttgctttagctaaaaaagaatgtaacaatgttttgagtaaaaagccaaagggcgtgtttggttcccaagcttaaaagtgcttttcaatttattttttatgttaatttttctatttctactttttgtggaggcatttagcacaaagttttatgatttttcaaaagaaaatttgataattctaaaggtttattgggaaaaaaaatattttttaataaatcattcaattttattagtagtagcaaaaataatagcttgcaattaatctaagattaaaattagaaaaacgaatcaaataatcagtcgtctaattctcaaattgtttagcaaaaatttttttaataaaatcagatgaaaaaaattgcacaacaatagaaactgttacagtaggttcgacctcgtaatttgagtatttaactattatgtaaggtatgtaactgcactactaacaacaaccccttcactcacaaaaaaacttgttattctcaaccactaacagggatttaatggcgagtccttaaagaacaaataagaaccaacaataacacgaaacaaaacaaaacaaaattatatcatatagacaaggctaaagcaaagtatgtcacagaga

SEQ ID NO: 14204 - DNA, 7707 bp, Cannabis sativa
taaaaatgaaaaaacaacccccaaaaatatatatatatagttcaaaatatctataattaaaataaaaattaaaaattaatgcacgtaatactattgtatttatataatcttttgttgtttggtccttgtattgttattgtataattgaatagtaagttcttggttgtatttgattgttgtaaaatctctaacaattatttttatatgtaaacatacatcttttgctaagaatagctagatattccaaagtggacgccatagtaaaaattaaaaaaaaaaaaaaaaagcaagatcagaggtagacaaatttatattccaaagtggagaatagaatgtgtacatatattattagtaaaacacataatatttctaaccaataaatttgcagccggctaggccggcatggtagactagttgatgatgatataaacataaattgccaacgtattttgtcaaatagacaacttaaaataaataataaaatcttatgttttgtttattttactaagtaatctgcagtccctcaattattagggtgtcgttttcttgttcttgtataaaatactatgaattactttcttatgtgaacgttgagttgagaccttgagaagtgttttgttcatacaaatatatatgaataattagtaattttgtttcttaaatttttgatactactaatattatcttccaaaatatataacttgttaaaaattatttttgaactttttacatttactcaaatttagttcttttgttaggtttcgtcttattattcgtttaaatgctaacatgtttttattattagtaacttttttacttaaactttgacaactatgaaatcgtacactctctaaataaaaatgagaaagattcactattttttttttgtatatcttaaaatattaatttagatcttacaaaaaattaaacattttgaatgattaaaagaattaaaaaataaatcaattttttttaaaaaaatgaagcaatttaaaaattaattatttgagtctatttttgctccaaaaatttagatttgtttaaataaacataatatttttttttttaatttagtttctatttttttttaattatatgtttttgttgaatttctaattattttttttttttttatattttaggatatgaatttataaacacaaataagtttgattattctcttcacaaaatatttgtttgtttaagttattcattgaattttcaataattttagtttgatttttaaaatatatgtttataaataaataaagttttaaaatacttttttagaaataatttaacacttttattagatttttttttttttttacttttttcaaaattaatagaaaattaaaattttgaaatcggttaaaaattaagaggtaaatatattaatttttaacgattaaagtaacagaatttaacaaaataggcgtgattatataactgttatatcttagagaaatattttaataagttgtatattttaagaggcaagatcaaatagtgttaaaaatttagagagaaaagttgttaattatttaatatataatcacaaaacaatcctttcaatttctagttggtagtgggtccagtatggatataaatatttcaatatctcttataaaaatggttgtatataaataaacattaacaatgattaggtattattatcatataatatctcttaataaattgttcataaaattaaagagttaaaaatttaaaataatactcaagtagatgtattaaaaaggatgatatgtagagttatttttttttagtgtgtcattgttttattatatattcatatttaatattattttcttatttatttatctttttttataattatttgtcaaaaattcatcactttatttttttttcttcgccttttctctctataattaaaagttgttccttaaagtaggacccaaaactttaattaaaactaagggttttgatatttctttttaaaataaaaattaaaattgagactcaaaagttcaataagaacaaagtcaaaaaacaatgcaaaaaaaaaacttatgcatatctcttttctctcaaatcacatccatcaattttttttttgttgcattattatttgacttagtctcaatgaaccacaaatatctaaatgtaccatttcgagtggtttggttgcatgctttctccttaaagagaaaatacgtttagtcattctactttttaaacatcattcagagataaaaaaaattcatctaatgtgatatcttttaataaatcacccttaattagtatgtttagtctatcataactaatgtggaccaaattgtaatgcatattaattaggtaaattgtacacatttttttacagaatgatgtatatttatttatttatatttttggaaacagaatatgcatttaatttaacaatttttttaatttaatttaacaaataattatatataaaaaataaatatggaaataatatttaatgtacgtaaaatgaaaaaacaatgacacatatgtaaaaaaaaaaaaaaaaaaactgtatattagtcgttttttaatgtactgtagcattatttcaaattatatatggagattacttagcatttagagatctcagccaagattaacaatatactatcttttatgaggttctcccttggtcatgggagtgataatttggtcaaacaaatattcggaataataggcatatattaaatatttttattttttttatggaataataattgatctatatagttgagccatattatctgttattacaaaattataataataaataatcaagtcataaaaaaatagtgaaaatagtcaaccccatctataggtggaaatgtggaattctataaaagggaatcatcattatcatttcgcagagattatatgaacacccattgaatctgacactcagattccttcctacctatttttcttttaactattctcttttttctctaaagtgatcagttgtcattttctcagctaactttttcttttttcttttccattgttattaattttttttttttgggttgaaaagagaggtgagtagtgagactgaattcagaggctgtaaggaagaactaacaaaacccagtttgtcttcaaagcaaaaggtaagttgagtgaattcttttccattgcatttccttttttaacatgaaaaaaattggaagtttgacattctgtaattgaaattttatgcgaaatattttcgtctgtgtatgcgatttttctgtaatttacaaatctgttgcagaaactgatttacaaagagttttatttgcatctcacaaccacacccactgtgtgtgaataatttttatattataaaatatatatttttaattatactagtttttaatttttttttccttcacaaattcttaaaaaaatatacttataaaataaaataaatattttaaatattcaaacaaaaaattaaaaataaatatttatatgaaattttattaaaaaaaataaaaagaatatacataatttttttaaaaaagaatgtgaataaaattaaaataactattgatattaagagaaaataatgtaattttttttaaaaaaaaatattaaaaataatttttaaaaattaattaatttttttttttaatattaacttaaaattttatggagtataaataaaagtccctttgatttattttgtttcaatttttgtggggactgactgatcactttaagcaccaatacttgtctcaacttcattctaaatttgtgtggttcaaataggtactatctatgtaaagttgttaactttatttacatatatatttcattcaagaaaaccaatgttatgattttcacttgtaaaccgtgttggttgattttctttgtaatagcctattggcttgtagttgatttttttattattatttaatagttgctggttaagacaccaacaaaattttgttgaaatttgttaacttccatgtaaaatttctataattagatattcttatcacaatagaataacatcccaactcccaagccattaattaatcattcgaattgttctgatcaactttgctgtctacagattgctaggtgcaaaaggcacaaattctaaatgggtgttgaagtagaccaagaatcatccacccaaaatgatattccaacaaaatcattattacgatacaactctcccctggtgcaaataatcttaattggcctggtttgcttttgctgccctggcatgttcaatgccctctcaggcatgggaggtggaggccaagttgaccccacagcctcagacaacgccctcaccgctctctacaccacgttcgccatctttggcatactcggcggtggcatatacaatatcttagggccccatctcaccttactctctgcctgcttgacatatgttctctatgcaggctctttcctttactacaatcaccacaagaaccaggaatttgccattgccgccggggcccttcttggtgtcggtgcaggccttttgtgggctggacaaggtgccatcatgacttcttatcccccacctgatcgtaaagggacatacatctccattttttggagcatcttcaacatgggaggtgtcattggtggtctaattccttttattctaaactaccacagaactaaggctacttctgttaatgatgctacttacatagctttcatgtgcttcatgaccgtaggagctcttctttccttggctattttacccccaaataaagttgtccgtgatgatggaactagatgtagtaacattaagtactccaatgtttcaactgagtttgttgagatcatcaagcttttcttgaactggaagatgcttctaatagttccagctgcttggtctagtaattttttttacacttatcagttcaataatgttaatggggtgttgtttaacttgaggactagaggattgaacaatgtgttctactggggtgcacaaatgataggctcaattggaattggttacatgatggattttagcttcaagagtaggaggacaaggggttttcttggaattgcagtggttgcaattcttagcactgtgatttggggtggagggcttgccaagcaggtcgagtacaaccgagaagatgcagccaaagacgagtttaagcggttagattttaaaatgtcaggtgatgatttcgcaggaccatttgtcctgtattttagctatggtttgttggatgccatgtaccaaagtatggtttattggataattggaactctggctgatgactctgaaaccctgagcaggtaacacaatataattaattctatatttaaaattatgatatatcagtaataagattgtagtacagtaagtagcaacctatatttgataaacaaaggcacatgggtaattcagatagtcttgagttatgtgataatggcttcaagggcattgatttcaatattgtatcatagcttaacatagtgttactcatgtgatttcaatagggtagtactgagttaaattttgaaaactttttaaagtagaaaataacaattttttgttttttttttccttttgtttattcacttgttccacaggtatgttgggttttataagggagtacagagtgctggggcagcagttgcttggcaagttgatacacacaaagtttctttcttatcccaattgattgtaaattggtcactcactacagtgagttatccacttctggttattttggtgttctttgctgtaaaagatggtaataaatctgaaggaggagatgccatagttgacactcctgtatccaataaggccattcttgttcattgacaaacaaggaaccttgaggaattttcatgttattagcatagatttttcattgttttcctattttctacctcttacacatatttgcaccatgttagccaaaagttatgaaaacttttaatacaaacaagagtgatgtaattttactaatgaaccacacaaatcaaaaggttttacatagctagcaagagttaaaaatcaaaagttctagcccatatgtctcccaagctagattattgttgtacattttgctttaacttattcagttttctttattttatcacattcaacttgattaatccaatatgggaaaaattatagtacaattttaaattgatgtataattatggagaggagtgtatgattatcaactttgaattaatcgatttaggccacacaaagtacccttatgtgtattgtatggaaaactaaattgtatgatataatattatttttatagagtactatgtttggagttaattttattaaaaaataacatattaaattatactatatttttttttttttttcagaaatgatatgaattactttaaaaacacacaatgtagacattaacgattctcaaaggataaccaattgtttagtcaaaagacatgcttagcaaaataaattactcccaaaaaattagacaataaataacaagcttattcaatttaaattaaactatgtttgataggcaattttattttattaactagaaaattaaaatctaaataaaaaatattatttcataccatatgagatgctaacattaacccgattctaatttgattttacctcaatgcttattcattctaattttgacccaatcaacttttaaaaatattaataagttcacataactaaaatatacacaaactaattaataatgtatcaattatcaactatcaaacaactagataattaaataaaccaagttaaaataaaatttctcataagtagatcactgaatatatttaacttctctaataattctcttcacaaaattctctcgaagtgagccatctatcgacttaaaggttgatacataatatgatttctttgatatgcaaatcaatgcatcaacttgattatcatctgaaagttctattgatttaaactccaaagctatattcttaccatcatcattactttgcatcaattgcttactaatcaaccttacttgttgaaagaactgatcacacagtcttgaatattgaaaaagaaatctccttcataccatcatggaaactttctgatcttgatcacttttcacaatctttgggcataaaattttgaatcattgacctagaagaatcattagtctcttagcatcaactatatttactggtgctactgctcattttctagttgctttaaactcatgtctcctggaatgtatgtgtgccaaagcatacaacaataaataaccataaatatgtttatcatttgcaaatgccataccattatgatgtaaaatgcctgaatcttctattattacatatccatatctatgaataatgtaaaatgtataaaattaattttcttatacagttaaaaaatgaataaaaattgacattaaaaaaaaaacaacattccagatagtaatggtgcataccttatgtctccttttcctcttatagtatgataaaaatcctctgatataaactgaaaaaaataatttctctacttttgtgaaattatgtaaaaattgaaaagtgaagtgtgtgaatgattggagtcccacatgggataggaacacttcattaaaagtgtataaatagtgtatgtttgagaatttggtatgggctccaaggggtatccagttttgcacgcatgggtgaggactgttgcgaaaattattaattactacgcaagtgcacgcaatc

SEQ ID NO: 14205 - DNA, 6533 bp, Cannabis sativa
  modified_base (2526)..(2527): a, c, t, g, unknown or other
  modified_base (4461)..(4462): a, c, t, g, unknown or other
gggggggggggtccactaacattaatacccatattcatatcaagtatcattggcccactaattttgtccacaagattggagttcggcccactatccttcacgcacggcccaataagcccaacatctcttcttttatcaccaaaggaattaaaagtcaacttatctttatgtagataattaactccaaaatggtcagctcccaccttcggcccaccagcagaaacgggcttcacatgggcccgatccactaagatgttaccactatttttttcacataaattcaaatcaggcacaatcttcaaggaacggtcttctatagcttcagagataggttgttctataacaggtaacacttcagagaccttttccatttgagcaattccatcttcactttctctactcgatttggaagaaggaggtacaacaccagctggtttcaatttggagacccactccgatcgatgaacagtaccagtaccagcagacagagctccacgctttgtcaccatccctgaccgtgtcgagccacgagcaatggtggagaccgatcgcctgaagtcaccctcgccatggccgagagctaccaccttggacggacggcgaaatggagcataaagagcataaccagagttctcacggcatggagagaaagaattagcgctggagaagacatccctgtaggttgacgacgttgaaagccacggcccgaacagagggaaaggggtgccattgtcactggtcaccaactccggcgaggtaagcgtacaccctcttctttgatgtccgagacgtccacagaaatagcagaatattcctacttgttcatacttgaactggagccatctcttgactcccgaatccaagtcaaaaaaacaacccgaaaacagaggcgagttgaagtccttctcgatcaaaatcttgaggtatttcccccacgaggcaggatcattttctttcaaatccacatagacgactttccctgctgtaccaccaagtaataacccgttagccatagaaaaaaactcatgaggtatattatgtacctgaacccatatacgcattgtgtcactgagaaccggggaatccgaggttgaagaccaaacatggagaaaaaaggtgtagcctcggatacaccaagggccatggtccaatgcccagctcctgtcttcctcacgagaaaaccgtagctcgaaccagttggaatgattagagccctcagctaaggccaccacggacacaggaaacttccaagctttggccacaaattccataatattggcctcactcacagacatgggggccactacctttcccagcagacaaaaggtagatagagctttccgagaagattcgcaaggaaccaacttgaccaaagcatcattaacagaaaggcatttgcctttaagagggggggccaaagaagcatttactacctccataaatgccgacagcaacacgacaaaccaaaacaaaacaccacaaacaacaacaggtagaaaaaacaactaagacactcaaaactcttactacaaaacccctgagagaaccaaatggaagcagcacaccagaactaggacatggacaagtgaaactaaggacttaaccaccagaacaataaagagactttgaaaccaaagcaaaccaaagcaaatagacccaaacagaaaaacacacgcaagcaagaagcaaaaccaacaaaaaggactcacgaagcaacaaaaagcagaacactaaggaccctcagaccaggaagaaaagaattgagacacagcaagggatagagagagaacacagtagatgaccatgctctcttcgaacataaagttattaacacatatatatatatatacatatttatatatatatatattttgaagaaatgtttcattaaattaaaaatcaacaattacttaaaaattgatgacaaacatttatccaaatataatttttaataaaatttgtaacaaaagtggccaatccatgaccttctcttttacagaaggcaaaataacatagtaaaaatccccactaacaacaaataaaagactaacgatgacataaaaatgcattaaattaacacacgaatttgtaatccaaaaaatatccataaataaaacaattagtgataataatataatcaagtcataaaaaaaaaaaattgaaaaaagaaagaatgatggtgaagtcatttaaaaaattgttgactttgtattttttttttattcttttttaagaaaaaactaaatttagtgtcacactatcattaaatttggcgtcaaaaattatttctactctaaccacaacactaaaaattacactaaaaatattttttattattatattcattttttaataaaataaaaaataatatcatattaattaacaaaaattaccacaattgttatatttaactaataatttatataaatttacaaattagattaaagattataatttgattttttatggatgatttaagggttaattaattagaaaaacttaaactataggtaattgttagaatanncccactttacctaaatcccaaaactacccctctcaaaattccacacccattctctctccttccttctattctttctgttcttcccaaccgagtcgtcccaatcccacctgaaaccccaaatcgtctcaaactccagccacacacacacacaggagacccaccggcccacgacgctcccccaccgacccacgacgcaccaccaccgaagcaccaccaccgttttttttttattattattgattttgtttgtgattttagtgttaaagatagattttgttagatttagggatagatttaggttttagaatctcagatctatgattttggacaaggtccgatggggtccaatagggtcgaatgaaactgtgagtttgcgaggtaggagacgtaggtccgatggggggtctgatgggtctgatatagggtccgatgggtccgatatagggtccgatgtagggtccgattgtgtaaatgggggtgatgtaaatgggggcactttaatgatatcataaaagttgtcatatcatacaaatattagtaattatgtgtttaggggaaattttttaaccaaatgtaagcataaaaaatcaaaattttctaactataatggacacgaccataaaaaaaaaaaagaagactaaacaagtctcccgaataccgaagcaagtaagcgtatatcagtgcgctacttttaaagaagtgtattatttttggcgtattaaatttttctaaaattttcaagatgttttaaataactataatatacactactatataaaaaaatagactacaaaagtatgtcggatgttgaaacaaataggagtagattcgtacatcacttttaaaatgtacattgtaaaatttcccaaaaaaataattcttaatttttacaaatacaataatataaatattaactaaattatatatatatataaaaaaaattatgccgtgactatgtgcacatcatatatgtcgtgcacggtagataaaacaacaaaatgctacaagaaatacagcatccttggacgacatatacacaccatttaacatatatgcagtctcctgggagctactcttaccacttaccatacagtgaagttcatattgaaaaataaaaataattaataacaataataattaaccaaactcactagtaatagtattacgtttgacaacgtattgtgtggtatagtcagggctggccctgagaatatatgggcttaaggcggattaaattttggggccctcagaaatatatatataaaaaaattaaaatgagtgttatgaaattcgaactcatgacattgtataatatgtcatacacctcaagtaactaaactatgactatttgttgtttacaatatacttaattttattttaataaaatcctaatatatttttttttttattttaagtccccgaaatgacattatatagtagtagagaaacttttattggtttgtttagatggagagttcgaatctcactataactctttattggaatgaattatgcttgaccttttaaaagactagcttgctatgacgataatatgtcatctttaatgggataggaaccctcgaagtatataccaataactcaattaaaacagaatgatgtttaatacccctatagctgtcacatagtcttcaaaattagtcctcgagattattaaaattactgaaagagtaaaaaaaaaatctacaccacgtgatttttttttctaataaaaagaaaatactattaggtttggttttatgagttgtttagtagtattaggtttggctatctagcaccatagtaaagctcataccttattgtaccatatgctttaacacattgtaccatacactaccaaacaactttattttttatttttaatatattttgaaaaatgaacaaatatttttaacttaattaaatattattttttnnaaaaaaaaaaaaaattaacaactagctaagaagagaaagccaaaccacaaacccacggacctccaccttcgacggccatggcggcggcgacggcaacaccactctgtgcttcaactcttccaccacactactccaatacctcccccaaatcattcaatcactcccatttcacagtcgcagttcccagaaatctcttctcatcgtcctcaatttcatctctaagacaatcgaaaacgacgccgctttcggctctgccttctgtatcggccgccgcgaccaccgctttgaacgctgagcaagctccgtctgaggtatctgctactccctcaaaggctcttccttttcgggttggtcatgggtttgaccttcatcgattggagcctgggtatcctttgataattggaggtattaatatacctcatgagaaaggttgcgaagctcattctgatggtaatcattcgtatctgaaatgggtttcttttaatttttggattaagttagtaaaagctctaaatttacagaaatttcgactctttgttttccataattagatagttttaatcttatatttggtataatttatagaaattcaaaataatttaactcgtcaaatagtctgttgcaagtttaacactaagaggtgcagtgtagaagaactcttaaattttatactgtttggttgctgagaaaataaaaacttgaactttcttagattttctttgtgaaaagagagttaaagatatattctttgatttgggtttgtaggggatgttttgcttcattgtgtagttgatgctattttgggtgctttggggcttcctgatattggtcaaattttccctgattctgatcccaaatggaaaggggctgcatcatcagttttcatcaaagaagctgtaagttgttattgttatgtttcattcaaccaattttgtttgatttttctatgcattttacacttgattgaattgtattgtgcttatgaaatcttcagtcatatacagatttttaccattgaattgagtttgtgctatgtttccttttagctgttcaaacataaactctaagcaagaaataatgtttttctatctttcactaaaagtgcgagtattcgagcaaggcaagaacaatcacaccaaaacggcgattactcgcttaaagtacgaatactcaaataataagcaatgaaaaagaaagtaaaaagtaatgacacaaaggaaatatagtggttcaacaaagctcggtttgcctagtccactgtctataacataaactctaagcaagaaatgatgtttttctttctcttttcataatgttaactaagtatttcatatttagttttatcaattttcaacacaaacccaaatgattgagactgttgggattgggattaacccttgacaaagtcttatttatctgtttaggtctgactttttgtttgaagccaataatgaattgttaactgtagaatttacatccacacacacacacttgttgaaattatcatttagaattatacttgggaagtttttctcaacaatgtctctttgtcacaaacaatggaacacaattattgaaaaccattcactctgagctgtctattagtagttgagagacaatataaacatgtttgaatatgttttatctatattttaggtgagactgatgcatgaggcaggttatgagcttggaaatttagatgcaacattaattcttcaaagaccaaagttaagtccacacaaggaagctatcagagccaacttgtctgaacttctaggagctgaccctgcagttgttaatctgaaagcgaaaactcatgaaaaggtcgatagtctcggggaaaatcgaagcatcgctgctcacactgtggttcttcttatgaaaaagtagaaaagaatatgcttggaaagtccttgtcaaaaacatgtggttagtagttgtaacttccatatactaattacaattcttacataatgtaaatgtcacccttttcggaaaaagaaataaagaacaatatatgtctcagaaaaatgtttgacatttatgaataactgattaaatttgataactt

SEQ ID NO: 14206 - DNA, 4472 bp, Cannabis sativa
ttgaatcatgttgtttttatgtgtagaaagagctccttttttttccttctcattctcatctgctgttttgtgttatagaatgtcagaaatcaaggcagtggttggcctatcatgggaaccaaagttgcccaatttgtcatctgcaaagggctttgcttctaatgctacaacaactcataaaaatcagcctgaaagcagtgtagtttggaaacccagttcagagcttgttgatgggctttttgttccaccaaatgaccctaagaagttaaacaggatactcagaaaacaaatcaaagatactgctgggcataattggtacctactttgtttgtcttgtatctatatatttgctaccgttgtaattatctataatttacacttacttttctactttaattaggtttgacatgcccgcaccaaccatcacccctgagctccaaaaagatcttcaattgcttaaggtgcagttgtcgttgaccattttatatttcctattcaaagttcgttttattgatcattacgcatagttaatcctttgcttgtttctcttaacgttgaataaattttttacccctgtacaattatactagttaacacttaaagaataaagtccacggcctttaattcttgcatttcttcataacttttgcccattgtaaaatccaattgaatttttattctctttgagattgcattccttgtctttatcgtggtaatcttattcgaaagagttaattttttcatcttcttgtattaattacatatgatgtaatgtagagtagctgtcccagaaaattgggattagggctaactatttaaaggcctctattactgcggtataagtatcgtttctttttcttctttgttccctccaactacacttgcagagattttagtttcggaccacacactcagtcaaatactcacccctacccattcacttgagtgaaccttaggtggaaggttttgagaatcaccttggtgtcctcctgcttattatattgtttggtgatatttttgttagaatgagataagcgagtgtccaagttttctaggcaagctttgcttcattgaaattctccttgtattcaactgttaccaataacataatcgtaatagaatcgtcattacaatgccattgtttagttgatttcaaaaactttgtaatgcctttacaatataatcaccgttatatgaataagcattacagccctatcattttcattactatttttatcatctgatttaaatgccacctgagatggatcaatcaaattgcaacattctggtcattctacctaacacatgacataagtacgagcattttgattttttttttttaaaaaaatattcccttttgatctccagccaaaaattgagtatgattttagtcgtgccttgttagcttttgttttgagataaaggatgaatatcctacaagttatttcatctagacttaatttaagttcatcaatggaaaacataaaagggtttcatttacttgcttgcaagttcatgtaattgtagaaactctttcttgggaaaattcattttgcttttactgattcgcattatacttggcatatgtttatagttgaggaatgtgatggatccaaaaaggcattacaagaagggtgaatcaaagtcaaacaagtatttccaggcaagtgtataccaccatcctattggcagtatataaatattccaattcaatctatattccttgtttgaaatcctttgacagtgttttttcctttcttttgttctttgtaattattgctattaatcaggtgggaacaatcatagagtctccactagatttctttgatggtagattaacaaagaaagaaaggaagacatctcttgcagccgagctgctctctgatcgcactcttggagcttacaggtaagatcggctttgaaatgatttatgcttttgtcgtgtttcttgcattatgaaaataaataaatcgtaggctccggttggatattggatctatcgaggtagaggggcaaaacaagagccaacatatatatttgcatttggttttcacaaaagagggattagaactttagagaaagttgtttggatattgttttgctccacttttctcaatccttaagtgcttcacatctaagcataacattgattttccgaatcatgttttagaattgagattagtaatgcattagtaattctaattgaatgtaaggaagattgattgatagtaaattctgttggcgaaaggtttttctctgatctaacttatttggttactgatgttatatgccttaatctttgatcttttcaggaagcgcaaggttcgcgaaatagaagagaaaaatcaacctggcgggaataataaatggaagataaaaggaaaacacccgaaaaaccgagcaaaccaaagaagacattgatttttatttttcttctttctttgtaaactgattccattattgaagatgcaactaaactgtgtgtgtctatgtttcaggtttagattttagatcaccaaagttccaacatttttgttctgatgaaaatgtaatattataatgttaactaagctaatagtattatttgttcctttcaagtaaaagtatgatatagttatcatgcattatattatatgagataaaatgacttgtagttttgttaagcctaagttgttcattaatcattttcgagcaattttattaccttttctatgttcataaaacatgtttgattgggtgttatgatgaatataatttcaaacactcttctatgagctttgttcatgaaaatgggagataatctttctttttattttttccctaatttattcgagcgccactaatttcttaacatatgaagtacaatataaaatacatcaaatacatcaaaatatcaaaaatatcatattttatgtaaataaaattttaaaaattgtataaatacataataattttttttttctaggaaaaataattccttcatcttcaatggctagcgaataggcccatattaaaggcccaacaagaacaagaacaaacccctaaaaacactacagttattacctctctctctctcgttcaacttctctctcactcttcttctcaggcctttccaccgccgagtgccgatccctcgctcaacggcaccgcctctaactctatctctctcacgcaggtaaaggttaaagaactattttttatttatttctgtgcttcttaatcttcatttaatctctgttgtgcttttcaatttatggtttatagtcttgtatttttattaacttcattgattttaatgagtaaattaccttctgaagcactttgtagtaccctgtaaatattaccgtgtaatttaggttttggttacttaattccatagcattggtattatattgttgtaatagtagtttcctttgcgtgttcactgatcaaaattgcattttttttttaatttttttgggacagattccatttactttggctcctaaatgttgatttggttctatctgatattctaatttgggttatatttatttgtgtattgattttaatgagtaaactaccttctgaagcactttgtagtaccctgtaatttaggttttggttgcttaattccatagcattggtattatattgttgtaatagtagtttcctttgtgtattcaccgatcaaatttactttttttcaatgtttttgggacagattccatttactttgactcctaaatgttgatttggttctatctgatattctaatttgggttgttttattcgtgtattgatttctttttctgtcttgttcttctacttagttttagtttagtttatcttgtttctcaaactttttcttttcttggttatctttaacagattatttttcttatttgcaacccttcattcttcttctttctaatatcatctttgatctaaaagtgatcttctaatccattattcttatcagatcaggatgggctattatgattacttgaatgttaaaatgcattcttcatgcaaaataataaaattgttgtagctatatttttggttaaaaaagaccatgcaagttggtcttagcatattctttttattttactctggtatatgttttgtattatcaatttcttacattaaaacaaaatcttcatttaagaaagatgcttgaaggatggattattttgttgtgaatgaaccacattttttttttttacagatttaacaaactaatagattataaaatttacaacttttttctttcttaatcattaatttcatttaatccaatcctcccaataatccacccaaaaccgctgcttaaatggggttatgggttgcacttttaaaaacccgccaaataaaaaactgcgcagaccacccaatttgctcgctgtgctccgtagttggaaccctaggaaactgaattatttttgaaaggtttatttctggtacatttgttacttatgctcagtgtgact

SEQ ID NO: 14207 - DNA, 4120 bp, Cannabis sativa
ccgtatcttaatttttggactgaaaattgaacacttacctttatttggcagggtgtcccattattatatgtgccccttgaggttgtcatgtcaaagtactatggagagagtgaacgcttgctagcaaaggtgttttcactagccaatgaacttcctgagggtgctattattttcctagatgaggtaagtttttctctcattattttttgcagcctttcctgttagtatttgatttcttttacaccactgcaggtggattcttttgctattgcccgtgatggtgaaatgcatgaagctacacgtagagtcctgtcagtgttacttagacaggtacttcttggatttcgatctattttctatgcaatagcatagtttatactgggcggctcgaccagcatagtatcatgctgctacgatcccagtgtgctatctacagtccctctcatctttgacattagaattaggtggggaactgtttcactaatgatggaaagttgtgtgggctgttttagaaatgtcctggctgagagttggccatttcggtttccagttccctgctaactaataaaaataattcacactaagtacgggtttggactttcccattgggaagtgtttgttgtttacttgtcttcctatatataattgagttgttcatacttcatgcgcagtccatagtcttacaaacacattgtataaagaatctaggcattatgccagaaagaatgtggatgcaagagttgtatccatttttgactccctcttttactgcaacccttgatcccattttgtgccgcttggttctaccctgcagtatcataagcctttttcaagttttgtattgccattgggattgtaccagcaaagaagttgacacacaaggaattttagtaacatcttggttggtaggatagctatattttgttgttgtttacacaagttaccttttttcctttgcagattgatggatttgaacaggacaagaaagttgttgtaatagctgcaactaacagaaaacaagatctcgatcctgcattgattaggtaagtacatggctcaaatatggcatataccagatcgattattttctaactcgcacttagatttatcgtgttaaagaagagtaaaccgaatttattatcttctaattctctgcgaatactcctcagtcggtttgattcactcatcacatttggattaccggatcggcaaacacggcaggagattgctgctcagtatgccaagcacctcacaaaatctgaattagatgaactcactgcagttacagaagagtaagcttgactttgactcatcaactagactagtattgagccgaagctagccatctttttttgttttcactaacgttttattgccaaatacagaatgtctggaagggatatcagagaagtgtgtcaacaagctgagcggtcatgggcatccaaggtaagtgatcttaatctcttgcgttttagtttatttcatgtggtattatcaaacttatttgtcaaactttgttagataattcgaggacaagcttccagagatggcgaacaaggccttcttccgccattgaaagagtatgtagaaagtgctatgaatcgccaaaagggtttgtcgagtattgcagaggcaagattccagaacccgaagaccgggaaaaggaaatctcaactcgttgttgattaagattaagttaggctagttaggatactttattgctagaagttttgtaagtttttttattaggacagcaaatgaaatcatagcagcaaaactactactgaaatgaaatacatagaaaaacgacaataatacatgtaaaacgatcataaacaagtaagaaaatacgacattacatttttgcatggaataatcatctcagcctgagaagcgagtcatggttcttataattctatactaaaatagcaaactgcattggagtaatgtgaatagcaaagctccatccctgcataaaaagccaccaaaaccaactcagtgagttcaccaaccaaaacaacgagaccgagtcacgagtcaaaaagtttttctttacctttgagaaactgaaacttgttgtgatgacgtttcttcttcaattcgcttcctttttctactattagtaacgttaatcggccgtgaaataaacgaagctatctgcaattcagttcttaacatcatttgagttaactcggcttccgattcgagccgccgattctcagcttgcaaccgaagagcctccctcgtcttgttgagctcagcttcgactttctccattctcaagagcgaatccgataagactcgtaggcttgccgagagaccagtcaaacgcttcttcttactgtaaaagtcgtcggcctcatccgagtcggaactccatgaaacgtttgaaattgaatcaacgtcgtcgacgtcaatatcttgaggctgtgcaccagacagtaatccggcgtcgatgccgttcttgagacggttggcttcgtcacgattgccctggcttcgcagggttcgattggtctgataagccatcaagagattgctattattttgttttttttttcttctttgcttttttatgaagatgcttgtgtaaactttttcgttagtgcagactaaaagatgaagatgaagaagaagatgcagcccaattacacctcaaatggtatgggccttcactattgggccttctattcattattctctttacatagcacgtatacctatttaaactcaaactaattacaaaaagatctttaactaacttatttttattaatgcattacaattttttttaataaaaaatactacatcacaatttaatacaaaataacaaaaaattatcttgcttctcaaatttttttatattttctgctgaggaggctgataaaatattttagtcgcttataatactaataagatacttgttagtcactttacataaaaaaatccactttatgataaaaattaccaaaaattggctttcaatttagttataatagttatatatataattactgtggaagaaaaaagtacagaaacatagttataaattctattttttttaacagacataaattatagattatgggttataatgtgttaagcaactattaatatataaaaaaatatatataggctttggaatgcatatggtacactataatcatgtctataaatattttgagaaagcaaataaaaaaatgtcctctgttttattttttgtttagaatgagataccattttactcaaattaagtcaaaatttatttctttttccaaattaaataaaagcaaaaagttaacaaattgtttaaaaaaatatagactgaaaattagattgaaatacagattgcataatagcaatataaactttttgtaagaaagttattggccgaaattcactctaatgacaatatttttcatttctttattctaattttaaaaagaaattgaattacccttttttaattgttgttaattcaatatttgtttaataaaggaggactaaaaatattatatgaacaggcacataccttaatagtacttctaataataggtgactgtgagctattattagttcttttgaaaaaaaaaaaaaatccttggaagtgaagggaatttattaatgagacaatttagcccaagaaaaagttgggttgtggaatcatatcatattcctacctatattcttgtttcctagattttaagggcttgcctttttagtcttttttttttttattattattattatttattatcattaacaaaagaataacttcctttcacaaaaaaagaaaaacattatcttgagtcggtgatattctttcatgttgataagatttattttgtttgttgataaaattaattgtttaattgacacacaagtttacgtgtttaaagattattggtaaataaataaagtaaaaagagattgacaataccttgaatcattagtgaacataattatttttgcttctaatcggtatatttgtcaaatattttacactactaaattttgtcttatataatattagatttgttaatgatacctcatattatattataataatggatagtaataaatacatagatataatttaaatattttaataataaaaaaa

SEQ ID NO: 14208 - DNA, 4827 bp, Cannabis sativa
tcctcttgccttcttctttgtaagaatcaccatccttttttttttcccttatttattgtttttcttgttacagcacttttgtcaatagtcttaagctgcatggggtttttttctttttcttggtatgtgtgggtgtgtctttgtaaacttcaccctttgatggaatgcaaattgagattgtttcacgatctgtgtttctcttcttttgatttgaaactctcaacttgaatatggttgtttggttttgattctagtttatgatcaacctttgtattttgttgtgttggggtctttcttcgaaataagaccatttttacagtgacttttatgaatttatttcaaaaaaataaataaaaaaaagaagttatttttatttcatcgatttgaaattgtaatcttcaccgggagagtaataaattctccagaatataggtccctaatattgttcaacgcctacaagatgaaatagcatgaccattctatgttttgtactcaactatttcttgtgaatatacttgccaataatactcctttacttcttcatatcttattcaattttgtaattgaaagatttataccaaaacttgatggttacatctataaaaaattggttgattgattatttgtttgtttgtactagtgtgaagttgtgtaaaatatggctcttttagggggtaataaagataaggagttgaggattcatgaaaatctggatgagcttgggactgatttggcagactatatagctgaattatcagagacgtcagtgaaggagaggggtgtctttgctgtggccttatctggtggttctctcattggcttaatggggtatcaatattcaatcaatgccttccttttcctactttgatttaattgtttttgtgattttggtgttttcgtttaaatttgtgatggaaaacagaaaactctgtgaagctccttataacaagactgtagactggaccaaatggtatatattatgggctgatgagcgtgttgtggccaaaaaccatgttgatagcaattataaacttgccaaggatggtcttttctccaaggtttcttccttcttcttcttcttcttcttattttttcctcttcagttttccatctctctttaagtgcaaaacttggtataaaaaaaagaagagaggatgacctcattactcctcaaagagaactagctggtttaggtgttgttacatatgggatttagttggtaatgtcaataagctagcccaaattggctgagatctctattcccattctacattcttgataaagaggttaagtgacttaagatatgcttttctcaccaaatctctcatcaaccatgttttgctagaaaatattgtattacagaccatttcactttggaaggtattcaaattttgttattttttgtgaaagaggaaagaatcatgtcaacagtatatctactcttgtcctgtaaatttattcaagattaagcaaatcagatagctactttccaacaaataccagatagcaacttcagaacttccctttagagattttacttcaccgagttctattgtgatgtaatttactttgggttagctgtaaatttcgttttcaacttttgattcttttacatgtagaccctctttcattagcaaaataagactgttttttcacaaaatcatttcatcttagatgacaatatttataatggtaaattggttggtgaggtatgaatttagttgtgtatgtgtgtggttgaatgtctgtctacatgatatgacaaatttatctgagactgatagcagtaaagttgttaggtatgagctttatgaaccactatatccactcctgaaaaacttcatggattgggtttgattcatgggagagtgagtgtactttccgtttgcttgatttaaataggttgaagttgctgacaaagcattaaagcattcttgggacttttgaagaagcaattaatttgtttttaagtgaatagaattaaaatagactcaacgtgacttagtttctaatcatttagttattacttatttgaaagttgcaggcttgaccctttttttttttctgctgtcttaacttataaactcaattttcttacataatcaaactaattgagtgacaagagcagaatgtcaatatgcaataatataaaaccattatggtgaggattaaattttgtggttatggaccagtatagtttagatcaggtagataacctttttttagacccattgaattggagcagttgaactaatgtggaacccagcaacatgacagaaatagctaatttattaggcttcacactagtagagtgtaattcttaggtgtcccatcaaaagttaaaacaagtgaccctacctttgatttatattatttttggctaaggggaatgatgagtgttcatccgtttccgaccaactcaaatgccaaaattgctgttttcttctttctgtttgtaaagcaatgaacaagtcatttttaattttgcatgtttgtcatatctcgaatcagaggagccctgcaatgataaagtaattaaaaggaaggatcagaaatagggcttgtgtgttaaattatattagagctaaataagcattagtaaaaattctaacaaatattaattttttcttaagtcatatagtattttgtttaatggtgtcaccatcatctttactctaacctgctttccattgcaggtgccaattgttccaagtcatgtgaattctatcaatgattctgtttcagcagaggaggctgcgagtgagtatgagtttgttattcgtcagttggtgaagtctcgtgtaattggtgtgtctgatacgagtgactgtcccaagtttgaccttgttcttctgggaatgggctcggatggtcatgttgcatctctcttccctaatcattcagtgctcgatgagaataatgaatgggtaactttcattacagactccccaaaacctccacccgagaggatcactttcactctaccggtcatcaactcagcatccaatgtggctatagttgtgactggcgaaaacaaagcggaagctgcacatttggcaattgatgatgttggaccagattgcatagtggtacctgcaaggatggtgcagccaacaaaagggaagctggtgtggtttttggataagccagctgcctcaaaacttgagggttttcaattttctcactaggtaggttcgacctctacatgcccaaatgtatgtttgtatttagtggagggatttgatgcttttgcttcattttctttttcattagttcccttattttgttattttgtttatgggttaaaatctttttttttcttcccttagtcttccttttctctttctcttctcatctttttctctaggaagttggagaagtgtgaccatcctttttgtaactagagaggttaataaaaatagaaaagcttttcttctccctatacttgttagtggtagtcactgataataatctcaaaatataatatacacatgataaaatgaccacgatttattgcatcacaacatttgggagggggctaataggtcagagatatttatcatttgtgttaatgttcttgtatcacataataaaatgagtttggttactttttttcccctatttactttattagcaaataaaaagcaaaggtaggctgcacgtggaaactaaacagaacaattttgtaggcttgtggtggaccaacgttattccatcttaaatatgttgagcttaaaatgtaatagtaatactatcttaattctacaatgcaaataaaaacatgttacttgtacccccaaaaataaaatttgttgtccaactggagagagtttgacatcacaccatcttttaaaatcaaattattacattcttcacctactctcaaccattttaaattaataactgaaaactacattacaccccctatccatttcaagataaggacatttgagtgaatagatttattatttgtgtttctctgtcaaaattagataaagttgatatccaagttctaattttgaccatttgaaaaagattagtaattttgacagagaaagcaaataaataattaattaatacttacccttgccatccaagtactaaatgtactttcttttaccttcaaagggtaattcgttaactatgaatggaatagttattaattcaacattgagcaagatcaacaaattattctttcatggttaaaaaaatgttagatgaattttgagattgtgatctatcaacggaatatgaaattggcggttcagaattaaagttacatcctaatttagttgttccctaaaaataaaaaaagatattgacggcaaaattatttgaactatatgttgtgacacttgacccctcacttttgttatgctatttatacttctgttaaaatggtactccaacgtgtactgctgatgtatacacaagtgtacaatgacagtatataagtggtccaaatcattttaaaatataaaaatatttttttaaaaagataaataataaaattacaaatacaaatatttataactcaaaaatccctagctcatctcatctatcccagtcgcctccccctctctctcggtccaagcggaaggtcagcgaacgaccagtcatacgattgaatctcagccacgatgatcaaatatgatcataaaaaatcatgatcctcgtccctagctcacactttctctctgacacgtccccctctttctttttgttcctctctctctctcggttcaggtgaatgactaggaaaacggtcgaatcccgcccacggtggctggatatgaccacgaaatcacaatctccaccccataaaaa

SEQ ID NO: 14209 - DNA, 6818 bp, Cannabis sativa
  modified_base (3838)..(3838): a, c, t, g, unknown or other
gcataaaacccaatagggaattgatttgattggggccttgccaacaggaaggggcagagcgaagtatgcagtagtagccatagataattacaccaagtgggtagaggctgaagcactagtcaacatcactgctaggtaagttgtgtcctatatcaacaaattcgtaatatgtagatttgtagtgccacacaagatcatcactgacaatgggacccagttttagggagacttgttaagttcttactatgcggagaggggcattaagaggggattctcggcggtagtgcaccacctggctaatgggaaagtcgaggcattgaataaaataatcaagaaaaacctcaaaaaaatttttaaaggcttaaaggttgatgggtagatgaactactgaatgtactctgagcatatagaagcacaccctcctccaccacaagtgaaacatccttctccttgacatacatatgtgaggctgtgcttcccatcgagatgaagctcaattcatttcgcgtgaagacttttaataaggagtccaacgaaaaagccatggcagaaaatatggacctcttcgaagaaaggaggaacatagcccaaataaggttggcagtgtatcaacaaagggtggcccggtagtataattcgagagtctgcatgcatgcattcaggactggagaatcggtattaagaaaggtccttcccaatactagggatccaagagcaggagttttgggagccaattgggaaggcccctatcggattgctaaagtcatcccacctaggacctacaagttggcccgcatggataaaacggtagtaccgagggcgtggaatgcgggacacttgaggaaataccattgttgagaaggcgaagtttgatctaaaaaaaagaaaagatgactgacgccaatggcgaatgaggaagtgaggtacaaatatttcttggctaacaaggattagctatccttgctcagcaaaagaaagatgcctcacctcgcaaaaatcatcaagccataagaggtcctcccatacactcatggcataatgccgaaacgagagggatgcttctcacgagtaagcaaacatttttcaatcaagagggtagggcggtcaagtgctataaagctccctcccatccaagcaaaaggatggatttactataggagggagactgctcaaaaagccaaaactcccccaaagtatatgcctgcctaccacgacgaaaaatggccttgccaaagagtgacctccagagttgcttcgccaatgccagatacgaaggtggctcagccagagagtgaccccagagtcactcgacccatgccagttataaagatggcatggatagagtgtgagcccagtgtcactcagccaacgccagttacaaagatggcttggcaagagaatgaccctaaagttgctctaccaacgccggttagaaagatggcttggccagagagtgaacccaatgtcactcggccaatgccagttacaaatattattgggtcaacgagccaccctcagagacgttcagccaaggccaagtaaaattattgcttgatatattagcgcaaagtaaagtaaaaccaagggaagacccccgtataaagggagcactatctcaaagatagttgagaagatcgcaagcctcggcaaggcagatcccccaacttattcagtctacaagagcacttaaaagaattcttgtagactgagggcaagtgttaacccaaaaaatcggaagagttgattttcgagattaatcaacgatcgaccccaacagtcgagagacatcaactataagatttggtcgaagaatgatagagatgggcgtggaatgggcagagatgtgaaaagatggataagtagaggtaggcctacgagtcctgcgcctgggaagatgttggggtgtaagagactgagatgggcgtagaatgggatacgacggcataatctgcaactgatgaggggatggaatctgctgctgctacggcagtggcactcacttagactaatactatcgtggtggttgttgttcttgtggttgtttttgttgttgctgttgtggttgttattgttgttgtagttgttgttattgtggttactgttgtcgttgttgttattgctgcttttgcagtggttgttgttgttgttgttgttgtagttgctgtcacgggtgttgttgttgtggttattattgctgttgttattgtgattgtagttgttgttgttgctgctatcgttatggttgctatagttgctgttgttgctattgttgtaatggcgaatgggttggtggtatactggacgcccctatgtccaaggctgaacacttgacccttttcgtactgggacccagaggggtctttgatcccttctgcttggacttaacagaagtctcttttggagagaagacaagcccgtctaggctgtcatcaaattcccttgcgtttggtgtggtacctgggataattccttctagaggagggatgtccttcaaggtctgctgccctggggtagcaagagcttcaggggcctttcaagaggagaaaaaatccttctttccaccagttgaagcggaaggaccagggactgttcgtcaagccttggtgggagaaggaatctcccgaacattcaatgacaaagttgaggggggacgcagtttctgggtcttagaagccttggtcttagttttccccttgccctttccttgggagttcctggccttgtccatagcggctgagatcttgctactccaagacttcaacatcacagactctcgtgtacctgcacattaagcaacaatatgtgtgagtaaaaggaacaatcatagatcatacaactataaagaaaataacaatagtgagaagaggaatctagtaaagaaacttgtgcatgggtgcaaccattcagtgaagtgctatagggttgcccgtgagaaaaagctaaaatgcccctatgaccaataaagctaccatattccttaaacttcagtggagacatagccatcaaagggtgtactttgacagtgtctgaaaaagttcttgaatttctaggactcctaactatttgttctactttgtctatgtaatccttcatggggtatctatgacgatttatgcttaggaaatatttgtcgaatcctccctggttcctccgagacatgcgactcagactgggggtacagaagatgcgaaagggttcattacctcttcttgaagtactagcactcggtgtccccacatcaagataaacaacgataaaccactccgagatctcttcttcctcacacaaaggattgggattgcgtgacacccaatcagagttcagggcattgtcattcttggccgcattggtgattataactgccaagttagtggaaatcgtctcgttcacttccttgggaggttggcgctgtcctcgaaggctgactctattaatactttggaattttgtaatcaagcaagacttatcgaggagttcaattgtcaccagttccccaactttcagttgctcttcctagaaggttcgatattgaacctcttttttgactatcttctcaatcctaatgcgctcagagggaaactctgccacgaatcaagtatattagtcagagtatcgaaattagtaaaatttaaaaaatagaaaaaattcaaggcaaatcatcaaaataccttggagatgaatgaaagcttagagatggctccctcctagtgggaaggaaatctggaagaaaagaaccaatattcctggaggtcatgagtgtgatctgtatgacagatagggcagtacgaatctgagcatttattaatcaattcataaaaatactaattgtattacatanaacgtactatgcagtacaatatacttttcttacctcaagtttttgctcaggtatgttggccaacctacttttactaccatcaatgatattgggacctaagtcataacaatgatagactaataagtgtttatcctaaaacattgcttaatagttgtaaaggataacataaggtttcttaacaaacctcgagttcaaatacactaaaataaaacttatattttggccctaaaacatacaacatgtggtagagctcgtcgcaagcttcgaaacggtatatagagcgtccaaaacggaaagtgaaaagttatgacaaaaatatctttcctgagttctcgaggctactcgaaacggtaaaccgatcggccaaaatcggtcgaccggttttaaaaccggttgatcggattttcaatggtaaaaaaaatatttcttaggtttaggcactcaccgaaacgctaccagaacctgtccaaaccacccctaacttcataggacatatttataccatacatactaccatacttacacaatagaaactaaaatcaagcccttaattggaaaatcgctactaatgttcagacttaagctataaaaagtttcaaactcaatttctaactcaaaatcacctcaatttcagtaagaaaatattggaactagtcccatgactacccgagaacaattctataagatcagaacctcataattattctaattcataaaactcctatacgaaaataattgttttaaacttaaaatagaattaaaccttgccttaagctttcctattaggagaatttgctattctgctactaccgtagcttagatcactaggtttcggatcgaaaattgaagaaaatagataaaaggagaagagggtttcgtcgaaagagaaggatggatcgttctgtttaatatataaacttatatcatataatatatataatataaacgataattgtttatataaaaaaaaatattaataatataattataatataataatattaataataactttattattaataattatcttattattttttagccacttagaatttctacttctagggcgctaacttaaatttcgcatgctcctaattacctcaatatctacactatcaagctatcacaatattcatatcaattctatcaattaaatctgttatgacaattctcgctccgagtctccaaggtcgtcaaatctgaaaatatttttattacaccgataactcatattacattcacatataccatagaaacctccgtcatttataaattatgcttatttatccacttatagcaaatttaaaatttgtgttgagctagattagtaggatcataatcccacttattacctaattaacccataatataattataaaccctagttatttacaattaggtttatcgagatattacaaaaataatattacagtatgtttgaattttcttagtaaattttccatgtagtatcatcctggaagggtactagaaggagttaagcaaacttaaatatactcgtcagcagggacggagggactttagcccatttgtaggctaaagccctcactcaaatatatacattaaattttttatatatagatatatacatatattaattcacttcacttaatttattaaagcccaattcacaaaaaccctcactcaatatcttaatcctgactcatgagctactctcattctaatcaagcccattttaaaaatagtccaatacaaataaaaaaaataatactttattaaaaaaataaaataatattattaacaatattttattttattttgttgaagataaaaatttgaaagatacatttatcagttatttttattagttttgacttaatatttattcaagccctcactcaactaaatttctagttttgtcactgctcgtcagaaaggttaatctattagctagggtttcaaggagaacttatttgcaaggggaattttattacagaatttttggcttttaccaatttgaatgttttgttatccatttaagcatttgcaatatgtaagcactgaattttagttttgttaattattgttacatatagtttttttttattatgttctggttaaatgatcatatggctctctcaaaggttctttattgtctttgctctttattttttctctctttttttcattctatatattcttgtgtgtgaatattattttatttagcagaccaacaacaagagagctagcaattgccaatgaactttgttttattcctatacacatggggatatgagattagtaatgcaatggctggctggttgctgcttctagtatttattattcttatacctaaatttaaatgattaaacttattaggatttctttttgcgtaatgtggtgactctgtacattttctggactgtgtaggtacacacgcccatagcaggtccacactggtctttttgttcatccatggtgagcattttcggacttgatcattattgcttagtcaaagatcacaacttaagaaagccatatatagtgagcaaattcttcattatttttgttggtttggatctaatcaaaatgaatagctggttattatcatttctttaatattaggatgcaactatataagtaaacattctgtgatgcatcacaaagtactactaaataatctaacaattcaggcaatactcttaagctttttcttagtatttgctggatgttttggcttaacttagtattctaatcaatccaatgtatataattttgttcctaaatattttgatgcattttacattcatgatttgggaaatcttagtgagcacccaaggatttttagctctattctgctcattatttctgttttgatattgttttcagtacttgaagtgaaggtgaagtaattaaagtggattatcatgttagattctattgtttttacctttgcgtaatcacaatagcataataggtacagtgtccatcattgtgg

SEQ ID NO: 14210 - DNA, 17294 bp, Cannabis sativa
  modified_base (13490)..(13496): a, c, t, g, unknown or other
aacattaatcacttcaaatttcttgtattgatgactaatcagattgtaaagagttttatttaggacataaaacccaacaatacatacattacatctgttagctgtggaatgccatttaactttaggtcttttttcccatgatttgtcccttgtttccatctccaaaaatcaccattccttcttttacctccttatagtttttcaagactttaagatttccagtcatatatcttgaacgactgatatcaaggtaccattgattcttcatcatatttgatggggatgtgtgtgccaccaaagctagagcttcaaacataggtctcttactcactataggaaattttctttgattatgatttgactgtgagaaggaaccttgtcgttgaatcttatttttcaaatatgtctgcaacttatagcatcgaggccttatgtgaccttttctattgagaagttacatgttggcacaaatcattttgaaatgtctacactcttttcagtagatagccttttttatttttcagcttcattggcttcaactgatgcttcttcagatccatctttgctactgtttctagcagtagtaacaactgatggtttggcacctgatgcagactcaattggcccttcaattgacaagtccagtcccttcttgtacaacactttgtagccagtatatgttctatctcatagggcttttggagctgaagtttttggttgagagatgttgtatcgggcgctaaaacttctaaagattgtttttctctaacaagttcagaactcaatttgtaaaacacactttccttactctctaactcatgaactagttttttactttttggtctaactccatattattggctatcaattccttgtttatgtcttgcaatcacaaacctttcttcctttgactcatcattagtttcttcctcttcactatcactccaagtaacaataagagccttctttttctttaatgtatttgcacattctgcttggatatggtcgaaatcttcacattctcgacattgaattcctttgctcttcttctcattttattgaggatgcttgttggcaataaaaaaattttactagaagaattttcttcacttctaaaattattcttcttaaaactaaccctaattcttagctaaaagagcaatttccatttgtgaaacattgacagatctgtatctttgctaatttcctccatatgaataaaagctactccaatcttaactttgaccttttctaagtctttaattttcttacccttgtcacatctatgcaaagtcattttatagttttgtagagatctaactagttcatctaagtgaagagcttcaatgtctcgactttcctcaattgaagtcactttagacatgaatctttttagtactacaccaaggacttttttgaccagctttttgttggagtagaattttccaagagcataagactcattagaaatatcacatagtttggcatgaaactcagcaaccaactcaatttcttccatggataaattctcgaaagatttagcaagagttgttaatcttgcctttttttcagcctcattttcctcattctctattttcaacttctcccatccatccttagcaatctcacaattcaaaatgacatttaactgattagtggagacaacattaaatagagcatgtaacgctttgaaattaaagttagctcgttccatctcctcaactttccatgcactagatcttttattctttaccccatcttcatcggtaaaagtaggtggtgaccaaccctcagccacggccatccacacccgttcatccttaactatcaagaattctcccattttcgtcttccttattaattagctccttccaacataggaggtcgagatgtagatcctccttctcaaaacatctctatttcatgttgatatacacacacataaacaacactttcgttgcagtgcgagatgaatctcagagtggatcagttttccaaaaattaacaaacaataactttgttgcactgcgagatgaatctcggagtgggtcagttttccaaaaacaataaataaacagttggaggacaacaagattaaaaactccaaacaagaatcaacacacacgacctaaaatcaatctagtagcaacatgatcttagtttcattaattgaaaaagttagcttgaatatcaaatgaaaaatcgatctaatcggatgctactaattgaaataatggattcaatcacacaatataaagtttaatgtaaatcaaagaagatcaagatttacaagcttccccttgcattgaaaatacatttcgatcaggtagtgcttgggttccccaaaccaggataaataactccaataagaatcaatgttagatacaaacttcagtttgtaaatcaaatgtatgtaaaataatacaacaaagattcttacaacaaattaccctaagatcttgattaaccaaccaagattcaaatctaagtccctttatatttgaagatatgccccttgcttcgcttgagctgaaatccattcagctatgaatctgagctccattcagatgaaacaacctccattatcacttcatcacagaagcttgaactcttcaacaatggatgaacctgcaagaaacgaagaaaaagatattttctcttgcaggaaaaatctctatcaaagaatcaaaggagtgagagttagttaggatctttaagaatcaagtatatataaactcaaatctcactaaaccgactttaacagctcacatgctagcttatgacagttggccaagatattttatcacttaatagccgacctgtcaaagcttaaaatgtaaacctagaaaatacatacttaaatggaactactaggtgattagatggcataaacacataatttgcaataataaaaaatatggttcttagatattcatcttatatgtacatgttgttcgtagtgttgtaccacatacgactatttttaatgcgagatctataattcatgttaaatttggcatgaaaatgagtttatgttatatttagctcactacttataattgtgctccaatacacaaaatgtaaaataaataataaaaaataataattaattagattgatagttatttaacattttattaaaaatatgcaaaaattattagtatttttttattattatttaaatattattaatatggtaaataaagaatgtaaaatacagcaaaaattaataaatcataataattattagtattatagtaaataaaaaattagtatttattgtgggctaaatttgacctagtgcaatatcttatattgaatttgacacaaattttagtatgtgccaaatttagtacatttttttagaataccattgaaataataatttttttaaagtgtgcaaaagtataacagcacattatattctttacattttgtttatagatgctctaactatgcttggaaccaaataaataaaaagaatctatttcttttgttgtgcttatttgatcctcttacaataaaacattaaatgtcaaggaaaaaaaaattcaattcccttctttgtctttttggggcctataattttcaaattagctgtgttttggtcacaacatggattgtaatagtgtaagtatatgtggtgcaatttcatgtgcaaaaatttaaatacataaatatatatataaaggaagggtcatagtcatggtccccttactctcttcttaattcttatcaagtggatagacctcttaaacaacattgtcactatctgaataaaaatggacattacaacattagattgtatttacagaagaaaatttgaagaaactaatatgaacaaataatactatgactttagtgttgtttgttgccaaccaattgagaattggtttggacttgagttgatttgagggagcactaattaatacaatacaagattttgataaaccaaccaaaagttaattatatataaatgagagaactaaagggaaaaaaaaaagatctaatatttgaagtttgaacaactagatgtgactttaataaaacaaaataaaatgatgtgaatttaatcttacgttgaggatggaaggtcactagaagtgtattacaataagaggtatttgacaaaatgacgtttatggttattaaaacaaaagattataaaaaaaaaaatgaaaaatcaattttcaactatcattctttcattaattgctgtactcttttttctaaataaattgttgtactttttttaataaattgttgtcaatgctagtttaattagtgttagtgtttatgtgtgtaaagatatttttatttataaataaaaatggaatatttttatatacgtttgaatattaaattataaatatttaatgaaataattatatataaatataagaaaaatttttatttatacatgaggttgtaacttgtattatatgaaaaattaagatcatttagccatgaataaaacagttaacaacatattaaagtttaggaatctttaatcaacggttgctagtacggttcactgatacccgttatgtagtatgacatctaagtgaaggtgttgtatataatcgagattatatatgacatggaccgatatgtaattaaattgtcttatcaaacatgtcgtttactataaagacttaattcgtatcataaagatgatcaatagtagatcgacctgaatcctgagtaatcatgaatttctattcatattattaatttttttgattcacttgttaattcttataacatctgttttaggaatctaataatgtggatggttggaaacatgatctacgattatggaattctaacttttctaacggatagaatgtttgttctttttaagtgttaattctaaaaagttgtgcacaaatttagattggatctaagttattttactaatgaattaacagtactaaaggataaataagtaattataagggtaaaacaataatttaacctaaactaattatgaaccgacacaaggagggctaatcactagaattgaatatatcaacggacactacagtaaaactcagtaaatataattttataattactaagagttaaattctatatttatagtggagtaatcatagaattaataaacatgattatttggttaatgagattcaataaatagtctaatttattgaagcttagtattataggtccatggtcctcaaatagtcaccttgaaatactgtcaagggtatggataaaagttgtataatgatggttgaaaaaatctattttgatttgtcaaaatagtaattatttattctgcaaaaaataattatttttaaatttattatttatataaataggagaaaagataaaagttgtctggacaaaaataccatcactgtctagttaggacagaggtggcgccactatcaatgtgttaggacacagtgagagattccttcaatcaattattagatatttaattcgaacctaaatatctaattcagaataaatgtctaaacatattcggttataaaaatttatttaaatatttttattgaattcaaatatttattttaaataaaacctttattaatttttattaatatgttgtataaacctaaaaactatacatataagttttgaggaaacctaaaaataccaaatttaaatatcttttccatcatcattcatccttaatgttcttgctcatgagttgagataaaaccaagaacaatattatagttaatcttattactccacactaatccttgtgtgtggtggaaggttcagaagatcacgatgtgagtcttcatcaccatcccgcagatacaacttacgaaaagaaacaaggataccctgattcgcttcaagaggtaactatttcttttcgtctatttatttcaaattgaatatatatatatatatacatgtggtggtcctgaggatgtggtacggtgataattaaaaatatttttctaatgtgtatctaatttagtactataaaatcaatatttggaccaattaaactagttagggcatgctcaatgggggtagctaatgcattggagacatttgaatgggcacatgccaatgctttccaggagcaacagtagtgttcgcacccacctatgattttcaaactaacagtgagtcaggcacaaagcgatcctcagcagccaaaagaatccttgttaggtctcctgttgaagtggtgactcacttgcaacataagttttgcaaacctaggtggacgaaggaaaaaaaataaaaagatagaatacgacagtttttaggtgtataaataaagacataatcatctaccctctttcagtggaagccccaacaaaacggttaactaagagtgagctatcaagacgactgtctgtatctaatagtaagatacctatggttggtatatctttgaaagttcagacggagagaataaaaaaactcattagaggctacttaagttaagatactttagtgtgacctgtgactaacttcacttctgttaaaaggcatcgagctaaagtctcacgataagccacttgcttagagcaaaatagtcaaatttagggtagctcaaaataaccaaatattaacttattgatattagaaaatacagactatcttaaaatacaccaactatactattctttcatttcgatagaacaaatagaaaaggccagggatcaaccatcagttgagcgatccactgatggagagtaggcgaaggttattcgtaatgtttatgcttattttttaaaaataaaaataaaaaataaataaaagttaaagaattattgtgatagttttttataattaaaataaataatatattaaataatagtatgtgggattatagtggtaacttttagagttgcttaggccatctccaatggtaaaacttaaagttggtgttaaatcaacaccaaaaaactactatttcaacactaattttttttaattccaatcacaatactaaaaattacaccaaattttatattatttattattctattattttattcatataataaaaatattttaatactaaatatatatataattatttagtttttctcttaaaagtattatttaattattaaattttttttaaaaaaatagtgtagtctacagtgccccactaaatttggtgggacactgtagacaaagccatttatgagtatagttttagtgttctattagagtaaatatggtgtgaaactacactatatttggtgttttagagtccggttggagatgtccttagtatttgaataatttttagtaggaagtggctaaaaatgatgtggatgagaaaaaaataaaatattatattttgaggtaacatggagttttatagagactttaaatattgcttgcattaaaaatgctcttagggagggtgcttgacaagatgtggagttaggcgtgggtgagatgaagtagagagactgagagatttgtgagaccgtaataactgtctagcgacagtgcgattgccaaatttagtttttttttctttctaaagaacaatcatttattggtttaaaatattaagtgtgtcccctataacaattataagtgtggcttccattagtggtgaccttatatctgctatgtatataaagacaatttcaaactctaatataaaaaataatatctcttctaatctcagatatgtttgttactttgatcatataatctctcttaactgaagtcatagttagattttgattttgacaatttttcaatggttttttatttgaaggttaaagatgattttttttttcaacagttttttaatggattttcgattaaatattgctaagttgcaccaaatcaaatttcgacaccttttcgatactagtggtgggtcggttgttgcaggtgagaatgaaccctatcagtcaagaggtggcggtcagagctttggagctttcggttattctcgaggctttggatttttgaaaatgaaggcaggaaaaaagagaaggaaatcgacaagagaggaagaggagcctgagtttcgtcctcatgtgcggcggtggtttgggcagtcgttggtggtatgggaactatgtttggtaggaggggaagatgggtggatggagaggaatggagggagagtgatggaaggagagactaattacttgtttggcaagagggagaggagagatggagggagatattctcctttcaaaccttcaaaatttaatccctccaaatttggaaggattgtaaaaaaaacaaaatatattttgtaaagtacaataattacccttaaaaaataataaaattttatttttaaaaagataattttataattttactaatcaattttttctccatccttcccacctcacacctaataccaaacaacacaaaggagattaacaattctctctatccctctcactctccattctctccaacctctccatccatcttactctccctcccttcctccgaccaaacataagagagatgagagagaggaagagagaattagagatttgaaataaaaggggtatttttggatgtaatagaaagaaaagcataaatttgagggttattagagggagataatgttgtaactaggaccacatttaagaatggaaagtgaatttttttttttttggcttgcatgggattatttgtgttttgtgtgtgtgtgttttcttttttttggggaaaaaaataaataaaagaaaagtttaattacattagtaatctaagtccaaggttcacacacaaactatggtccctgaaaaaagtagttgaaatagtgacaattacgtcgacttggaggcttaatccagaaacagctacgttgttaatgtaaagtattgattagcgttattgtacatgtggttccaccacttgtaaagaatctactaatctagacataaatctgttatggagttcattttcagccaaacatcagaactacgcaagcccagtttttaaataagaagaaaagaaaataaaaatcttgtgacacaaaataacagagaacaagagaatatatctgcatagttgacttgcaggagacttttggaatagaattgacttttctgaaaatctaatccttcttcagttcaagccaaaataaatatatatggaggaggcttaaagagttatgtgagcattgtttgttgggtttatagagtgatgaagaatgtcacatccaatatttcaagtggcaacagtaatgccaccaaaaggctagatgatcatagataagccttgtgaaataaatgaaagttgacgtttctagaaaatttcagttacaaatttggttaatgacttcaaaataaatggttcttcctatccttggcatttatagaacccctgttgaactttatttaattgggtcagttatagtcaagaatgaggattttggcaatggcaatgaatttacagaccaggcagaagaagtaaatacagttgtcacttgtaatcttaaaacaaggcaacaaagaatagagagcatccttatctcagagcaggggagaccccacagttagagaatttcaacttcacacacaaccaaacttttcactagaattgacatatgttttcaccttataataaaagctcagataaagatttgaaagtcattatcaatgctaccgcaaattaaagtttgccagcaaactcaagtaaacataattacaataaaaaaaaattcaacaaatcatttgggttgtgatttgaaagttcaataactccataatatcttcaactgtagaagatttaatcactttagtaagagaactttagggagacatgaatgaactcatgaaaaaagagtagtcagtaagtaaacaaaaacacatgaatatctttctgtctctgatttcaactctcaatgaaaacgctatcagaattaaattgctgaataggcagatatgactcaaaatgaatggaatacgcttttgtccatgtcagacacctgactgatgaatcaatactatgccctgttcttgtcacaaaatcaacaagtaaatcctttcaaaacaataattgacttttctagtactgtattttatgcttcttaccttgctgagatcagggtccagttgtacaagatttttcttccttcaatcttcatagccacaaagagataattgacagaaaagcatactctagtatctatctattaccccaatcattcaggtaacgagattcggaaattttaatgtgatttctggtctctttgttgtgccttccattgcctcaaatattttgttaaatacattaagattcacttctatgcaccttaattgtccttctcaactcactagcactactttacatccttcacaggtaaaatggaaggcacaacgaaaagaccagaaattaaagcttcaagtattaatatcacattttccatagtgaaaaaacagaatgaaaaaaacaggtgagtaccaagttacataacactgaacactgaatttcttagcataagactgcatggttaataatatatggtgtaagaatgtcactaaattcttaataagtacaaaatttaaagtatataatcttataagcctggtacaaccagaataaatagatgagtaattgtttactttagtaagattatgagattgaatcaaattaacgtcttagaaatatcatccatgaacaattcaaataagattactacgtaaaaaaatcaatactgaaatcaatgaattttgagtgacattgtgtgattcatcccatattcagaagtgaacacgaaaatgaccaacagatacagtaaataaagtttgaggagacacaaatgttccataacaaccttaatctatccacatccccattttcggtgaccagaaatgaattcaattgctattgatggaaattaaacattaaagaaattgcaagtgattctcactaaaaaatgatatcacaatagaagcaaagacaaacttttgtttgagtaggcaaaataagattcaaaatcatgattttgttaacagaatattcactagagggggaaaacatattgagaaccaatttaacattgtaagagggatatacaaccagcagaaggggaatgaaaaaaaatgtctgtgatctattcatgtggcctaatttactgaatagtgaagtgaaaaagaaaaaataaaacgacaacaaaaagaacaaatggattcatatataattttaatctggtgtaatccaagcatagttgacaagaatcatcactactcactcacagttagcaaagcaaatagctctcaatgaagaacctttgcctcactctattcattcttccaagcatataatatcagggaaaaaccaagagatgaccctttactatcagaaaatcgctgcgaaaaagaccacggtaaagcattcgggtcggctagagattgactagaccacaacatctcggcagacaggcatgtcttgaacatgaaaacagcattcccaagtgatgtaccaaagagccaactgtggacatcccagaaaacttcaactgcaagaccatcaaccaagatggtatggtttcccctgaacttccatctaagcctcttcacttgcatcagagtcttaccatctaccctgatcataaggcacggatcagtcactccaatcgtgtcacattctatcacaagatcatgaatttgaccattgttgcaaaactgagccttggtgctgaaaaccctcttaccaaagatgtgttctttctttgcaacaaaaacagcatctgaaggcataggagttgcactagtctttttgaaagcttcttttctcaaatccccgagaaggagaaccatttgtcgatctaccacaacacccacataatatccctccaatggttgaggcccggatccaaatttagcagaagaaaagtcccaatatatatcaatcttactagaatacgcttctaaactctttgaacctcttctcttggagaacaaccatggtttaatatcaaccttacagagacaatgattcgatgagtcgtcgattccaactgtaaggccttgacccatcaagtttttactccatgaaacagtaatcaagcaagaccttcctcgaagccggcattgatacacacaagtaaccaaattctgggcattcttactgctgctcgacgaagaagaatcagcaacttgaactccattttcaccgaaacaagatgggaaatctctcatttttttttctaattttggcaaaacttaaattcactttcaaaacttcactctccaccaatttaacgaacaactggcgtccaatttttaaaaataaagaaagctctcaaaacaaaaatatcatagataagaaaaagggatagcaacagttcaaagggactgaatctgtttacctcaaattatcataagccaaaacgaaaaacccatctcagaaatgttacaatatctcattctcagccttgacttgatctgaatgaataagaatttgaagcatatctctctacacgcacccaaaaagaaacccactcatccaagctcagagaagagaaagctgaaaaggaaacaaacacatcaagattaacagacaaaatttgagaatgtagttttagcaaaaaaaaaaaataaatcaaatacagaaacagacaaaaagtatacttgcttcactatcaaccatacctctgtccaaaaaaaataacaaaaatatttatttttattttttaaaaaatataacaaatacccaccaaagataattcgaaaaaaatacatataatatagtacacaagcgaaaaaaaagatgagagtaaaaatacctccttaacgatagagacagctatataaaaggaaagactaaacaagaacaaaactagactagtattgctggaaaggctgtatttttttaaaagagtactactctacaacacactcagaaaagtgaactcatttcccttattatttcactaatattctctcttatatgaatgtgacagtgaactctttttttttttttttaactgacctgacatgcccacatgagaaaagaaaccagagacccaaaacgatgcaagaattttctctgagaaaaacttggacataagttgagtactactactattattactactacactaggaaaagcaaattcaagggggaaaaaggactaggaaaaagaagaggaatgaaaataaggtttttagttgaatggaaatttcattaatgaacaaaataatagtgtgtaattaaattaaataaaaataaaggtggtaacttcattttgtgtgtgtgttttttcttttttcaaaagtgggtacgagaagagagaccgactcctatgatcctatgtagtattatttaatgtaaatgcaagcacgattctgaattttaattattgcaccttcacttattgagagagaaatgctaagacaatcgtgtaaaatatgtattcaatttgagaaatgttaaaagggaacaccagtagtgtcaagcatcctcctacgtgttaatattgttattggtgtaatttagtatcgggtcccatatagtttaatatannnnnnnttagggagtatcgctagtcaatcgtaaagcgacacgtcttaagggtgctagacaccactggtgcccaatagcaatgctctttatattaatattgttattggtgcaattaaatatcgaatctcatataacttaatataataatttttaaaaaatatcactatttaattgcaaaacgacatgtttagaggtactagcagcactcattaaatttagttctcaaaatctatatttatgtatctatataaacgagaaatataggcgatgacatgacacctttttaattctattttaatttatctttttctcatatttttattttttatttttttggatgaaaaatcgtgtttatatttttttatttattttttaaaaattttattaattttactttttaagactcgtttgaaacgtcgtattaggtcgtattatattatattgaattggattatatatcatatttttatataatacaatgttaacctttaatttatactgaaatattatatatttaggtgtccataaaaattaataccacatatagttttacataaaaaaacaattcaatataatactatacaatacaacacggtgtaatatagcgtaccaaacgaacccttagtgagttattttgaaaaaaatatttcacgttatttaaaaatgaatgtggtataacacttagagactatttatagatcactatttctttcactttagtttgtgcaaaattaatattacatcatttttgtatgtgtaattgatgattcttatttaattagttataactttttatcaatacaacatatattcttgattttttttcaaattttttgacttatttgtaatatttcattaaattttaattatttaattatttaattttatgtttttttatttgataaatatctaaaattcttaataatatttttttttgacgtgatttcttaataatatttaaaataattaaaaatataatttataaatatctatatatttataaagcaaaacataatttatattagtacttttgtcataatcatttcgctcaatttatatcatttaattaaatttttataataaaagacataatttatttcatgaaaataatttatatattttttaaaaatttgtcgcaaagcgaaattttttactagttaacttaaaaagtgattgtactgaacgtaaatatagaaactccattaaatattttatgtaacatgtgtcaaaattcattcacattatacactactattcaagtatgaaatatgaagatagactaaaaagtgtatacatactattagagaaggactatcgtcaatctcctattacaatctcttaatctacttttgtgctcgaaaacacatgttgaaatattttttttttcaatttttttatagcagtgtttgtaatagttataatatcatctagatctatataaattttttaaattttttaaacacggtaaactgaaatatcaagaactttatttttgatactataaactatttgaaaattttaaaaaatttacacggataatattgtaactattacgaataacgacatgtgattttgagtgtaaaaattgattaaaaaattataataaaaaattgtaattaagactttactttttgtttttgatatatactatttttatacttcttagactctaaaaagtacttaataaaataattattataaaaataactaatcatttgtaaaacactaacccatcaaatgctaataataattcatttacatatttaaactttaaatggtcctaaatattattattggtgtcttttagtattttttttcatccgtaatagtattttccgtaaaaaaaataaaaactacatttacatatatttattgtttttttgtatttattggtcattctttaaaataacttttttttttttaaaaaaaaaaaaagcatcctagtggctaagctaatacacatgaaacacgtaatgaaaaggattatttcactagttacgtgagcttgagtcttgaccaaaaacttctatcataaaaaagcgtacacacgttttttcatcatgtgcattttataaacttgcttggcttttttctccttaccgttgaaagttagggcatgtttagtttatagaaatgagaattgtaatagtaatcaatatattcattacttgcttgcttttttttttattttttttaattttgtaatctattacattgtaatccttattataataaaaaaaatattgtaatggtcattacaattagtcaattacaatctattacaaaattaatataatattataataaaaataaattaaaaagtctatcttagctaattttatttaaatattttataattataaaagttaaaagtaataaaaatattttggtcaatatacattttattctattacattcccacaataaattaaatacaataattttaattataatatttatttcaaccacaaactaaactgtaattaccattacgattcctattccattacactactattaccattatcattgcatttctattacaccaaatcaaatatcaccttaaatttatccatatcgttattgatcttgtacataaaataagttgatgataaaatgtttaaaaaagcacattaacatataccaattagctcacatttctatttataacatatatgatatatcctatttcaatttcatcattcccaatctaccaccaaatctttctttttctttttttttttaactcgcaaatcacaaatatgatttcaaatcatttttcattgtaataaaaaaaaaaaatcattcttccctacttcacgaaatttacttgaaatgtattactatgtgaaatatataaacatgagtggaggaggacaggggaggctcctcctattttatctttccaatggaatctgtgacgagtcggtttgttttttttaggatgatgattatattgattgttgaggctaaagagtggaagagtggttcaccattattattataattattattattatttgctttaattttagtttagcctttattaactaccctttcactttatttgccttccatttcaatattccttggcgcgttttctacacgctctttctttatagacgacaaacttatgccagctgtattatgctacctgtctaaagaaacggttccatttttttttttaactctaattcttttttcttttcttttacatttaatttctgtaactgaaagccgtaagtccaagttaagccaaaattagctcattggactggcgaatacccgggtatcgaccagattgtcccggggcggggctgccccatctggcaggggctccgacccgatccgcgaaaagctccaatttccccgtcataataaaatgtgaaaaatagagaggattattaacagctgtttggaatggaatgatatgatgtaatataattactccttaaaaaaagataggttagaattatttccttctttaattatattaatttgaatagtaaatttaaatagtattaatattatgatttattacaaaaaaatcttgtaatatatattttgtgtgagatagttttttttttttttttgataaaaaaatattgtgttaattttatgttactggcaatagtatgtgtatgcataatgcataacaaaaataaaaataaataacatagtaataaatatatatatatatatatatatgaatattcattttttttgaaagcgtacatgaatatttattttaattaataaaaaatagaataaaattttgggccttttttatttttacactttaaa

SEQ ID NO: 14211 - DNA, 4207 bp, Cannabis sativa
tttgacactatggaatgggatgttctctccatttcaagtggttctgtttcctgatagtcttttaataattaggttaatgggaactaatttgtacttgtaataaatttcttctcaggaaaagaaaatgatagtggtggggaaacagaaagtgatattgatgattctgatgatgatgttgaggagtccagtagaaagtcaaagcaccttgatggtgatgaggcttctgatgacatcgagaaagaagaaaacccaccggaggttgattttgatgaagaagcagacatagcaaaaaaggttttacagaacttaatagcatcctcttctaaaacaactcttccttctggggatgatgatcctgaacttccagaaaaaaatactgaagttaatataggagcatctgatgcatccgatgtatctggtgaggtgcttaatgagttgcctcacgagtctgtgaaaccatcagatgtttctaagcctgaaagttctgataaaagcaagggaccagcagttaaacaaatagaggaaaaggaggatttgcacaaaacacttttcataagcaacctcccatttgatattgacaaagaagaagtgaaagaacgattttctgcttttggggcagtgcaatcctttgtcccagttcttcatcaagtgaccaagtacgtgttattcgtattccacatttcttacttgtttgttggaattattttaattggacacatcttttgcttgtgccaggcgaccaagaggaactggtttccttaagttcaaaacagaggatgctgctactgctgctgtttcagcagctaatgctgcatctggcttagggatcgtcctgaaaggtaggcaattgactgtcttgaaggctttggataaaaagtcagctcacgaaaaggaaataaacaagaccaagaatgaggatcttgatcaacgcaatctttacctggcaaaggtgtttttttatttaattgtttattattattattttaacaccacatctatcttttccttcctctaaatatctcacctttttcatttcctccacaatttattaggaaggtcttattctcgagggaacttcagctgcagtaggcgttcctgctagtgatatgttaaaacgccaaatgtaagttgctgtaagtagtattttagttgtttttgtagatagcaatatttctgtctgatcctcacaatgataggactaatttggggatgattgtacgagttcttggggtaaaataaacaacttaatttgtgtcgggtaggtttcaagtttcgtttttcttgaattctatctagtgcgaatgatgtttgacatgttttcatagtcaaacattgcaaataaaattcaattccagttaagacatagtttcaggttaaaccttcaagtatttcatgctaacctgattcgttttgtttatgaatgacctaaaatagagcttgcaattctgttttggtctaggcgtaagaagatatctccattttatgatggggttaggataatgagaaccatgaggttctggagacctctgaagagaaatgttggactattttgatttactttctcttgcagtatttgccatttcttatttcttaacatgagtaatatgcatcttaatattcacatgctaaataaaccaattgagactagctcaagttgtcaggtgtgtacatgagtggtgcgggtttcatgcccccataaatgtatcttataaaaataatgcaaaaaaaaaagaaaaaatccagatgctgaataatgtgctaccattatatttgatactggcacagttttgatgcttttttctacacaatgtaggttggagaaaaagaagacaacaaagcttcaatccccaaatttccatgtctcgaggactagacttgttatttacaatttgcctaagacaatgaatgaaaaagagcttaagaagctttgcatagatgctgtaatatcacgagctacaaagcaaaaccctgtaattaaacaggttagtttttctttctaaatcgaggctatgcaactttctcttgtttcatttgatatacattcagatgcagagaagaatacccttgcccaatttctcacatttttattaccaattagttgaatattcactaatctttgttgctcatgtaggtaaagataatgaaggatatgaagaaaggaaaggaggtcgcaaagcatcactctcgtggagttgcttttgtcgagttttcagagcatcaacatgcactagttgccctaagagttctcaataataaccctggtaactttttagtgtaaaattagttttctgttacatggttctaagtggagtctattttcttatctaatcttggtcaccggtcaattcgaattgtgggtgatgcaaacctcttgcaatacttgaatagttgaatgattacaatttttatctttataacaaatggtggctgttttcttttctcatttagtattttatgaattgcagcaacttttggtcctgatcaccgcccaatcgtagagtttgctgttgataatgttcaaacactgaagcttaggaaaattcagcaacaacgaactcagttcaggcccagtgatgattcacaagatgtaaagcaaataagtaatgatttgaacgaaccagattcacatccaaatgataacaagtccagaaaacgaaaacccagaggtgagtatcaaaaacctaacgataatgcagtaaacaaaaaagatgagatcgaaaatgtagcttccaatggagctactgctggcaaagaacggagagcgtggaagaggcagaaaaataatccagcagttggaaatgtgagaaagccttcattgaaagaaattccaggaggcgaaaaaccaaaagcagacgtctcggaaggaggagggagaaaacccaatgatgctcgaagatctaaatcttccgaggagactgatatgcagcctaaaaagaggaagcagcaaattcctacagaaatggagagaagaaaaaggccaaagaagaacaaagatccacaagggagagacatgggagataagcttgacatgcttatcgaacaatatcgatccaaatactcaaaaccgagctccaacaaaactgacggtgagagacctaattcagggaaacttagaaaatggttccagtcttagtcacatactgttacatgtctacattaaatcccacctttttttgtaatagattacagaagacaaggcaaattatttgcccataaattttgtgcttttaattaacttaacaattttgcttttaattaaattggagaaatgtcaaaaaaactaaatggtctagcatggctcaacagtggttggtggtattaagccgtacactaatataaatttacacaactatttttatttaatgttgtattaatttacaattaaatgtggtataaaagaaagaaactaagttggagagggaagccgtacaatacaactgagcccttgttggatatttaaagataaagcttgttgtgattgtgaatgttacttttgacttatcataacacaattttgactaaattaaatagctcatttgtactcttctccttcttgttcaagcaattatagagtaatgatgccattttgggttgtttattttttgttttttggttgagatgagatgcaattagacaagctttttgattgaatgttactattttattatcatgacagtttatggttgcaactcgcaagtacaattggtatcaaaatatatattataggaaaattctgtagtttacccctaagcggtattttagttgatccttttatttatttcggtatctaaaaaaaattaatctaattttttttatgatcgctatgttgtagctatataccacctgtaaatttttaaaaaattttaaatagtttacaatattaaaataaagttttaacagttatttaccacacaaataaaaaaaaaaaaccataaatgtaacaaaatatctatattttatttttatcattgtaaattatttaaaaaaatttgaaaatttacaagtgatcttttataattacaagtatacaatcatgaaaaataattaaactctcataaatgctgaaacatgaaacagataaaaaatctatcaaaatatctctttaaaagattgtactatagacttacttatattatacataaatggctcgtttggaacgtcgtatcatgtcgtattgtattgtattgaattggattatatatcatat

SEQ ID NO: 14212 - DNA, 4447 bp, Cannabis sativa
tttttcttatcttgcttgagttctttgaactctttcatggtatcagagctttaatggagtccacaggaaatttcacacccacgggaaatgtcactggtgcacaagtcaatcttgaagctcaaaatgaagataacacagctccgcccattcctccggttcaagctcaactcccagtcccagaaccagttcaaattggcttgcctaacaacaaccttttacctctgaaccttcgattggatcgatcaaactactccttctggcgatccttggttcttgcagcagttcgtgcgtataatcttgatggttacattcttggcacctttccgattccagctcaatttcttgcaggtaacgttctcaatccagcctatcaaaattggattagttttgatcaattcataatgcattggctaatgaattcaatttctgaaccaatgcttggttatgttatcaattgtcgaacctcgtcggagatctggaatgtgtttgctcaactctttgccacgagatccagagcaaggctccttcaaatccgtggcttattgcaatcaacaaagaaaggatccatgagtattgatgattacttcttaaaaatgaagcaattggctgattcgcttgctgccgcggatcaaccgatctccgatgatgacttggccctatacattcttggcggtcttagaccagaatatgaagctgtggtagtaaatttaacatcaagaactgaacctctctctcttcaagaagttcagttcatgttacacggccaggaaatgagaataagccaacaaaccagtgccactctcgacaatgctcaggctacttttgctggtctttctcgccaaggaggaaccagtcgtggtggccagaacttcagtggtaatcgaggtatacgtggttcatacagaggtggtcaactctacagaggaggaggccgtggaggtcgtggaaacaaaattatctgtcaactatgtggccgtagtggacacacagtgcagaaatgttaccatcgttttgatatctctttccaaggacctccaccaccccccaatggtgcctccacctcaaataatacagataatcctcaggctctaatgtccactactcatcccacagaagattactccactgcctggtacttggacacaggtgcaacccatcacatgacttccaatgatcaaaatcttgatcacaaacaagactacatagggaaggctaaagtgacagttggtaatggccactctatccctatattacacattggttctaactcagtgcatacaaatctttcttcgtatcctttagtattaaaagacatattgcatgttcccaatatgaccaaaaaccttgtcagtatttcccaatttactcaagataaccatgttgtgcttgaatttgatgacacttgttgtcttattaaggacaagaagaccagccaagttctttttcggggtatcctcagtgatggcctataccagctgcagctgttaaatccacacaagtctcctctcagtcttcccaattcctccatcaatctcaatcctcctgctgcttttaattgtactaccaacagcaacccagttttcaacaaacataatactgcctctgtttggcattgcagacttggacacccctccaaatctgtcctaggcaaagtgttagccactgtttgtcctaatgtcaaatgtaatactgtagctttttgtgattcttgccaatatggcaaactacatcagttttcttttaaatctgttgttaataaaaccactgccccttttcagctaatacattccgatgtttggggcccctcttttcttgtatcccttgatggtttcaagtattatattagctttgttgatgatttcactaaatttgtgtggatctaccctatgcaaaccaaaaccgaagccaccacaatctttaaacactttaatgcttatgttgaaagaatgtttgaggtcaaaatcaaaagtgttcaattagatcttgggaaagaatatttacctttatacaacctgtttacacagttgggaatctctagaagaaattcatgtcctcacactcatcaacaacaaggaagagtggaaagaaaacatagacatgttgttgatgtaggacttaccttacttgctcaagctagcatgcctctcaccttttggtgggaagcttttgcctcggctgcttacctaatcaataggctacccacccctatcttaaacttcctctccccttatgagaaattatttcatttaaaacctgattataacatgttgaaggtttttggctgctcttgtttcctttagtccagttgtcaaaccatgcaccattcgactaatttttactcttgctgtcacctatgattgggatattcaacaaattgacatcaatgatgcctttttaaatggtgacctcaatgagactctttatatgtctcaacctcagggatacattgaccccaagttccccaaccatgtctgcaaacttaataaggcaatttatgggctcaagcaagccccccgtgcatggtttgacaagttaaaatctgccttgttgcaatggggatttcagaattctaaggcagataacagcttgtttttcactaagaaacatggtaaactaattcttctcttggtatacgttgatgacatacttattactggtcaagacaaggctcaaattaccaaggttatatctgatttacagcaccagtttgctttgaaacagttgggttctgtcaattattttcttggctttgaagttacccgtgactcaactggtatataccttactcaaagcaagtataccaaggatttattagtcaaaactggtctccttgatgccaaaccccagcccacacctatgtgctctagtgctaaattaactcttgcagcaggtactcccttggaagatcccactctctatcgcagtgtccttggcgctttgcaataccttactcttacaaggcctgacattgccttctctgtcaatcgtctcaatcaatttgtcaaagctccaacatcacaccactgggctacttgtaaaagggttctgcgatatttagtgggtacaatgcacttgggtcttcatttcacacctgctactcggtttgaacttcatggtttcagtgatgcagactgggctggttgcttagacgatcgcaaatctacctcgggttactgcatctatcttgacaacaatcttcttagctggtgctctaagaaacaaagcattgtagctcgttccagtaccgagtccgagtacagatcgttagccttagcaacaacagaaattatttggctacaatcattattcattgaattgcacataagtctttcctgctgcccaatcatctggtgtgacaatcttggtgccagctccttagcttctaatcccgtctatcacgcccgcacaaaacatatcgaaatcgatcttcatttccttcgagatcgggtccttgctcaacaattagacatccgatatgtggactccagcaaccaaattgcagacattttcaccaaacctttggctattcctcagtttgttttcctagcagacaagttaacacttagattccctacgtgtaacttgaggggggatgttaggaataaggaaaaacagttagacagttagacagttaacattgttacacagtctgttattttgttgtaattcttttaactgttttctggtttgtaccctttatctttctctggtgaattgtctataacaaatgctatatatattcaagtgttcaaggctttcaacagttagttgagccatcattcatttcatcatctctctctctctctcctctcctctgttctttctttttcttatctttgcttgagttccttgaactctttcacttagctcatgctatgattgtggtcagcagttacatttcagaccctgactctgaatattggaaaatactaaaatggacaatgaggtacctgcaaggtactttgaacactagatttgtgttcagtaaagagaaccagttcaaggaagaaatcactagctatttaagatatctcacaaaattttgagaaatttaaaataatttacaatatagaaatcaatgttcaaactgtctataatttttttgaatttctcaaaattttaccaaatgtcttaagtaactataacgtatactaccataaaaaaaatggactaattttttttttttagatatcgaaacaaataaggatacatcggtgcaccaaggagtgtattgtagaattttcctacatatcatataggttaagtctaaagtgcaccccgtatagggatgtttcggtaaatctcgatctgtttcaacatacaaaagagtttttagtcaattttttatgatcgtatacgttatagttatttaagatcacttataaattttttaaaaaatttgagtttacaatgctgaaataagatttacatattttgttgtatgcac

SEQ ID NO: 14213 - DNA, 12910 bp, Cannabis sativa
gttttagtaaaagtcaatgaatcacaataattagtgacattattgtgggctaaattgatacaatgttatatcttgtgctaaatttggcacaacttttagcatgtgccaaatttagcatactttttagaacaccattggagtatagttttttttaagtgtactaaaatatagcaatacactacctttttggcactctattggagatgctcttatctaaaccatctccctagtttctattcttttgagtttgacctccagtacaagccatgatcatgagtaatgaagtataacagttggagaggaagaagaagaatagaaaggaagaaaaagcacactatgatcgtggccatgataccataacagaaaatacgaacatagaatgaaagtgaattaaattgtattgattgatttgttaattaaagaaagtgagctatataatgctcaatatataactcataactagaaactgaaaactctattactgctacttgaaacaaaacagtcaacaagaattggctataatagactcaactaattaactaatttttttactaatttttgatagacaatgtgcactttgcactaagaatttggttatttcttctttctccaattagccattcattctcatatataatgcgcaaaataataagttgtttgctcatatatataggtttttttattgttagcgacatgcacactaagaatgacaagagttggaacgagaaagccatatattgatttaatcaaaaaactaagtataaatatcctttttatggtgctcacactgctagttatatgcaacatataactaagaactaacttcattaactaacaatgcaattgacaagttagcttaattaggataccattctaatagtgatttgtaatggtagtttaggcacgttattgtgttttcttaattcttaattactatgctaacctttgctaaacaaagggtttagtataaatcttcattaacaaaaacattcataatataaaaaaactttactaaatatacataaagtttaaaaatctcgggatcctaaatctgtttatttttctaattacatacaaattacaacatatcaaaagggtggctcagcaactaacaaaactaagcccatgttgttccgaagatttgaacactataggtctaaccatccaggtatgtacaatcttcacttagctccaaacttactaatgtttagcttttgtcttgcctttacatacacataaaagcatatcagtgagtcaacagactcagtatgaaaagcataaaacataaacatatatacgacttgtaattaggcgcccatagacctaattaccatgagtctataacttgcatctaacgcgtataagtgaatctcaaatattcttgactatagtaggattgaccataataacgcatacactcagtgctcttgcaatactagtattggtagtactagttcgtactgtaagtacaactaaccttattatcacatgcactcagtgcttttaggagtactagttttggtagcattagttcatactttctgtaaagcctaacatatatttgttggtatttctagtataactctatgtacaccatatcctgatatgttaatctgatggctttctgaagcatgcatgctaaacatgtgtatatatgtctctgttatactaatcttacttaaattcagtaattaggtgtgctagtcaacctgaatgtaaacaaactacttgacacttggaggccctaagtcttaacgtaaaactggtaagtgtcttactaaaacacttttggggacctaaactcataattcgaagtttccatatcgataaatagcgtgataatagcctaaatatcaagaaaaaatcaaaattggattacccaaaaataccccagatgggcaactggatcctaaaatggtaatcgtttacctagatccttctagatgaaatgatttcctgtttctctagaaacggtaaaccgttttgctagagagttcaaaaactccaaatttttctaactcaaaccattccaaacatgctcaaactcaatgaaacttttcaaaatagtccactaatgagttctaaacatatgtcgtagctcaaaaacaaaaattacactaagaatcacaaataactattgttgagtaagctttgagtttaaaaactcaaactcactcaattcaaactacaactgctaaaaatctttaaaactagccacaaaaaaccataaatcaagttccaaatccatttctaacttccccaaactctaaaacaaccaaattcacaaaattaagcattagaactaaacctcatcaaaatgtaagagaaaatgtgagttagggtttaccttgatcttaagaatcatttctcttaaaaaaaaggttaacttggaaactagccctaatgacatagacatccatatttgacacgtggcaagaaatatgacatctcaaagtggagtagtcccgagtcataataagtcaacgtgggaggggtccctagccctgcgcctaggttatctttgggaactccaggatggatgttcaaactttaataacttggatccaactcactatctttttttattctataccaggaagatgtggagcaatctaatacaaggccgaaaggctgaaattacacgaacctacaacgcagaagccaacttgggcactagggtttccactcggtgcccaagttgacgttctcaactaaggttttagtttttggtcctgtcttagtgcaaattgaccaaaacttacattgtgacatcgacttgaaataccacaaactttgaggcatcagaataagatttgaagcaagttaatttttcagcacactgggccccgagcacctaaccccccaggttgacaatctatcaatctggtgccttccaagtgtccgatcgaagaactgaattccgcattgaattcatattaataaaaagtagggaaataggtccttttggaggaaaaacacagttcgttggtggaaaaaataaggcccagtgcccaagttaacacctgggactggccgtctaggttgacaatttgccaacctgggcaacaaaaaaatagagttttcccagttctgagtatcatctacatcttcaaaaaacattgagaatcaactatttttggggactatttccaaaggggcagcagagggacccagcgcccaagttgacacctaggactggactttgcgcccaggttgacattttatcaacctgggttgtttacaattcagttcagctaaaagtgctctgggaatcataaatatcataaaaaataataaagattcaagtaaacacgaggagaacaccacaaacccgagtctctagaaataaggcccaacgcccaggttgacaatcaactgggatgctaccttcaattgttcaaatgccaaagctgatgtgaccattgaatctggcatggaaaagaagggggtagagatcccatccccaagtttcgaagccttagaagccttggaagtatcaaaaaatagaatcttgaatgttgggtctaaagttcctagcgaccaagtcaacaaatgacctggttcaccgggttctgcttatccgaatctgaagctggtttgaccgtttgtcaagttttttataagtgcaatgatccatgaagtcaaataagtcagattcataacttcaattttgactcatttggaagtcggaactttcgagtcttctgtttttacaaaataacaacatctcagaaaatgtgtgaccagcttcaccagaacatataaaaggaccaaggggtgtcaaaccatcacttaggcatctcaaagtacatcccttggatgtttttacacttatacaacgtccaggttgacatcagatgtaactttggcgctggaatgtcagcttgggcattggatgtcaacttggatgttgggacctgaactgcctttaataaaatgatcataagtcactcaatttttatccaattgattgacgcgattcaacttgcactttctttgaagttatttaatccctctattaagtaaaatttcacacaccaggaatagttatgaagctattgtcgtgaaaattcacctccaagggagttacgagaataagctttgggtaacttgcaggtgggacttgacagacataaaaaatcagccatcaccatcaaaagccaattctcaccattaaatcatcaacgctagaaaaaactttatttgaattttatctcttattcttttgggcctccttcacctataaaatgagagctcccttagctcattttcacattcaaaaaactacacccacaaggtcagtcttctctctctagactttctctctctagagtttagagtttcttatacttagtctattactgtaattaccatcccgtgagaaataaaaactcgaagtagacgtagttctattactatcgcgacatagggggtgaactactataaattttgtgtgtatctcttatttattgcttaacgtacaacttattcattcccgccaatctagtgagctgatattggtcactttttagcgttaagaaatacctagctgaattccttacaaaaatgatgaagatgctttgatatataagtatatatattgtgttttctttagagtttccttgtgactgaacaaaagacagagatagtgtgtttggagagagaacgaatttttaaatttatttttatcttttttaatctcttaaaacatcttcaaaaatcagcatatattattctatttactacaaaatccacaaagttggataataaaaacttatatggcaatttaccataatgtccttactttatcaccaagtaatatttaaatttagaggtaaaatggtcataactaaatactctggataatcccaatattcttaagtgccttagcaccatccctacaatagtccccattttgttataagatttctagtatgctatataataaacaattaaaatactaaagatacaatattattcaactataaatattaattaaataaatagcttaaagaattattaaaaagaatgaaaaaaaatatcttctccacacataaaataatatatgtaaagcttaagtgtggtaaaaatactactacaaaataggttttttgtgtcggtcaacctaatgatcaaagcccaaaacttatgtttatggtggtctctaaatttttgcgtcagttggtaactgatgatacattatattagtttataccaaacacaattttattttcatcgattataaactgacacaatattaataaaaaaggcccataataaatatagcctgaagctcaaattaaccctaataacatataaaacacacaaaacacccctctctctatatatacatatatatatatatatatcttttttctccaaccacgatgaagactcgccgccaataaacaaaagatcccacaaaactaataccgcctctctcttgttgtcttcatcacagtcgcaatctctcttgatctctatcccacaatctcttccctctctttcttactatatctttatctcgaatttgtgagcaaacaaagtttttaaattttccagctgctagcgagaaaatagagatcacgaggtaagattctttctttttttttagttattttatttcttcatttcaattttattttcacagatgtgagcatttttcttgtttttttatcttctttgcaagtggtggatttgaggataggaatgacaaggtagatttgaggattttaggtggttgttttatttttgatttttttggatcgaaaaattttatctgaatttttgtgatatgttgatatgagaaaagcggaggaggagcctgctcgatcatgtaattttttttagtttgtgtcagtgtagaaccgtcgcataagctaaaaaaataattttatttgttagcatcatcaaccgaagaatacaaccttatgcatctgttggtaactaacaaaaaaaaatattactaattgcatatatgtttattacgtcatttttttcaattggtgcaaattttttatgtgtcacttaaaactataaaataggcttttttgtagtagtttaattaaattttaggcgcatcaattatatgctcgaaatttttttattgccacactagcctaccaacacatgaaaaagaaagtgagaattttacacaaaagaaagaaaaaatgaaacaggaaaaatttattgccaaatttatgtgtaggtaaagataattttttatatataactataggatacttaactatcacccacactttaattatctacacatattacctatgtatggataaatatagtaaagtttctgcacatactatttgtgtttagatgaaaccataaattcttttaattgaagtgggaagaaaatcttctattgaataaatcaagtacctaaatgaaaggtaaaactattagataacttgtttaaaaaaactattagatggctacctaataaaaaactaacctttataacttattatgcacttgactgttcttaagttccaataataattattataagagcttgatattgtcaaattgctcaacaaacatataataacttaacaatatcttaatagtgaacaactcacaacttagataatcctactatcgatgttttttatagaaaggaccatattgaagggttaatattattttcgactttgtaatttacaaaagttatccctctattttaataaatgacaaatcaaatattgtattttccaaaataatacaaaattcttaaactcaatttttgatatttttttttaatttaacgaacttgaagataatattttttagcatgaacagagacagaaaatactcagtcttgtcataacacataatgatcatgttattattaagtcctattttaacaaaaaaattgttagggtagtattttgtaccattttaaaaattactatttgtcatttaacaaaatagaggctccattaacttttgtaaaacacatgatccaaaataatatttatcctttatattttttatatcaaactgtttgttcattttcatatgagaaatattatatgttttatttttcatagaaattcaattatactcgtgatctattattatttatttattataatagactatatataaatacaaattaatttaattgtaggcacttgagattagatatgaggcgtgatgccagtcagataccctgtaaggtggcattcattcaagatggcttatcaatacaaatagtaaaaattgagacttataaaagtgaggaagatattacagaacacaaaaattttatatctctatccaagcctgttcctgtatcaagtagtagacatattcatagctcagatagcagcaacttggggacttcatcttcggacaaattaacacaacaaaatctagaaggtatacaaaattatgacattctatataaattacaaaactatacctacgcctatacatagatataatatcgtacatataatggtataaaaatcaatgaatgcatgttatagtagtggcaagaaaactaaaataaaaatatcatgggtgaaaataaaatcttgaatgatagaaaatcaagattttattctaggagatttacggtttgatttgtatatatatactcattcttctcatgaataagaattaaaaaatatttctctcattttttttttaatggcatcagagcatttaaagctccttaaaagttattttcttttctcagtcccctctcaaatattagaatgtggtactttggaagttttatcctaaaaaaactacttttgaggagttttctattctcacctctgacccaaagagcttgtcctacctcttatccacaaaacatataaacttggtgccccatctaagcttctggtgggttccctgcaccaccttcaatagctatcaccttctccacatgcaggtgcatgtagatgcgtggccatttttaatgacatcttccatgtcatctctctcaatttgcttcatttgtggttcttctccatctccggtgacatttttctggcatcctctctttctattcacttcatatgtggttcttcacttgttttctcactatctctatctatagccgaagaaatgtccataaaagccatcactttagtggcaagacaattcaacactcatgtagttcaagttattcaagcctctcatgcatcttggattatggattctgatacttttaaccatatgaccggtgacatatcactattttcttttttagcaagcactctaatgaaaagactgttcacgtagtagatttcctgtgttcaagagttgatagaattcgaaccataaagatctcgccaagtcttgtctaaaattaagtcatttacattcccaagcttgattgtaatatactctcagtaagaaaattgagtagagatcttaattgtgaagctaagtttgttgctcaattttatgcttttcaagatgcggaatcagggaagatgattagctacgatgagttcagtaaaggcttttatctgctaaaaattgaaaactccatgtttaaccatggaaattaatgatctttcacccaaggttaatatctttcctaagtaaatcagtccaataaaattagtgctatcatgttatggcattatcatctaggtcatctaaatttcgtgtatctcatataattattccatccttatttatcaatgtaaatcctcagtctctcaagtatgatatttttttttttaattttctaagcactattttgtcccaagatctcatgaaccctctcatgcattctcactcactcaaaaggatatttgggaaccatgaaaaatttaaaatataagtgggggcgtgttggttcttgttactaatagatgatcatagcgatcttagttggacatttcttatgaaagaaaagtatgaaacaagttatatctttcaaaaccaatttcaaataaacaaaggtgttaaaaattatcaatccttgtgacttctttaattctatcctcagaacatatttgcaatgaaaagggattattcatcaaagttcctgtgttgacataccacaacaaaatggtgtgttcgaacacaaaaatcgtcattttcataaggtatcttaattttagtcttttcatcacatgttccaaaaagttcttggggtgaagcagtcctcattgctacctacctcataaatagaatgccatcaagagtcttaaagttcaaaaattagcttcaaatcttccttgaatcatatcctaactctcatcttgtgtctcaaatttccctttatgtctttgttagtgttgaatttgtcaatgtttattccttaaactgaagcaaacttgatgctcacgccaacaaacgtatccttcttggctactcatccaataagaagggttataaatactcatgccctctttgtaagaaggtgtttcactctatggatgtcacttctttgaagagaaaccttaatacatgctaattctacaattcagggagagaatgagagtcaagaactgtaaaattgggactttgtctgtctcattgaccattcatctatttctcctccaagttcacaacataatatttacagaaataataccaactccttctgttacttatacttcaaatctttccattgagccaataaattctcattctatctcttcaagtccttctatccatatcctaagcaaagaaattcatgtttctcatactccaaatcaccctattgagccaaatcagccacgaaatcttcatccaagttctcctgtccatatcccaagaaaagaattccatgtttacacaaggagaaagaagcaactcccaagcattgaacaagctagtacgcaaacttagtaaggtaaagattgtgatccggtcccattcatccttgaagatactagaccaaaatttattatggaagaaaatatgatagaggatctgagcatacccattgctcgtaggaaaggggtacactcttacactcaacaacccattcacaattatctgagttacataaacttatctcctacttatagatcctttatcacctccttcgaccaagttcagattcccagtatagttcaagactctttagatttttaagtagaatgctgacacaatggagagcttagtgcacttaacaagaatgaaacatggatcatcacatatttacctctcaaaaaatgcacatttaagtacaaatgtaatttttatataaagtataaggtggatggaagcattgaaagattcaaggctcgcttagtggcgaaatgattcacctaatattatggcatttattataaaatgatgtctgctcctgttgctaacttataaactatttaagttcttttgtctattatttgaataatgactggcctttattctagaaaagaatacttctcttaaaatgacctaattaaagaagtatacatggatagtcctctaggatttgagggaaaattcactaagggaaaggtgtgaaaaaccaagaaatccctctacggcctcaaacaatcccctcaatcctggtttgacaggttaacaaattttttgaagggagatggctatactcattgctaatcaaatcacactttgttataaattattcagctggtgaaagacaagcaatattaattgtttatgttggtgaaatcgtggttacatgaaatttaatggaggaaattactcatcataagcatcgctccactctagtgaatttgagattcaggaactagagcaattaaggtacttcctagggatgtaattagctagatcgagacttgacatcttcttcaatcagcaaaaacatattttcaaccttttacaagaaacatggatgatctggtgcaagccagttgacacaacgatgggtcgtaatacaaaacttggagttcaaacaaatggaataaaagttgatcgaggaaggtaccaacgtctcgtgggagagttgatttacctaactcacgctttgttgttagtgttagtcaatttcttagtaatccctctgaggaaaacatggatgctatctaccagattctcaggtacctcaagggatcaccttaaaataggtctaatgttcaggaaaactctctaaaaggctcttaaaatctacactgatgctgattggggtggttccttttctgataaagatcacttcagggtactctcatacatttggaaaatcttgtatcttcgtacaacaagaagcaacacgtggtagctcatagtagtacaaaagtagagtttcatgccttagctcatggaatttgtaaaggaatattgctgaaacatcttcttgatgaactcaaaatcgggcttgaaggcttaattgatgttctctgtgataatgaataagtcatagcaattgtaaagaatcaagtccatcataataggaaaaaacatatcgatttgatcgtcatttcatgtgtgaggaaattgaatacaagaccggccatatcattgttccttagggcaacaagatgctgacatcttaatcaaagctctccatcttcatgattgtagtgaactcaactcaaaactagaaatatttagcatatatcatctagcttgaggtggagtgtaggaaattaagctagaaattagtgtttatatatattatttatcattctaactgtatatatatatatttatttattgcattttctttatttaggaaatttagagtttgatttatatatatatatactcattcttcttatgaataagaattagaaaatatttcccacatttgtttcataaataataattgaattttattttcatccagttatgcatttcaaagaagatacaaattccttaataaattatagagctacacatagccgatatgagagagttctattcggacataaatgctcagaagcaccacttttgtgcacaatttgtggagcaaggactgatacgtactatatcaaggatgctatgttgttcaattactctgaaattcagttagccacaaatgatttcgccaaggaaaatttattaggagagggtggatatggtcatgtctataaaggtaaacttaaagatggacaactcattgcagcaaaggtacgtaaagaagaaagcaatcaaggatttactgagtttcattctgaggtttacgtcttaagttttgcacgccataagaacatagtgatgctgcttggttattgttcaaaggagaaattcaatattttggtttatgagtatatatgcaacaagtctcttgattggcatttatttggtaagtagtaatctttttaattaaaattgtgttatgcattaaatttaatgtagcatttgccttttgtaatttgttaaataaaactactttcataagatgaaactgccacccctcttgaatggcaccaaagatttgctattgctattgggattgcaaaagggctgcgctttcttcatgaagaatgtcgaggaggacccataattcatcgggacatgagaccaagcaatatactgttgacgcatgactttattccaatggtacaattctctttaaataatatcacataacttctcttgattattaaataaattattcaagttctttaattgcaatctccagttaggtgactttgggctagcaaagtggaaaacaggtgatgattattcatggcaaacaaggatacttggtacattagggtgagaactttgcttcttcaatttgatttatatttcaagtacaaaatattcattatttttctattttgaagataattaatgccactgataaatacagataccttgccccagagtatgcagaaaatggcatggtttctgtgagaacagacgtatatgcatatggtattgttttgttgcaactaatatcaggacacaaagttgtgtttgatgtagatggtgaagaaaaaacacagtctctacggcaatgggtacgtattttcct

SEQ ID NO: 14214 - DNA, 3994 bp, Cannabis sativa
tttttttaaaaggtattcttcattatttccaagttatataattacaaaaataaatatggttcaaatggggaagctcaagtatttgtgcttgttgactatgaataatcacaattcacaatgtcagttaatacatttttgactcttccattttcaagttccgatcctacaaaaatgtttgtataaatatactatttttagaaatttgtgtagtacagccttaaaaaatattttggtgaacttattatttattttgatatttagaaaaaacttactctaactttttttcattaataacataactctgtatgattacttataaatttttaaaaatttgcaaataatttattatattaaaaatagaccttaaatattcacttactatacctataaaaaaaactaactagtgtgtgcaataaagagtacaaactatttaaaaaaatttctgtaaatttataattggtcctaaataaatataactaattaaaaaaaaaaaatctaaaaatataaaataaatgctaatacaaatagcaatctactaaaaagtgaagtgcatgtgtaccgaaacagatagagtctacaattttaaattgcgccgtgatactgtgaattactttaataatgcatgataccatacaaaaatatacagatcatatcatcacacaatatgtcatcatatattcatatcaaagaaacttatcatcatgatatattaaaaaaaaaaaaaaaactgggatatagttcattggttcttctaccactatataagaaattaagaaaattaatcctatttaattatttatgtacacatgcatgcatatatatattaaacatcaataaccatactactactactactactagaagagatgagtttaattgagtgattttgtcgagtgttgaagcaacaaagtattgtactcttgtctcatgatgttatatttctcagtcaaagtcttaaaagcttccattttgtcctcatctgccactgctaatgacttcgtcttcttctccaatctaacctttgtgtattcgatttgctttttcagttcttcgatccttgatattttctcctcgtgctctttttgtaattcttcaagttctgatgaagatgaagatgatccctttttattctcacctaaatcccaacctatatctatgtataaatataataaaatacaaacatcgtttatacattaatatacatatatatatataccttataaagaaaaaatatgtaaaataattaatcaaatatattatatacatataaactacctgagaaaaggttattcttggacatgttcttctccataacttcacagatctttttgtaagaaagttaagtatcaattagaggtcttttgaattatgattgtgtagctcttttctctcgctctctctctctaattctaggaacttgtgtatatagaaagaaaagatcattaatgtatttctaagatattttctttctatttttgttttatgatcatggatttcccagctaagcatagaaagattcatacgttttcaactgaagtcaattgatggttttacacattgtattagtaataatgagtactttgcatttaccaaaaggaagtataaaaagaaatgaaatcttttttttttctttaaaagggaaaaagaaatgaaatctttaaaattattattatatatacttttctatttatatttatgcatgatattgtgatatgaacatatctccgctcaagagaaattaaaatcacagtgtttgtcgaaaaaaaaaaaaaagaaaaaagaaactgtgtgaaataatcctactgcttataagatgacaaccataatatgtttttttttttctttttataagacaaagtccttaataaatgaaaatttcagaagaaaaaacaagcaaacaaacataaaacatttctcagataaaaagccaaagaaaaggataatagaataaaaaaaaacgatatagtcacttacttaccttaaacctttattgtcctcaaaaaacttgacactctccctgttttcactatcttctttctttctctcttttgtggccccttgtaagaaaagaaaaggaaaaaaaaaaaaggaatgatctaaattttggcccccaaaacccttatataagccaaaaataaataaaggggctaacgagaataaagattaaaatttgtaataaaaaaaaaaaaacttaaaatttggcacatgagccctgatgaaagatgatgatgatcagatatgacccatttaagctgaccaagcaagtaatgtatgtaaggcattgctgtagagcatctttcctctgttatgctataaaatcagggccacagattatggtacatagatttggtgggacccaaaaacaacaatgtgaatgaaattatgaaatgactcttttgtttctccattctattctggctctaagggctcttgtcccatctattggaatcagaatattttgcttgcgtgttttgcaacaagaatcgccatacccatttaccctttcgaaatttttgctcattattctattttattttgtttcatcaacccctattttgaaccgtatgatgagttacatacctgttctgagtctttgaccatttatattggaaattatttttttgaactttgtgcttagattaaaatagtttttcatatacccgattgtattagatctccaacaaccaaaatttttaaacaagaagaagaatagtatttttatgcaccgaattttttagggtgtaccacttgttaataatacataatcttcaaaatataacttttagagtaatataattcttccataatattttattcaattttattttaaaataaataaagtgataaatgatagtttataaatatatgcaaattaaatactttttattatttttacattaatgaataataaaataaaatagtttttttttaataatttatatttttaaaatttttaaagtaaaaagggtaaaatctatttaatttccatccatttaacaaatatccttcactgtatcacttattttactataaaaattatattttaaggaatattattaatgaaatatatactataaggaacaaaatttagtagtataaaaaattaaggaacaaaaatattaattattctaaaaaaatgagaaaattattataaagactaatttcatgtattttcaaggtctaaattggtatttaggaaaaataaaatatccaaaatggtatttaatcaaataataatgtacacgtgaatgagaggtaatggacatacatagtgatgattcaatattttgatgagctctactgccctagtagagttgagggaggtatagatatatagtaagataggtaatcctttttttatttaatagggccagtagcactatttgggctatgatgattcaccctttttctgcaaaagaaaagaacaaattatgttatagtgatgtactactaccactcttttatcgcagggttagatttagacctttcaataatggaccatcaattggcaattttctttcatgattgatctcaacatgttttataagagaaatttgataattcatgctaaaaataccatctctccaaacagttttttaactatacttttcttttatttttaacccaaaaatgcccatctcttcaaatccaaaaaatctcacattcatctctctctctctaacaacaacaacaacaaataactcttcttcttgaagcttcctacggctttgctctggttttgcaccaatattggtttgttgtgtctgactcccagttcctttccttcccaggtttgtgccttcttagtttcgtctctctttgttttcttttttctgtttcctctctgttgtgcatttattgttctatctggtcttcacttaatgttttcttttgttcctactcgcctctttctcctttcccctgacttttgatttggttctgttcaccctcattaatacccttggatttgtttccttaatacgtcaccctaatc

SEQ ID NO: 14215 - DNA, 6614 bp, Cannabis sativa
cggcggcggccacaatggcctcactgcagccgcatacctcgcacgcgccggcctatctgtcgctgttctcgaacgtcgccacgtcatcggtggcgccgcggtgactgaggaactcatttcaggtttcaaattctctcgctgtagctatctccaaagtctcctccgaccttccatcatcaagtaactttttccactttacaatcaatgatatactattattattatatatatataggtatatatgtataaacgtattgatagatagatgcactaatacatacagtgtatttgaagtaactcgttttggcattacagagagctggagttagggcgtcatgggttgaaaatgttgaagcgaagtccttcatcttttactccttgtttggatggacgatatcttcttttaggacccgataaggagctcaactactccgaaatctccaaattctccaaacgagacgccgatgcttattctgggtcagattaaattactcaaaaccgaattacttttcatgcagatagcttgtttttgatttagattgagaatttggaatctttctccacttgaatgtgattttctatagaagtagaagttgcttttagaaaatgaagtattattattattatcagtttatctcaaaagcttcgtctccttattgtctagatatgaggatcagctagagaaattctgcaaattgatggatccacttatagattcccctccacctgaatcgttgaaatatacttcatcttttactgatggattcaaagataagatacacaagtcagttttctgggcacgttttcttcgacaaggtctctctctcggccaaaaagatattgtgtaagaactttttacctttgatttcatatatttatatatgtttgctttaatcatgttcttgcatgtagattcatagctttcattttgatcattgtgatttgttgacagggaatttatggacttgttattatccccggcttcaaaggttttgaataactggtttgaggttagtatgccatttgttttggaaggccacaccaactgttactgaattgcttagactgagtaactaatcacacagtttgtacattgtcattagtaacatgatgctttggcattctagaaaataaataaaaagtcgtacgaatgtgttttggttcaagtccaacgtcgtagcacttttcttcctagctttcatatagtgtacatttgtgtggtgttaatttgggtctcactgacttttgatttttgcagagtgatgttttgaaagcaacattggcaacagatgctgtaataggttcaacggtaatatttcttataagtaattttctatatgctgtgtttcagacatataattcattcacaatttctactataaaccttgggcctttttcattatgtgattgtgatagacattgatggatttgtcaagttggtttttgtgctggtaattactgaaacaactaatcaatatttttaatatttgatacactcggtccttgtttttgttgttgtcttcttacattggactcttgtgatcattaataagatcagttgccttctattttgtgatgaaggcaagcgtccacacaccagggagtggttatgttctgctgcatcacgtgatgggagaaactgatggtgaacgtggaatttggtcgtatgtaatataccagttcacatatttttatcagtttcatgatgcaacactgtacattgccatattgcaacttcctctagccggtgctatgattctaatataagtcaattaagcttgaaaataactaaatggcacggtaaatatatcatagcaagaaacacttcattttaggcttaatggagtagaagagatagatgtgtctccttgtcaggtgatacactttacaacaaacatattgtgaactggcaaagcttattaggatgaaactacattttctgtattatccagatgtcattactcttctcatttcccattctaataatattatttttggcagatatgttgaaggtgggatgggatcagtatccttggctattggaaatgctgctaaggaagcaggggctagtataataaccaatgcggaggtatatctttggagaatagctcaccatcttgtttgtcttcttacttgtgaagaagagcaagatgcatactcaatagtaaaacttatttttttttctttacgagaaagggaaaaataagctctttttttcttaatgattgcaatcctgctattttatttggttgtgtcaatatccaacaattcgtttcctgacacaaccaaaaactctctagtagataaacaaaatgtagcttgaaaatcctatcctggtcatgccagatttttacgccatggtaagatgccacaagcatctaaatatttgtattagttggtgttttctcttatcttatcagctttttttttttttaattcaaatttgttcttcaggttaaacaactcttagttgatgactccggcagagcaaatggggtaagtgtcttgtggttgcttcagtgaagtgcaatatttaagctttgataaaattaactaagcatcttgatgacaaattttattagattttattggctgatggtacatcagtgcgctcttcaattgttttatcaaatgcaacgccgcacagaactttcaaggtaatatattaacatgaatattcttttttataattatttacaccgtgtaagaataggtgatgctctataaaataatgaaaacatgggcatggcagtaccttcaacttcttagttttgcgtttgatggatttcagcaacagtttttattatattaattatttttattttctaaaacaggagttgactccaaatcaagttcttcctgatgattttatccgtgctattagttactctgactacagctctgtaagatccctttagactgcttatcttttcatttagaatttactaccttcttagtctggcatcacctcatacttaatttgctactcagcaggttttagtaattatgtagcattccatccatgaacatagccttatatgctgtaaagtctattcatgaaaattatcataaacaacatatgatgcggacaatagaatggactgttgaaaccaccattaaccttagtctggtgactttaccagttccgattgttgaaagaataacgtgagaaatgaatattcattttgttaagcagggtatcccagcagtactgtactttttagttgacaaatgcttttgctgcaaaaaactttatgggaggagaaataacaggattgcttttgggataaaattggatacattattgtgtttttatctgacgttttaaaaaaaatagtttaagggtatttggcgttagtcttttaaggaattatggaacaaatttacgaattccatgtaccacttctcatatgacatactttttttttggttaattacctaatgattgattatgtggttgtaattggccaaaacaggcaactacaaaaataaatgtagcagtggataaactgccccagtttaagtgttgcaagttaggttatcctgctgcaggtcctcagcatatgggtaccattcatattggttctgagaggtattgtacgtgttctgtgatattaagacagaaattttatcttcatgctagactgagttaggaagaaatgactaagttgatgtgaggttgttcttttttctttcttttttttttttctgaaagggccacctgtcttagactgaccccactcaagtatattgatgaccttaacttcacttgtggctgaggaaaaccgtggtaacaaaattttagcataaacacaaaacaagcaacacataaatcgaaactacaactcagttttccattctctacataaaattaagaaagaaaattcctcaagaggctgtcttaaaaacccatgatgctgtccaaaactttaaaatgtcccataagtcctctacaaaactctcatgtccttaaaaaattctattatttctttctaaccaaactgcccaaacagtaaccattacaactgtcctccataatttactttacgtttgcttcgtattagcttactcactatcattagaggaacaacacaagatggtacccaggataattcaaattcctctaacagatttagccacagcctataagagaatatacattccgaaaacaaattttcaactttcttcccacttgctttacaatgaatgcaccagccaagggaaatagctaggtaagaacgctttgtttgcaatttatcatggacattcacttttccatggttgagattttttgacatgaaatataaatgagtggggttagggtcgggacacaacaacatgaacatgaatatgacgcgatgatagcgatttccaaccgtttatatatatataaatatatatgtgcaatagttgatcaagtcacatcaatcattttttctgaactgtttgttgacagggttttaaaagcaaatagatattagtaattcctatctaacattagatcagcccccttaagggtgtttgttttgagttttgagtagcctaggaatttgtggaaagagttaagatggagggtaatatgaaactctgatagtttgacattaatctctaaaagctatgtaggacccaaaaaagagttacactttcccatctaaaaacttaaccaaacataacatggtatataatacacattcctactcatcacctaacgcaccatcaccaaacaccccataagtgtttttccttaactatatgtgatcccaaatggatgatgatcctgattattgtaattgtcactttttgaagcatggaagagattcattcagcctgtcatgattctgctggaaatggattaccatcacgaagaccagttattgagatgacaattccatctgtcttggacaagactatatctccacctggtattttattacgcctctccatttaaatatatgtgccttcatcaaattatccgtagtttttttctaaataatcaaatgaaatgcgtaggacaactgtcttgtcttttttcttttttgtgaacagttattacattatgtcaaggccaatccaagtcatgagaatgccaagtaaataaaattataaaaaggctcgtgcacttagattctactttagcagtgccaattataagtttaagtctaactttatggttgtaggtaagcatgtgatcaacttgtttattcaatacacaccatataaaccatcagatggcagctgggctgactctgcttacagagtgagtttccatcaaatgcacttcttctcaatctgtttccgactttttcaaaagtaaataattatgagagggagagagctagaggagcataaaagtagtcctttctgtctttcgttctctaaaatctatagatgtgtgtttttttatgtttgggtactaaccagggtctctgccccaattgtttaattctatattttgtgcacggaaatctgcatttgtacacgtctcaagctaataattttttgaatggctcatgaccatccatcctttcaggagtcttttgcaaaaagatgcttttgtctaattgatgaatatgctcccaacttcagctcatcagtcattgattatgatatgttgactccaccggatcttgaaagggaaattggtcttacaggtacttactatgaatataagatgaaatttagctttagtcatagggtaagagagagagaaggacgagctttataaaatgaataaaaggacaagcttgataatgaatgaaatttgactgacctaatgtgcggccaagctacacatttgaattttgcagggtctaacccttaatactgaaatctgaacaggagggaatatcttccatggggctatgggattggattctctgttcctcatgcgacctgtaaaaggatggtaatatttggagcttagttttatttcttatctagttgtttgtaaaactaaaagcttgtatgtttagcttttgttgatgtatatttttttatgttgttggtcgttggatgcaggtcaaattataggacgccagtacctgggctttatttatgtggaagtggggcgcaccctggtggtggtgtgatgggtgcaccaggtcgcaatgctgcacttgcagctattcaagatatgaataaagtatagagatgatgtccaatgttttgcgatatatatggaacattttttttttgtaattgttactaaataaagtataaatatttgttttaaaaatattaaacaattagattttgatatttgaatttttatatttaatttagttaattaaaaaaatatcaaaaaatatttctatttactctatattaaaaactaagaaacaaaccgcgcttcgcgtgcggttgtagtttatttagtgataattaaattataaaattatattaaattttaatgtatttttaatagtacgagtaactattctattaaacttttattttttttcctcttaataagataagaaaaataaattatgttataaattcttaattattctaattatttgggactaaataaatgttataaaataatataaaatagatgagaagaaagaagaaaaagaagagagaaagagaaagtgaatgagaatttctcagtt

SEQ ID NO: 14216 - DNA, 9814 bp, Cannabis sativa
tagacaatctaatgggattatctttctaatggaattgctaggtataagcggaggaacattaaagaactgaataaaatgttgcataagtgcactgagcaattgcagcaattcagtcatgtcaacaaaaaggcacttgatcagtatgttaatttcacagaacaacgagaagaactccagaaaaggcaagctgaactggaggccggtgaagaggtaggccattagtacttcattgaagtatcttctcacaggatgcttattgttatataaatattatttcatattttatgcttgaaaaattttggtagctcaagtactgtgtttcaaattctgcagaaaattagagagcttatatctgttctagatcagagaaaggacgagtcaatagaacgtactttcaaaggtgttgccaggcacttcagagaagttttttctgagctagtacaaggtgggcatggccacctagtcatgatgaagaaaaaggtgggtcattatattgctgaagataacctatctttgtatttactcgttggggtttggcaataatgttgataatgcttcgaaagtttatttgtttttgaatttggtgcgggagtggatctattctctgtattctgtctgtttattcatcctgtccctaaatgttgtacctaattaataacttcactagaattctcctttatcactcaataaaacgaggaaaagataaaagcagaaagaagattgataaagttctgtctgtgtcgggtggtttaattatctcttatatatggttagcatatgtttttgttggttgaatgatttttgtggctagtcagcatctatcagttgcttcttgtctagcaatacaggttaagaaagttggtctaatatcttttttcttacttttattcgtttacatttacaggacggtgaccatggtgatgatgatgatgaagatggacctcgtgaagcagatgtggagggtagggttgagaaatacattggtgtgaaagttaaggcatgtgttatcctcacctaagcatttatttctattgtgaaaagaaaactaacatatttggtctcactttattgatcttatgtaacaattcaagagatcaactgtactttcctatagtaatatatattttctttgaaagtactcctcatctaatcctacaatagtggggaaccagaaaattagagcaggagctatccatccatcttctgttatagtatttgttggtgaacgaagtaggaactaataacgtaaaattttctgttgtatagttaacgaagtagaagctaattcagtaaatttttccaactaaatatatatgttatctatttgccaatatgagtttgttgacagtaaaacttattcgctcatgattggtttgttttttaggtttcttttaccgggcaaggagaaactcagtccatgaagcaactatctgggggtcagaaaactgttgttgcacttacacttatctttgccatccagcgatgcgatccagctccattctatctttttgacgagatagatgccgctttggatcctcagtacaggactgctgtaggaagtatcctatattattgtacttgtttgtttgtttatttaattattatttgtttttccatacaagacaaagttatacttagatcttaaactaattactttgtgaactgttgcactctttatctgttccatcccttcttgtgatcttgaaatccattgggctctacgagttccttactacttccttgtagatatgattcgtcgcttggcggatattgcaaatactcaattcataaccacaacattccgaccggagcttgtcaaagtttcagacaaaatatattatgtcacacatcaaaacagggtgagctttgttaaagttgcctccaaagatcgggcactggactttatcgagcatgaccagtctcacaacgttgagtaaggtaataaaaaaggtaaactttgcaatttatagatattgtgaagtttgtgttactacaatgcaacaagaagtttaaatgatatttatgtagttttgtattgttatttagtttcaatccttgtatggtgcttttctttttgtaaagtacatttttattatagtagtagttttatcggtctttacgaaagttgaggttcaaagtttgagttttatgcaattaatatgactttttagttgaagttttttacttggtgtagagtaccaagggaatgtgtgtagtatgtaaatttttgttaaggaatttacattttgtagtatttgatcaaggagacagctagtgtaactattcctcataatttttctttttgtattttttatttgcagtttttccttaatccattcaggagagtctcacccatatccggactctgaagaattcggtgtgttgtcttctagatagggggcttgtagttttagccagaagactgtatagatagatgatgctaaacaactcgaatttggtagttagatagattaagacatatttcgtgatcggtataaaaacagtcatatatggaaacctttagtttgtattatgtaaatttgggaaggtccatggatcaaggaatgttggatcatgtaactactcactctttgcttctttctgtttaatctttgactacgttctggttcttgtacatggaaataagaaatggactcggctcagcctgtgtaggttgtgtttatcacgtggggcacagccaagccaatgcccacacaatttcgattggttgaaggtttggatcgtttgatatgtgttatttttttttagttttagttgtttatttccattaacatcaacgagtactttcttgccattcctttttctgggtaccaaattgccactattgaaatgttattgtttttaatgccaattaattggttaaccttatattgggcttttgataagaactattcacttttagaatttgaactgaaccctatctagttgagagaattatgcggagtattccattctttttactaagccatagacaaaacaaaaataagccagtatgttatttattgaattagtgtttaatgacttgaaaaagaaaaaacttagtgtttaataatttatgttagtatttttttaggtgtactctgtcagttgagatgaagaaagtgaaacaatgagcttgattgaatatcagaggctctaaaatgtaatatatatatgtacaagagagtacaaagcaagtaacagaattctgttactaaggccagctgtaaggagatgcaactccacctaaagacccagctggtgtaacagaattaactaccctcaacagtatttaactaactgtcctaataccccccctcaagctatgtttggttgtggccaaatttagcttgtcacataagtattgaaatctaggagaggacaaaggcttagtaaacaagtcagttgtctgatcagttgtgggtatataacatacttcaatctttttgtctgctatttgctctcggatgtagtggacatccaactcgatatgtttggttcttgtgtgaaaaacatgattgagtgctaatgcttgagcactttggttatcacaccataaaataggtaatgtcttttgtagtgcgacactaagttctttgagtaaagaactcaaccaaaccatctctgttgctgcagaagctaaagcccgatactccgattccgtactggagcgggcaacagctctttgttttcttgaacaccaggtgattagattacctccaaggaataagcagaacccagttgttgattttctgtcatcaagactagatgtccaatcggcatctgaataggcctctaaactgagtaaagtagaaggtttgaaatgaagaccaaagtgtgtggtgcctttaatgtatctcaagacccgtttacaagcattccaatgattggttgtaggtgcctttaagtattgactaaacttgttgacggagtaagcaagatcgggtcttgtcatagttagatattgcaaggcaccgatggtgcttcgatatatttctggtttgtcaaagagggggctgtcatcaattgacaatttatttgctaaaatcattggggtgtcacattcctttgcatcttcaaattgagttttgaggagaagatcagaggcatatttggactgagttagatataatcctgattcatttctgtaggcttcaaaaccaagaaaataactaactgaacccaacgattttaaggcaaatttttgatgaagagttgttattagagatgagattgcagcagtacttgcacctgttattaacaggtcatccacatagactaagaccattaatagagagccttggttgttgttatagaatagagaagaatctgacatagaagcagagaatccccaagtaattaaagtgctttttagagtgtcgaaccaagctcttggtgcttgcttgagaccatatagagacttggttaattggcacacataatcgggtcttgtgggatcttcatatccttgtggttgctccacgaaaaccttctcttttagttccccatttagaaatgcattgttaacatctatttgttgaatatcccacccatatgtcacggccaaagagaaaatgacccgaattgtggaagctttaatgactggactaaaggtattgtgaaagtccaaaccaggagcttgctcaaaacctctcaccactagccgagccttgaatttatctagactgccatccttattgtacttggtcctgaatatccatttgtttgtgagtacattcatgtctgaagtgcaaggtaccatgatccaagtcctctttttaatcaatgcaattttttctctgtccattgcattcttccagtgaggaatgctaagtgcctgcttgactgtttttggttcctcatatacttgttgctgagaagccgtgaccagaaacacttttggctttcgaatacctgatttagatcgtgtttgcatgggatggccagttggtaaaggtgctaaagaaggaggtatgtgaactgctggtataacaatgtcaggatcattttgttgatatgtggtggagtctgtactagttatatgagatgaaatgggatctggggaagtggttataggggcagtggtgtgtatctggtttggggaagagggagcaagatcgggtggatttgtatttatggagccaaactgtatgggagattggggaataatagatggtattacaaaggctggtgcaaggagattattatggtaatttccagttatgggtttgggaaaaagagaattataaggaaactcatgttcattaaaattgacactgcgtgctatgtatatccttcctgaggaatgaaggcacctataccctttatgaaaagggctgtatccaagaaacacacatttggaagtcttgaattgaaacttatgctgattgtatggcctaagaaaaggaaagcatgcacaaccaaaagtctttagaaaggtgtaatcgggctggctatggtatagacattcaaagggtgatttataggcattgtcaatggtgggaagtctgttgacaaggtacacagccgagacaaaagcatcccaccaaaaatgcagaggcattttggcttgagcaagcaaggttaaccccatttcagttacatgtctatgtttcctttccactctaccttgttgttggtgagtgtgaggacatggatgcctaaagagaatgcctaatttttgtagaaacggctgtaatttcctatactccccaccccagtcggtttgtaagccttttattttgtgatcaaattgattttcaacaaatgttttgaaagtttggaaaatagggtaggcatcggttttggctttcattgggtatatccaactgtatttgatgaaatcatctacaaataggatctagtatttgtatccttcagctgtgggatatggggaaggaccccaaacatcggaatgaattaattgcaatggcttactggttttaattgtggagctactgaagtgcataagatgatttttaccaaattggcaagcatcacaaaaaggcaaagctttattagagaactttgtattcatagaatgtaaaactttagaaagtattacagaggacggatgtcctaacctattgtgccaaagagatacaatgcacttggaatctttacaaccattagaaatagaggaaagattacaatcagccttattgtttacagtaatagaattgacatttggctggggtgtagtggcaagattctggagtagagatgcggcagtagtgctagcaaaaggtgtggatattttgtataggccatggctaagggtaccctacagaaggaccttcctcattatcttatcaacaacaaaacaaatgttagtatcaaagataattgagacattattatcaatggataattgagaaatgcttatcagatttttatgtataccaggcacatgtaaaacctgttttaagagaagaggtttattacatggaagataagtttggccaatagcaagaataggaagagattgtccattacctacagtgagctttcttttgcctttatagtcgactgtgttagtgagagcagtaccatcagacacaacatggtgagaagctccactgtctaagtaccattggggatcagcaacagtagcggcagtggcaagcatggcctgtggttcttctgcagattgttcattctggttttggttcgagttaccttccccttgataactgagatcgaacctatggtaacattttaaagctgtgtgtcccgatcgaccacacacttgacaaataggtctatttccccctcgattgttcgagttacgacctcccctaccacgatgtgtgccacgaccacgactgttggaatttgtgggaggaggtgtaggacctttcttgtttgctgctacataatgagcagaaggattttgaagatccaaagcagcaacagaggattgttgttcaatccgcatttcttgagtttgcagcaagaattggacttcttgcattgtaacagattctttggaggtaagggtgacgattgctgaatcgtactcattgccaagccctccaagaatgtagagaatcaactcatcgtctgtgaggtgatgaccagccgccattagcgcatcaccgagacatcgcatttttaaaatgtattcatcgacaggagtggatcctttctttgttgattggagcaagccacggagttgtagaacacgagctcgtgaagtgtttgagaaaagttgcacaagaacattccaaagatctgcagcagagtcgcaccttgcaacatgtcctagcatgccttcagatatggagttgaatagccaactgagaagaaattgatctaaccgaagccaatcttgcaattctgggttggggatgattcttgagtcatctgttggatcaaccattgtagcaggaggtcttgcacgagttccagtgagaaatccttccaattgatgcgcacgaactgtggagaggacttgagatctccaatagaagaaattatggcgatctaatcgcaaattgagaggctgaatgtgatttggaatcacttgaatgacagggacagtaggtgtgttgatgggggtcaatgaagaacttgcaggccggagaccagcagcaccagaggaggacgccattgaagacagtttggaagaagaaggatcaacaaagaaagaaaaaaaaatgcctagaaactctgataccaagttgagatgaagaaagtgaaacaatgagcttgactgaatatcagaggctctcaaatgtaatatatatatgtacagagagtacaaagcaagtaaccgaattctattactaaggccagctgtaaggagatgcaactccacctaaggacctaactggtgtaacagaattaactaccctcaacagtatttaactaactgtcctaataatgtcaatacaacccattttaaaaggatttttttttattatataatatttaaacaagagaaatgttaaaaggcgttagtattgcttttttttttttttttgaaattaaatagtattgtttagcactctaccactatatcattattttattttattttattttttttttaaataagagaagtgttaataggcacacttttaagttacactatttttcaaactatttttatagttctagttggaccactaacctgaaattttgttttatataattactaacggattaatcagttaactttttcaattatcatacacgattaaaaagttatctgattgtaaaaataataacatagtgagtttttacacggttcatcttcaaatgacctactccttaagacacacacctatataagaaaaattgatctgtaagagatttgaagataaaagtgtatttttaatatcaatatataaaataaaagtgagaaaagtcacttatgagtatataaccctcacatgcaaccactgccatttttttggccaaaaagatgacagtgctctcttaactaattggccaagaacagtgtggacaaggtggttttctagaatccatatgactgaaataagcaagaaacaccatccaaggcttcccataagctatgcccaaccactgccatcttttggcctcgactgatggcagtggtcccctgttagggttttagacgttgaaatgagattttgaggtcccaagacccccaaaaatatgattcaacatcaaaaaataagtcaaaccacaccttgaggggtccaggaacatgcacggccgagaactgccactcgaccgtgttagtgctcgcatcttgagcaaaatagcacaaacatcccttcagtaaaacctctcaatttttattcaaatgactttattcaacatgcattggaaagatattttcaagaaaaatctaagtgtgtctttagttatagctcaattatgaaggtatcagactcaaaattggctcatacgacagactggtacactttacttgggaattgagtggtgtaattaagtgtgggatgttggagagctatgccacaacccatgtggcatcatatgcgagaagtggcaccccaaaacacttatttccaacacttctctccaatttcatgaatctcaagctgagaagtgacatcccttgtcacttctttctaatttcgtatatttctagtcgagaataaccattctcccaatgtttgttggattttgacctaggaataagtgagacttttgaagatgtttatttatttttacctttttattcattattgggaataagatatgagatttaaaagtgagacaccccgacatgtgggggatcaataacaaatcctaagcctatataaagatagtgattggctggttatggggggatcaattgcttgctggctggatagaaaaacttgagagacaaaatccttggcgacttcttagaacacaaaactccttgagattttcttccttcattttttggcccaagtccttcatactttgtcgacaccaagcctctattactaaattaccattgacatacatagttaccaagaacaagatcatgctcttttcttaatcctattggtttattgttcacaagaaccttacaaccaccatctttatcagatttgtgaatattgggtctcccatgagccttgtgttcataagtctcaatacaaatttcacctagaaatctatttttgtattattgtccacatactcttgagaacataactctagtgtgtcagatccaattaataaaaacaaaagtagacgtagcctcattaccatcgcaggggtgaactttttttttttttgagtgtagcgtaatggtattttacaatcagttaatagcttaataacttcaaggtcctaggttcgaacccat

SEQ ID NO: 14217 - DNA, 6736 bp, Cannabis sativa
ttgggagaaagccaagtggcaatgggactcacgttacaggacatgttgctttaattactcccaaagtccatcatttcaaatgagtaataacaggttagtcatctccgggaggatctagctggatcgcgagaatctctcgttcgctcctctctgcaaatgaagtatatccggaggatggtacgggaggactaataaaagatgacatgtcactcaaggatcaagacactaaatatgcatttaatgcggcatggaaaagaacatcagacgttttactctgacaagcgtgtttaatggtttaagccaattattccctgatttaacgagcccccattcatcaatcgacggctacataaatgagtcatcaagtcatacaccaaacacttacagatagcctaaaacccatcataaaataggcaattataccctaaataagagtttgaaattgtgtcaagtatggtgtaaataaacacgataatagtggccttttaccaccatcatgagcctataaaatacctcaatgataaatagaaatggggatcgatcagaaaattctctgtaataaacactctcattaatataatgactcgtggactaagactcattaatgtaccaaccatgtaaaaatcatcttttataacattcattaattacttcatactggtctaattactagttgccaaaaacttcggccaatattttggtacttttattaagagcaataggaagtcataagtagcatggtaacataatagtaaaaactagaaacacttcacgcccacaacacctagattacctaaaggatccagaggaggaaaatgtggcatctagggtgaatgctgaagaaggagacactaatgatccataatattctgactaagaagaatatgaagactacaacgaagaaaactatacagagttagttgcactaagataaaaggttgtcgacaacgaggttgagttggcagaacaaaaggagcaaaataagaggatgcaagagatattgattgttatgaaaagggcaatggaaaatgcaggcatccaagtggacttagctgcaaatgcgtctgtacgaaaagggactgagacggaaccatcttagcccaatgagggtcaaatataaaagcatagggaacctagtcccatcagatatcctccaggaaaacctaccacgaaggagaaccctacggctatccccaaaagaaattaaaaggctaaggatccacaggcagtttgttttgatctctcgaaagggaaaggttcgtagggggtagatttcctaagggaaatactagcctctaggatcgaggagatcggaggagcgtgtttgtgcatcaagagccaggaaaaccaaagggctctgccagaagggatccccgagtcaatctaagacacaagctcaatgccaaacacagagatttgagaacacgccttgatcaaaggaagaaaattgcaccagcttctgagagcaccttaaatgaaggaattctggctgaactttcaattctcaggaaagacatagcgagggtctctcaaaggcagaagggaaatgactcagagtcagattgtgaagatcgggagccttgcacgagaaatatactagaaactgagctcccaaagaactttaaaatgcttgaaatgactctatatacgggcgactctaacccaagtgatcatttatccagatttaacagaaatatgatggtaatcaggattagcaatgatgctaaatgtttgtgtttcccattgatgttggcaagatctgtggaagaatggttcaggaagttagaacccgaattcgtggattgttggaataagttactgatcatctttagaagcctgtttattgtggccagaaagataaaccttgaagttagtgccctaaccaacatgaaataattactaatgaaaaccttgaagaacttcatcaagaggttcaaagaggaggcttctaaaactaagaaggtagatgacagacaacagttagctttattgcaagctggaattcggatgggaacccctttctggaataagttacaataggaaggtacaaccagcctgcaggatttccaaaagagagctcagaagtatattaatttggaagaggcccaaataatcacttttggaggatactatcaatcgaaggccctaggtacgcatccagagtacaattcctagggatcacacctgctgccactcctcaaatgagtagcatgccaagcgtgcatatccaggaaacactaagatactctccaaattttgtcgtggcaccaacccacttcgattatgggccgccaacaagggctttcactctcagattgtgcatgcaatatcttgctcagtctgcgccattggtggcaagtgcagttgcagctctagaagcctcgaggagtaagcggtcatccgaaaggagcacccaaaatgatagtaaaaaaccaaaaaggaccaggtacaattcctagtacactcaatatactgatctggtgaatacacaagagcgtgtgtatttggccacaaagcaaaatgttcactatcggagaccgcctcctttatatcgagacaactcccgaaaggacccaaataaagtatgtgagtaccacaatgacattgggaacactactaacaagtgcaaaaacctaaaagaggagattgaaagcctgatacggctaggccacttgtatgagtgggtgaaaaactggttacctcgtataagggaaggataggtcaggattcagctaccgctcggaggcgtggcataagctcctgaagtgcaagcccctcagggagctcttcctcaaaactaagaggctttgccaggacagcctatagatcgaacgagagaatggctatgatttctggaggccctcatatcaggggttcatctagtaatgagcttaaaaggtatgctaatgccctggaccatgacaaagaagtatgggaagtataccaaatgctagctcagagacctcatctcatggattaacccataatatttaccgaggaagatgccaagatggtgagtttcccataccacgacctggtggtaattgaaactcccatcgccaacaagatagtagcataaattttggtggataatgggagttcagtaaacatactgttcagagaggccttccttgccattggcctcatggaccaagacttgtcacctattggttcatcaattaccagattcaatggaaattccctcatccccatgggaaaaattaggctcttaatgaccatgtgcatggattctcctccaagtaggttcaagtactgcacctttgttgtggtagactatccaaaaaacttacaacacaataatgggacgtccggcactggtggattttggagccataacctcaactaggcattattgtcttaaattccctacccactctaccagagtaggaactgttcgagggaaccaaggggaagcaagaatttgatacaatgtggcttgcaaattagctgtccttatcgtccaacccgtaaaaggagggaatccaccaaaggtttaggatgaattagacccccaggtgggagctgaggccatcctttagcccatggaagaggtagaaaagattcaaatctgcggtcaagatccaaccaaagtaattcgagttgggaagggcctcaatcctgaagaaagaaataaaattgtggaaaccattaaagagtctgcagatatcttttcttggactcacggagacatgaccaacataggtccacacgtaattacccatgttttgaatttcaacaaagacatgccagcagtgtagcagaaaaatcgtcccctcaaccctatcaaatctgaagcattgaagtaaaaggtggatataatgttgtccaacatctttattcgagatgtctataacctaaagtggttggctaatctggtgctgatacctaagccaaatgggacatggagaatgtgcatatgtttcatggatctgaacaaagcttgccccaaagattacttctcactcccaagaattgatcacatggtagatgctacatctagctatgagttgctagcaaatcaaaatgcatgtggctaattaggaatgcactagtttctatactgacaaaagagtacactattaccttgtcatgcccttcaagcttaaaaatgtgagagcaacctaccaacggttagccaactgggtgtttaaaaacatgctaggaaggaacatggaagtttatgtggataatatgctggtcaaatccaaaataagtaagaaccattctgatgatctctaggagtgttttggggtagtgagagaatacagaatgaaactcaaacctaagaagtgtactttcagagtaaaataaggaaaatttctagaattcatagtaagtcaatgagggatagaggctaaccttgaaaaaatacaagccttgcttgaaatgttatatttgaaaaaacacaaggatgtgcaaagcttgacagggaagatagcagccatgagtcacttcatctccagttccattgaaaaatgtatcccattcttcaatatattaaagaaaagtcaaaatttgagtggaccgaggaatatgaggaagcattcaaacaataaaaggagcatatggcaagccgtcgattctgtccaaactaatccactgagaggatctttacatgtacttggtcgtctctgaaaatgtagttagtgtaacccttgtccagaaagaaggaaaaaaagcaccatgtttattatctcagtaaaaggatggtaggagcagaagcacgataccccttaatagagaaactggctttctgtctgctgatagcttcttgaaagctactaccttatttccaagcacatttgatcaggtcttaaccaaccatccactatgacaggtcctacaaaagccagaagcttctgggagaatgctcaaatgagaaatggagctcagtcagttcgatatatagtatgtcccacgtgtctcaatcaaagggtaagtcttagcacacttcatcgtggaatgcatcaaaactgaagcaaatgctcacgaacctaaaatatgtgcccccacttgaaaaatatatgtggacggggctttgaacaagaatggatcgggagcaaggatagtgatggtgtctccagaaggcttgaggcttcaaatagctttgcattttcaattccctgcctccaacaacgaggcagagtatgaagctctactggcaaggctaagaccatcaaaggtcatgggagctcaaaagatagaagtcttcagcgattcacaattggttgttaaccaaatacttgggggggtaccaaacttacggagaaagaatggcttcttttgttactgctgcaagagagctgcttcaagagttcaaaggctataaaattgagcagatcccaagggagaagaacattcacgcggactggttagcaaatttagcttcggagaaagaagtagaaagactaggggtggtacccattgaataccttctggatccaagcatcctagccaagacagaggttgcactcgccaaaccaagagcccgactggatggaccctatagttaagtatttaactaagggagatttaccccaagatcaggctgcctcccagaaggttcaatatcaagcctcacaaagaaaaaatattacattaattacgtccggaagtgtgacccatgccaaaggtttgcaaacatcccgagagccccaccaaataaagtcatgttgatgacaagcccgtggccatttgtagtgtggggaatagatctaattgggtcccttccaacgggaaagggtagagtcaaacatgctatagtcgcggtagattatttcatgaaatggccagaagcaaaacatatcaactcaattacaggaaagaaaagcctatattttgtgataaaaacattatttgccgatatggactgcctcataagatagtcttagataatgacaagtaatttgacagtgacatattcacggacttttgcaaaaagtatggagtcgtaaaaagcttcttcacagttgcaagaccacaagaaaatgatcaagcaaaagtcataaataagatattaaaagtcacactcaataagaagctcctagcttgccaaaatatttagcctgaaaaattgtcgtgagtattctaggcttatagaactacctcccgaactaccacatgacactcttcattctcaatggtatacagatgtgaagcaatggtcccggtagaaagcaccatgcccttccacaaaagaactaactacaatccgatcaccaacctatcattattacaagagtcgttagatctcgtagaagaactccgggagaaagcataaatttgactggttgcgtaccagaggaaagtggcaaaacactttaattctaaagtgaaaaacaaaaaaattatccataggagacctggtcttaagaagggtctttccaacttcacaagaccatggagtgggggtgttagacccaaattgggaaggaccttatgagattgaagatgaaataagcttcgagacctacaaacttaaacaaatggatgttccttaatcacaagagaatggaataatgatcatctcgcaatactatcaatttaggagttcagtatttaatttcatctttaaatttttaatcaaagaggacctactgtaaattaagaccctttatgtattacaccatccttttaagttcatgcaaagtgacaaaaagtaacaaaccatttagtcacttaggggggtagtagggtataaagcataaataactca

SEQ ID NO: 14218 - DNA, 8837 bp, Cannabis sativa
aaaaagtgggcaaacataattctgccatatttttcataaagcaattaaaaataccatattaagtgtaatttcctcttattttatgtataattatttttaagttgattttgtgtttatgtgctattatttttatttatatttcttttaaaattgatttaggtttaagtacaattatttctatatataattattttttaactgattttggttgttttcaagtcgttatttcattgataattagttgttgcgttaagaaaagaagtctaacatgctcaagtacactttgtccaaagttgacacgtagcagccactatcacgttctaacactataatactgcacgcgtcaacaaattttgatgattttgttccctcattcgcgtgtgagcctcactcgcccgcatagcccacttgtgtatttcactttttgtctccaaccatatatttgtaaatttgtttatttgaaatcaataaatagtattaatatttatattctccttatgattgtattaatgtttattttgaatagtattagcttaaaatagaaaaaaccccataatattattaaatagagttaaaaaaatgatttaaaagagagtacaacatgaggcaggagagagaaattagaaaaaattcaaggatgtggactaaaaatgtaagtcaatgaaggggaaaaaaatagtccaatacgaatcctaatcaaatatataataattatttgattatatgaagaaataaattaagtcgtttacgaacaacaatgatacaaagtaagtgacatctggttcgggaaagtgaaattgtagctgagaaatacaagagagtatgatgaaatgagaaaaagaagagacattgtcttgtgcttccatgccctggacttgatcagctcggtttttttatgctctacaaagatagcacaacagtgctactgtgacagtggccgtacaattcgttggacccatggtcggagtttggtgctcacccgacgtgggcttggtccatagccataccatgatatgatgttatggaagtcctttttctgtagtccataataaacctctggtcaaaaaaagaccccatccatgcatatgaaaattaatttattaaattaaaaactcattaccataaaatatttactttttatctactagcttaaggggaaccccaatataatttctccatttctccacaaggatgaggttctaatgtgattcaccgtggttgtccctagttttttttttttttttttttgtacaatgctaatgctctaccatatacaaataacatgtggtactcggtctgactttgtttaactttcaagaaaagactgctttgccatgaaaatttgacctctaaaaataaattttcatgagactatcgtaaactatcgttttaacctcaaatcaagttttgctgagacccgttgtcaattgacctctaaaataaattgcataagatttgtagagtgcaaaaacttaaacttggagtgtataaactccaatatttgattatatgtcttaatcttcattaatctataccccaaatttaggttctacactttctaaacaagtatatctaaaaaacaatcaccttaaaccaatagccaaacaaaaagttgcatcaccaaaagaactttatcaaactctatgcaaaagtcattaacgctggtccagtgaaacttttagtttagagacccacacgatacattgataaaagatagttgataatgctaaaaacaaaatgaacagttctaaaatgttagtttgcaatagacctatgaaaatttcatttgggtcaaaatgacgccaaacgaaagcttgatgtaaggccaaacgaaagcttgacgtaaggccaaacgaaagcttgacgtaaggccaaacgaaagcttgacgtaaggccaaacgaaagcttgacgtaaatatttatagaaccatcgcacactatggtttatgcatggattttgctctaattctcaaaagaaaagaaaaatgcaattaaaacaaagattatgcgttgatttgtttgaaaaatgtataaattaaaattagtcttatgaaaacatttgtgggttttagttttggatttttttttttaaaaaaaaagtgaatgatatagtggtggatttttagggaagacggcaaaacaatgttgatgttggtggagatgtggtggtctgccattgtgggtagagagaaggagaaaccacgagagaagagaaagcaaagaggagaagcggaaatttgtaagaggggtattttagtcccaactgtatgaagaaacataatttagaaagaattgttaaacttggcataattttaaattaggagtactaggaagcatgaaagctcaaatttccccttggtttttgtctacttcactaatagaaagtagatatttttaaattaggagtactaggaagcatgaaagctcaaatttccccttggtttttgtctacttcactaatagaaagtagatattggtattaagaatgaacaagcagtgttaagaactctaataccttgagggtctcaaaccgtgtcttggaaacccaattcagtttctaaacttcttttgcaacgaggggtctcacatggtggaggtggaatgccaaaaacccaatcgagaacgttcaagtatttggatcgaaagacttccctctcttgtgcataacagtgcattatgatggctgttgataagctgaaaatcaccacatcagctctcttaaaattctttgactggggcaagtacccagcttcggccatgcatgtgaagaagctctcaatggcacgagcaaggcagtagagtgatatttcgatacgcctgcttttcttctcaatggccaaagctagacctgtaggaaactgcccaataatagaaatgatatcattaggacaaagacgccaaggactaaatgagagttcacccaaccagtaaatgaagtgaaaatagttaggtaccgttcccattgccaccattggaatattacatttcctgaaaatcctgaagaatatgcacgtccacatcctgtttaacattgaaagagatttttctaattgtaaaagtgtccttgatagagggaataaagtgtacaataaattttctgtttatgtagtatatagatgtattctcttggacatgattgaaaaataacaatgaaccggagatggacagagaaagggaagaaagagtaaatgaagattaaagaacaatcttattactcaatcaatgcaaagagaggagtttacatacagtcggttagagagaactagagctaagagaacagctagctacagctgccacgactacccaactctaactagttaactataacaaccagactacagaacttgtacaaactaacagttaactaataattaactgtcttaacaagctggaatccacattgcttagttatttgaatattttggtttgaaatcaaaataactaataacaaactacaatttcctacttagtttgaaatctatgccagttgaatgaccataaattgaaaacttaaagtgtttcaatcacataatcttttgaagggatgaaataaatttttaaaacctatcagccaaattttcacatccacactgtttggtaaggccttgtttcaccaacagcctacgattcatgtaatagggataaaaaaaaattacaactattaaccaactttacagctgcagtaaccacaaatttcatttatattttccattttgcttctcctagctccaaaaaacttaatcacaagaaatggaaaagtcttaatgccattacgtttaatggtactaattgattagcaagaatagtttgagatagaaaaaggaaaagagcacctccagtacaaagtgacaaactaccatggaaaagttacaagattaatatttgcacaatgcacgtagctactcaagaaccagatccctctctcctatacgacagtgaagaaggataattttttaagactgaatgatagttaaagtaaaatcagttagatgaatgtaaatttctcaccaggctgatgagcaatatacagacagaaacaagcttgatcttgcagtaccaagaagaccttttcctagtattgtgtaaggcctgcatatggacaaacggatgcgtaagacaatacaatacatacataacaaagaggacaagattgcaacaaaaagttattcatcgatcgaaaccaaatatatctgggatctctcttatcaagcattagctataagcattaggcatacgaaagagaaggcgtgtatcaaattatatattgaccaatgaagtacatcaacatactccattaataattttaaagaaataaatgataaaacacaaacacaccccccacaacagcaataacaacaacaacaataattttgttaatctttaaaaaacaacccaaaaaccaatcaatcttccttgactaaatgtgtgtcgacagaaaatcactttcactaaacaccaagacaggataacgtgtgatttataaagcacgtgtgatttataaagcataggaaaaaaaaacaaaaaatcaccttttcgagaggtcctgacgatgaactataagtgcaggaatcagatatactggtagataaactggtaatgctcttttataggcttgaataagaaaagaaacaacatgtgaactgcatgactggtttccatgcacaatctgcattaaacatcaaaagcttaagaattaggatgacatgataatggtacaaacatttttttaaataaaataatattgacaaaaatggttcccagccaatagacttctggaaattctaccaaaaaatatatacattcaaaataactgaaacttttacgcttatatatatatatatatatatatattcaaaatacaaaaccactaagggttcctttgccaaaagaaaagtatgtacaatttttatataaatatacagagacccaaattagaacccctccacaccgaccccgtgaatcctatactaacggaagcctaagtgggcactgaccctcatactcatcattcatgtttcagtagggatgtaagggcggttgttaattgtaatgcaagacgcatgcatacaaaaacagaataaattaaattttttatccctgtggtaggaaaagaaaaccattcagtgactaaagaagcataccgagcagggaactttcatatcaggatctagtttaacgtccacgccaacagttctgtaatatttttttacagcatccaagttgctgaaaggcatgccagacgcaatctctttcacagcattcaagataacagtatcctttccaccatgtttattgaggaatgatttataagatggaggcaaactatcctgcttcagtatgtaagcagacctgagcaataaagttcgtttgtttcttcagacaaagtatgctataatgtgaaaagaaaagacagaagataacaaaccactaaaagagattatcaacagagacacacgcccataaagacaggggaacaagccaaactcgaaaattcaatacaatgcccataaaccaaatacattttgcgaatccccaattagaaagaatacaaaacgaaactaagagagaaataaaaacaaaacaaagttagatgtaggaaaacataacaatccaatttgaaaagatatacgtacagaatttgggaagaagagacacacataaggaaaatgtcgccatgagcccatgtgagtggcttacaatatctcccaaaccgtttgcttttaatcccacaacgcgacgctaaaaccgcagctcgcataagtatgtaaatagccaaactagtgtgctgcgtattaactccagtaagaagcatggaaggtccagctatagcccctgctaaaagagccctccattttgctgtcctgtactagagaaacatcatagatgtaccaaatcaaattggagaaagcaattacaacatttaattttataaacgtttaattagaattcgaattcgagttcaaatcaggaaacatgcctacgatgacctcccaaagagcctataatctcatcgaccgagacaaatgtaccagcgaaagtgccaagaaatagaccgtatcgcagtgtctccttcagagcagtaacgattgcctcactattcgttatcactccttccttcctgcaaaacccaaaaccgaacgcaaatcaatcgtaagaattgaactactccacttaaagtcactccaaaattcaaaatccaacactatagagagcaagttttcaacctgagagaagccgacgcctttcttcgtctcaaccgaactaaaatagagaaaagagcgagaccgcctttgagaccagctccaatactgaagcccttcgccgcagcaatcactatcctctgaagcttctcggagtccttcaatggcaatgaactgtaaactaccgaagaagaagaagaagaagaagaaaaggaagatgaagatgaacgatcggatctgttgcaatgcgcagcagtatcttgaccgggggaatcgcgatcaagagcggcggcgcaaccattgtcgccacagcaggcaggcgacatggtgaggaattcagtaactagtttctagggcttgggagaaagccaaaggagggcggaaatgaaagaattacagtagaagaaagatgaagggagaagaaagaagaagaaaaatggtgggaaatacatatatatataccggggtgggttttcgaagcttcgtggttatcgaatcacaaattacgattgcacacgtgtctatatcatacgtattcaattcaacggtttgtgtggtttagatttgtatgtattaattatgtaaccatttacattataaaattactaaaagatatttctgctcatcaagggtggtagtaggctcggaggactccataagtggatttggactaaagaactaccttactcaggtattggatcatgctactcccaacaacgtggttcccgttatgtgaaataaacggtagaattctaaaatcttagagcatcacaagattatttgatggagtatactttcgaaggccttgcccatccagtttgcttttgctagaatcatgcatattgagaaagtgtcttgccttatttgtggagagggatcagaaaccatggaagacctcttcttctattgaactttgtcttccatctctggaggtcttttccttgggatataatgccaatctttgattttggagtctcgatgtggaattagatcatattcttatggagcctgaaagttaaaggagtggatgtccaagagttatttatgtatgattctattgtaatggatatgatttgaaaaactcgcaacgtacacaataattatgtttgtaacattaagcactgtattaattctatctatgtattatgcagattatggttcttgtttatttctttcgccggtaacggttgactctcttatttggtctctcctgcgaaagattgggtcaagatcaattatgacgttagggttggtagtgactcaatgtgccagtggctttggccaaagaccacaatgagtcggttttgtgggtggctactaacatgctcaacttttctggcccacttattggagaagttgcggcatgtttgttagcaatggagtcaacggttcgttggaagcatttgtgtgtgatggttgaaagtgattctgagacgattatcaattctctgaagggatcttgctctgtttggggtattggtaggtaactatgtgatctaatgtaaacatctctcaaacattttcattggttgtaattttttgtttatttcaaggctgtgtaattttgtggattataatgtaataaagtgggcttttaccaataatataactaggatggtatatccttattgcatactattgcattttttatttaatgaccgtgaggtttaactctaatttggttctaatatatctacgtctttgtttttttttaaaaaaaaatatatatatattattattgcctagtactccttttcgtgtcattttgttattggagtatcgagttttatataacttaaaaaaataatttttaagaaatatcgttaaccaatcgtaaggtaacacccataaaaattattaaatatttttggtgtccaataacaatcatttttacattacatctcttttcccttttcacttgctacttggaactactagtgctaccttacctgttttgttttctgttctaaatgcaaattacaagtatatctccttttttttttattattatttgttttaataaattattacataaaaatttaaaatacatataaaagttagaaggtttttttttaaaaaaaaatgttatagaagttagaagttaaattgatattatttcttttggaaaaatacatattgtactgttaaaaatatattatttttgtgataagaggataaatttattattttaaataaattggtatgtgtgccaattattattggttttactttttttacaaggacaaaatatcagtaaacattatgtaatcgggctgtttacaattttttttttggttaaatgtagcacaattcttacaatttattcacaatattatcacttttttattagagtaatttgcggtaaaattccttcaactattaatttagttgcaaaaaatcatccaacctcatattttggtgggaaaaccctccaaagtattgttccgtttatatttttaaggtgtcgtacgtccaacctcgttaagtcttaattttgcccacatggcaatgacatgtcactaaaaaattatcctcatggcaatattttacaaaataaaaataaaaaatttaagagtaatttgcggcaaaactccccctaactagcaatttacttgcaaaaaagcatccaaccttaaa

SEQ ID NO: 14219 - DNA, 11687 bp, Cannabis sativa
  modified_base (449)..(450): a, c, t, g, unknown or other
  modified_base (789)..(795): a, c, t, g, unknown or other
gtaaaataaattccaacaataatcatgtttattaattccatgattagtccattattaatatggaattgaactcttagtaattaaagaattacgagctttattgcagtgtccgttgatataatcaattctagtgattgactatccttgtgtcagttcgtaattagtttcagtcaaattactcctatatccttctaattacttctttatcgtttagtactattaatttactagtgaaagtataatttagatccaatttaaacttgtgcacaacttttcatttctataattagcacttaaaggggccaacattcgttccattacgaaagtcaagattcgataattgtagatcatgtttccaaccattcatattattatattcccaaaataaaagttataaaaatcatcttctctaagaaactttaacgagtaaattaaagaaactaataacnngaacaagagttcatgattactcaagattcagactgatctactattgatcatctttatgatatgaattaggcttttattgtaaacgacatgtttgataaaaacaacttaatttatatccatccatgtcatatataatctctatatgtacaacaccttcacttaaatgtcataccacataagcaatctgaatctagatctcttgatccaaacagtttccctaactttcatatgttgttgactgttttattcatggctaagcaatcttaattctccgtacaatacaagtcacaacctcatatatgaataaattttttttagatatttatatataaattattnnnnnnnaaatattaataatttaatattcaaacatatatataaaaaggttcaactcttatttataaatagaaatgtccttacaagtttttcagggcataaatcgtaacaaaaatatccacgtttcataaacagttacatagataatatcaaatagctgctatttaatccctataaatagcagtaacacagatgtaaaaggcatgattgatttccagacatagagaaattttgccaaaatacgttttgtacacagaaaacccataaataaaaataaaactcgtggagtatgtagattttaactacaaagccatgtaatttttttttttgtctttcatctataatcaatatcttcactatatttattacagattcattaattatctaaagcctcatttatatttaactaaattctgagttaacaatattgatataagacatcattttattaggaaacttgttgataagctgtctttataattggagtatattgacactggaaaacaattagaaggtattactaaggcctttaattcaagccactttgttttcctcataaaatcgttgaggagtttgtattgtttaatttttttcgtttgctctccattttgtacaaagtttttaattgttattttcttgtttctaactgtgataatcaacttatttttttgtatatcgtttatttttaaggttgagttaaaagatttaagttatttgtatgtatgtgtttgtgataaataaattattaatgtatagagttaaataatttttgtttcagatacttgtcagatttcttgctgcaaaaaatatttgtaattattttaataatttgggataattttttccaaaaaaaatgttttattgtaaagactatagtatcatgaaaaaaaaaaagaattcttatttattgtgttgaacaattataatgattgtgatgttatgttgcttgaatcgcaatacacaaactaggagttactaataacttccgttaccacgttgacaaagtatgtgtggttcacagaatcacaatataaaagaatgcatccattatagtgctgtacacaaaagtattgcacttccaaaagttaatgtctcaactataacaaatatccacttgtcctcttcccaaactttatcaaaaaaactcaaatgtaaacacttagcaatgaacaaattcatatatattttttagaggataaccaataaatggaaaaaagctgtctcataaagggggaatacaagaacaaacatatacccctagtgtttctttgcctaaggctattgaattttatcatttataattataaccaacacaagacatgtaataatttggttccgatattggacaaatagaagtactaattctccctcgtgcaaagacttgttgagttgccataattttccatgttttctttctataggaacacagccttaatcttgtatgtacaattattatacacgttccaactttctttctttttggtaaagcttctcatgtttttgggtggcacaatagccataacaataattctatcacaaagtttatcgagacaagaatattagccagcacacatgtgagtgagaattcagataccatagtgatgtcagtattgacgtaagtatagtttaggcttaagatagaggtaaactcatcagaagatgggttttcacttggtccacatctttgaagttgtatagttgaataaagtgttataaaatgcgttttttcttctgtttttgttattgtatagttccctaaaataactgttgtcaaatattaatttaaacaagtcatgaaaggtttgattgatgatgctatacatattaatgttgtcaaagattctgaatatgaatacaccggttctcacttgggttggtctaataaatcttcttgaccattgaattttttaggtgcgttgtactttgtagtaacacaatttagaatagtactcgaacaaacaaaaatagcaacatatttctaaagccatttccaacaacttgcccgatcccacaataagatgataaaactaaatttggctacagcttattcacacaattccatactctttttaagtggtgttgagatgtaatataatacaatattctattttttttatatatataaaataaaaggttgatgctatttctttaggaactaattttactgccaagatcacactaattttacaaagaaaatccccacacactagccgcagcttcttgttactcttgtcaacaaatcagaaaaacaaaaacaccaccccatcgcagccataacacctaggttgaacttgacatgaaaaaggcactatatgatacatacacgacccaaaaatcagtagagaaacatcagtgaaagaaaaagatctcgtgggtgtcctctaattttgtacaaccaacccaacaacacatcagattaatcccacaattctcgtggtctagtttcaacagacaagtgaagatctaagagaagtgggcaagtgtgtgcaagaggaccaacgaatgactgattctgtcactatcaaatcaattttctcatgctcgccaagcccaatcgtgtgatttctcttgctgtgaatgcctgctaccttggaccaacatgttagcccagctcttttagcctcacttggcttgctgttctccagatgtctagacaacatgagcaacttttccaagcttgcccctgatttataaaagaatattatgatttagacacaatagctacttgataattgtaccgttcagaataatttaggtactcgaaaataccttcatgtattgcttctactacagatgtgttcgctgaaacctcttcaatacaatttgttttctcgacaacagaagcagggctgaagaatgcaaagcttggcattgacagaataggtgaagaaacatcagtaccaataccaatggattcaccacagctgcgaaacgaaaaaccaccagatgctaagcaaggagttgacggttccactaggaatgaagaaaaagatgatctgcatgtgaatgcaggtgaatgagtgtcgtcagaattaattagtgatccattgccaaaactggggtcttgatttctcgacatgaatggagaagaaaatgagcagccaccctcatcccacgctccacaactttgatttgcacattgacttggttgttgaggctttgattcattagtagtcatccatgaatgatctacaaaagggcaaagtcaaattcaatgaaaagacaaatgggaaactttaggaagtatatcttctttttggttcctaaacaatgcaagacatagattgctaattaaaaatttgaaaagggtaagactaaaacatgaaaaaaggagtacatctaactgatatcaaagcaaaaaaaaaaaaacgactattaagttccgtattaaatattataaccccggcctaatcaattgacatattattttgatgcttcaaccaggattcactttgttcctatcaaataaataaaaaggtaaaaaaaaaaaaaggatcctcttagtaaattgactgacgatgaactactatccaattaggtccaacaattccataaaaagtttgattttagcttttaaatgaagtaacaacagatctatcattccaactttaatcacaaatgtgagatgcttttcaataagtagtgtatttgttccacctacctaaaacctgctgagcactaagcctttgacaaggatctgtacaaagcattctcttaatcaaatctgtagctgactctgaaatatgatcccaaggattagatgggaacctaagatcagcgaccctgacggcatcaaaaatccgtgacttagtttttccccaaaatggagggatgccactgagaagaatgtaaaggattacaccggcactccaaacatctgcagcccggttatagcccccagcaagtacctctggagctatataaaatggactcccaactaacccatgtaaattctgtcctgtttcagcaaaaataaatagcataaataaatcgaattcctaagaaagtatcagagaaaacagcaagagaattaagttagatcaagaaattaccaggcttgatatacgttgcaagtccaaaatctgccaatttaattggagatgatgatgctttcgtggccaggaggatgttctcaggcttcaaatctctatgaacaaccccattttcatgacaatataaaaccacctgcatgagatgcctgaagagaacccttgtttcacactcggagaatctcccatgcttctctaacttgtggaaaagctcccctccagcacaaagctccataaccaaatgaacatagtcttcctcttcgtaaacagcctttagatctacaacatttgggtgcccagatagccttgtcataatctcaatttcaagcttgacgctcctcacatcatctgaggtcaccagtctatctttagcaattgatttgcaggctaaagcttcccctgttgacttatcagtacatgccctgataacaccaaactgcccccaacccaattccacaccaagtgtgtactgatctttcagatttgagttctgatttgcctccaaaattgttgtgtttaagtttgcaactttgtaagagttgccgagccatgttgatgatgatggttcactgctgctgttgctaagagcaacagccataccaaaattctctcgaaacaaacacgaatgagaatctcagcctcctctcctctagctttctagtatcaagattctcttcagctttttaaaaaggcagcccaactcccccaatcaaacagaaaagctgaaatttctgtcagttaatagattgctccctttttgcttatatacgcattaaaatagaccatacgtaattcaggataaaaagatacatgcttcttccacggttgttaaagttgacaatgacagtgaacgtgaagaataaggtaccacgtatctggacaacgttatactatatcacaaaccttacaaagaacgaggcaaaaccattggctgggatatcacatggatctgcaaaaagaatgttaaaaagaaaaatttagtctcacgcatacaataagagaacagagaaagaaagaaggtttatacttcagattgaattaagccatcaagtaaacgagacatcactgcatcaaaccttgttattctataatttaaaaagttcatattttttttcccattacttttggaaaattttcatatatattttttttttttttggcattttatgggatgtcgacatcgttcggcttaggcttagaaaacagaactcgaactagattctctcacgcaaaacacataactcattaacagaagaatcttaagattcactcaaagaaaactaaccttaagtatctaaaacaacccacaatctactcaaagcaactcgccactaatcatgaactaagaacactaaattgacagtaaaaaaaagaagaaaaaacagctaaaccaaattgacccattaaaattaagcaataaatagacagacccagatccaaaattttccatttttaccatagggatgaaatacttgaactcacaagcgcgctaatgcatatgtatgtttgtaagtatagacatataattacaacacaaaaaaaaaaaaaaaaaaggagggcaggcaaggacctgatcttagagagaaaaggaaagagagaaaggaaggaagcagtccgttggagcagtagttgagttgtccaagacagagctcctcctgtctcgtgggctctctttggcttcgtctcctcctcctttagtagttcgctaaagtaaaagaaactaataactctccccttcttttttcttttttgaaatggccacacaaacaacgaagatctcgttacattgtcgaaacattggattatagcaggcttagtctagtagaagccccaaaccatgggcctctcgaaatgggccagtccagtctatatttgaatgggcttggcccaatttctcaacatcgcacgtgggcgaaaaggacacggttgcgtacatggtaaagtacaacgatagcacagaagaacacaaatcggcttagagagtcaggccacgcagtgtcagggcaaaacagtgatttcaacttcttcagctaccgacgattcgtctcggtgacgaggctcgaaattttgtatagtaacatcactctctcctttctccagtttccacttcccttctcccactcatataattacttttttggcaccgtaattgaaattagggcttttgaattcaattctttcccaataaaataatcagaaccgaattacatattaggggttctgttctctcaaattttgcgcatcagatttgagtggtcgtttggattgaatcaattccaaatcttggcggaagttttaggttttgtgggagaagttggattggattggatcagagttaaagaaaagctaatggatgtggacggagggggaaacaagcgcgtctttcataggctgaccggtccctccactgactcgaagaaccaaaaggtctgttaccattggagagcgggcaagtgcaatcgcttcccctgcccctttcttcacagagaattacatcccccggcggtgcaccctcctaatggaacggcgccgtcttcttcgaaacgccgccacgcctttgccgcctccgccgaagatcattcgggtccccgccgcgtcccgcataataacacttggggtagagtccatggcggcaacgccggtggcaataaatttgtccgtaagacggacaaggtttgtaattattggattcaagggaactgtacgtatggtgataagtgcaagtttttgcattcgtggactatgggggatggcttctcattgttgacgcagctggaggggcatcagaatgtgagttcgatggattatggttgtcatttattgaattaatttaacttatttgataacaactaactgttgcttatctaaaattgtttgtatttttgtgttgtgagatttatggtattgtttatgagtaggttgtcactggaattgctctgccatctgggtctgataagctttatactggtagcaaagatgagacagtgcggatatgggattgccagtctggacaggtatttgttctttccttcttttcttctttttttactttcaaataataatagtaaatataacttctccctcacttctttggcttcagctgtcagggaatatgataaataatgctttatattaacgttccatagcttgcttgtgattttattcatggtgatgattgggaatgctccttcacttttcaacatcttcttgagttcaacttttgatgagattttgccaatttcccagcttaataaagctataaaaagagcacccacaacttgcagttttggtttgacatttaagttagtggaagtaattgaaggaatacttggtttgtaaagtaattttaagtcgctgttgcttctttcagctatatggttctgattcaacaataatgtgatggctggtaatattaatttgacaccttttttctgcttatgttgggtggatcacgtcttgatacatgaatttacatgcccaactcatgtaaatcttatttccaaaaccaaatgaagtattgctgtttgtatttctcgaataactttttttaattattattgtttactcttaacattttctgatattgttttaaacaaccagataagcagtagcatttttatttgcttgagatgactttctctcaaatttcagaacactagctgtgttagaatttagttactcattattttctttgtcgtggagtcgagagcagtctgatttactatctgcagtttttgtctatgggtatacggtatgtccctaaaaagttattttattattacagtgcgccgctgttattcaacttggctgtgaagtgggctgtatgatcagtgaaggtccttggatttttgttggtatgctgaacatggtgaaggtaatgcagaggttttgtctatcctctacttgttgtctctgcttgtgttagcagtaacaatggaataaaattcttatacacaagacttgtgatgatgataatacaggcatggaatacccaaactaacacagaatcgagtcttactgggcctgtggggcaagtgtattcccttgttgtgggtaatgagttgctctttgctggtacacaggtaattatttttctatgacaagtttgctttactttggattatgaaattttgaactattctcttaaaaagtttggatcttcgatgaatgtattccttctcttactttctatctttttgtgcatatctgatagacatattataagttagaatttcctttgccgcaggatggatctatacttgtgtggaaatttaatgtatctaccaattgttttgaaccactcacatcactcaaaggtcactcacttccagttgtttcattagtagttggggctaacaggctctactcgggttccatggaccattccataaaggtaggttagttatagtattattattctgtttcatctatcatttgaattcggttgttactgcatatatttatatgtttatttgcatttgcatatttttcaggtttggagccttgaaacattgcagtgtttacagacactgacagaccatagtgccgtggttatgtctgttctttgctgggatcagtttcttctatcatgttccttagaccaaacaataaaggtctgtcatcacttctatagcatatacatgtctttaagtaccgattatgtcacaatattgatgtttatagtttgaatgcattcgtcacttattttttttcactagttttttccatccttttggcaggtgtgggtttctacacaaaatggaggcttggaagtaacatatactcacaatgaagagcatgtaagttattatttgtttggtgctgttataaattttagcctggtcatctatgctgtagtttatatatatagataggtctatgaggtccaaaatagccttttgttgtttattaaggcaaatttgagagtatgtatacaactgtgaccgagtttgtcagggtatgctgttaaaacggacggcatcattgttgaaaaatatggattttctgggtgatatttgcagacagtcaacgcagtatctaggtttgagagatctatcacacacgtgtaactttagttctgtaaattgttgcagggtgttcttgctctctgtggtatgcatgattcagaaggaaaaccggtgttgctaagttcttgcaatgacaactctgttcgcctctatgatctgccatcgtgagtcaatgatttagtacatgccagtttcatttacaaaatttcaaatatgaagggaatatgtcaaatactattcttgtctatagaaacattttagccacagaagttagaccctcggttaggaaaacattagtaatgttgctttacttctatggttggaaatcaaaatattagccggatcattaattgccctaaattaattttcatgtacatctcattcttgtctcaggtttaccgagaggggaaaatttttctcgaaacaagaggtacgatcaattcaggtaggccctggtggcctatttttcaccggagatggaacgggtcaagtgagagtatggaacatggtagctgaaacagcttccactgcctaatagaacacattataatgggtggacactatgtatcttgattaattgttgatcttctttttcccgcacctttcataggaccaccgtttgtaacatttaggttggagaaggaataatattttttttcttcccctggtttgggattgaattgagagttgagttcttgggttttggagaggtagaatttagtgctatcaacttacttgtgttggaaaatgttgtcatagagaatgtttttgtcccacttcgagaagttgtaatcttcttaaaaatagagcttatttatagccttattgtattttaactgttcactgcagagatttgttcgtaagagagtgagctaatctcatctgattatgaaatcactccatgaattctcggcctgattaaataaaacagaatggaaaaaaaaaaaaaaaaaagcagaattcatacatgtttccatcgagactccatttcttcattttacttctccgtgactgcatgtaacaccattttattttgcatataaaaccattttattttaccttgtgggctataatttatatttataaaataggttatttttaaaaatatgggaaaaattattaaggttataataaatatgacataaaaagtaaatgccactaaatatgttgttatctaaccaatcaaattaaaaatatagtttttttaaagagaatctgaatttaagattcatataaaaaataaaaacttaattgaattactataaaaaatattaaaattctacatatttattttttaaaaacataaaacaaatgaaactacaataattgccggagttgtcactcgtgccggaaaagtcataagagtttgatgtcggcactggaaaagtcatcggagtagctgtcgatgccggaaaagttatcggagttgacgtcggcgatgaaaaagtcatcaaaattagcattgtcgccggaaaaatcactaaaaaactggtttcttgatgaagaaaccagttcttggtgatttttccggtaattttaccagcgacaatgccaattacgacaactatttcgaagtttgctgtcggtgctgaaaaagttgtcagagtagctgcagatgtcggaaaagtcgccggagttactaccggcgttaaaaaagtcggcagaattggcattgtcgccagcaaaatcatcgaaaaaataaccaagaaagtggtttcttcatcaaagaactaggtttgtcacacaacaataataaagattatgaaaacaaaacaaaaatgatatacaatataaataattgaaaccagtttcatcaatcaaccaa

SEQ ID NO: 14220 - DNA, 4485 bp, Cannabis sativa
tagtaagataggttgggaaaaactccataacttctgtgccaaaggaatttaaggattctcccctttccataatttctcctgaatggaattatgacatttattctttgcttagttcttttggttatttttactatagtttcctataggaggatgtcttatcctcctctttgtaatgcctgcttcaatcaattattcttattttctcaggtggaggatttaacatttcccctctaaaaccacgaaatgggagacccagaacacaggttcaacatcttatgcagattgatctgaaaggatggggtgtgggttatgtatcatcatttcagcagcattgtcttcttcagatgttaaatagtgtagctggtgacctccttatttttttttttcaattcttattaaggtttttatgttctagctggtaactattcccttcttttgtttcatttttaatgtttctactccttttttcttttttctaaaaaaaaaactattaccagtagttctcaagcactttcagaagggaaatttttagaacagagtgatgaaatttcaaatttatttagtatagaagattgttttggaactttgcttaattgcgagggctaacaagttaatcaacaacgagtgtatttctgatatcttagattctttcacatagcttggtcaaccaacaattgttaaatggtactatcataatttttaaaataaaaaaaaataaaaaaattcagaaggataaacttatttatttattttttttgaaagcagaaggataaccttatagtttcaaagaatgggggaaactatctggattctccctgtaaaagaatttctatgtttcctattttattttgtttgttttattgatttgctttcttagaatggcagcaattcttcttaccaaaattacatttcatgacaggactacgagagtggtttgcccaatctgatgaaaggaatgctcctcccagaattcctgttatggtcaatatggcttcagcttctgtttcgtcccataagaatcagaagctgcatgagccttctgttcatttcgacagttctgcaaaccgaaattcagtgatgattgatgaatactctgatgaggatgaggaatttcaaattgctgaggctgagcaagaggtttaattcatacttctgaaaaatgccaatttttttacacagtattaatgatttcatctttgtgtgatttgttgtacaggcatatcgaaatggacaagaaaatgaaatgaagaaaataggtaaactctgcagtgcatgttttgttgtgttacatgtgtactagatatagagtaacaataattttcatggcatgaaattgtagaagaagaaccaaccgtacaaattgatttatcatgtttttcgggtaatttacggcatgatgaccgtgataatgctcgtgattgctggaaaatttctgaggggaacaacttcagagtccgcagcaaacatttttgttatgacaaatcaaaggtacagttctctcccttcatagttcatttatagatttgtcaattattttgtgtaagtaagacctttaattctttctcttgattaatcactccatatgcaacatatacttgaagattcctgctggtaaacatctaatggatctggttgccgttgattggtttaaagatactaaaagaatggaccatgtagcaaggcgtcaaggatgtgcagcgcaagtacgtataataagcaacttcatttttgctccagggatcatttctgctttattttcatacatagtggtcctctctagacagtatattgttttgtgtcttgctcacttcgtgcttagttcttccagttccacgatgatattgatatataacttctttgatgtgttaatatttaacttctagtcctaatgtaatgcgataagatcgtgtttgctagaaatgctaagggaacaccaaatatttctttgctaatgcacattttatttgtgacccttttccttacaaaattcatctctcttttctagaacaaaatattatttataatgtgcatttattattttgtcccatttcttaataaattaatctctttactatatgcaagttattttgatgttattgtaactcttcatgtagtgttgtgatattttgtgaatctgtttgtataggttgcgtcagagaaagggcttttttcctttattgtaaatctgcaagtaagttgtattcttcatcttgtatcccttgtcttgtactgttgtaattctcgtttatgggaatatttcctgtttctcatcatgaatccaaaataaatgggagtatataaatgaaatgttgctactcctgcaggtacctggatcaacccattacagtatggtcttttattttgtaactaaggaattagtacccggttccctcttgcaacgttttgttgatggtgacgatgacttccgcaatagtaggctgaagctcatcccatcagtacccaaggtattgtttctgaagcaatttgattttgataaaacttagtcatgtttagtaacattttttctggttaaatactctattgatgggagagcttcaactggcactgggagaaattttttacaaacccaaaattcaatattttcagtaattttttatgtaaagactttttaaccatattgtaggcattaatgtgttggcttatgagtaggaggttatgtgatttgcattatattgatttgttttttttttaaataaaatcctgcagggttcgtggattgttcggcagagtgttggtagcaccccatgtttattaggaaaagcagttgattgcaactatattcgcggtcccaagtacttagaggtcaaaaccacttgcatttctcaaatttatataggcttataaattgatgctcccaaattatcattatattctcagatctgattctagacaagttcttgacaatattatacttgttcatgtttgactgatgaagatatatatttgtagattgatgttgacataggttcttcaactgttgctaatggggttctagggctggttgttggagtgattacgacattggtggttgacatggctttccttgtacaggtatggatgtttcatacgagtttataatagttgtattcaatgtttctagacttgcattgtgttagcacagaattgaaaggctactaatagcaaagtacaaagtctaatatattaagagcgctgatgttccttctataaatgtagaccaaaagtggtaatgttggagagtatttgtgggggttttattcactatggtttattcatttctagagtttattctttttccattcactatggtttgatgacaataacgtcaattttttttaaaaagatgagatgagactaggaaaaggattaagacaagctttttccagcaaacatggaaaaatgatgaattaccttatttttgtttcaagtttattggcatacatgccaatgaaatgttttgcaaattagcaaaaatgtctgaatttaatcagcagtagtttaagattggccttttcccatttagccatgttggtggaggtatttgtgcataatagtacagatgaattgcctggttaatgttttcttattctttgcaggcaaatagtacagatgagttgcctgagcggctaattggtgccgtacgtgtttcacatatagagcttaaatcagcaatagtcccgaagctggagccagatccgtcatgactaaccaagaacacttcacattactgattccatacaaaatcatttgtttagattgggatgcatgcatgtggtgcatcctgtttcatgcattgctatatgtcaatatagagcaatgaatatcatcagttctttctgggatttttgcgcaaaatagtgttaaagtgttcatactgttgttaataagtttacgtacttaattttgttcatattattctttcccttcaatttgaaatatcttcattagagccccttctatacttgacacatatgggcaaaaatgagtttaggtgttaccaagtattctaggtgatagagaactggcttcctctgcttgaggagaactcatgctttatcgtgttcaagttttggaatggtgatgccatactcttggaatgttaaaactttcttttataaagcattacacgatggaatattcattttttatatatacataataagtaactcccttgatggcatattttgttcgtcatttgacattttttttcttctaaattccaactaattatattctttataactgtggagcatatgaacaagatactcaagcataaaaacactagggaacgaagagacaacgtgagtgagacaatgtcaaaagtaaagtagatttcgccaacctaaagcctgtggggaattgttttttgtgaaccaagccctgttattcaaactgacttggagtttggcattaaaagtgaaaaaaaaagacaaattttgggcgaaagctttttagataaccttttctagagtgagggaaattaag

SEQ ID NO: 14221 - DNA, 2833 bp, Cannabis sativa
gggtgctatgtggtgcaagtaaggacaagaaaaagttagagctgccatgaggtgactgtcttctccagcaatgtacatattgaccccaccgccctgtgtgctgagttgtcaaaagttgttttggactggctgtatctgttgtattttgaattgtgttttgaattgcttttgtctattgtcttttgggtaaaacgttttataacagggatccttaaaatacgctttttatgctgttataatatccgctttcaattttttattttaataagtttttaatattatcacaatttttaataattaattaatctgttggtattaaaatagtttataaaatcacatatatagcgtgtctataaaataagagcgttacatacagcaacattataaaaaattgttatatatttgtggtcattgacgtacctatacatattatatttattcaaaaaaatgtattgcctgcactgtcaatatcagatatagatcgtaatatattttaaagttttctatttagtctttatatgtggatggatggaaattaaatcaaattaaatattagtgcattcctttttccatttgtggcttattttgttggagctgaaaaacttgtcggtttctcattgtatatgtataaaacaaagaagatccttacatctctctacaagtatattgaccccttgggtgtataattcaagttctagagtgatcccttcagttcaaacacgtgctaacataaactgactgaacattgctacgtacaatttatttatttactttatattggtggacaggagatttaaatttttggaccaccttttatgaggagatggagaggtgtgaacagtggcatattttggtgggggcaaaaaattgttctttgtttttttcttatgaagatgattaatgaaattttattgagaaaactataaatttgtggaaataaaaataaaaattatgagagaacaaaataaaaacataaattttgtagaatataaataaaaatatgtgaaataaaaataaaaaatatatattttatccggatataaaaaaatatataaggatataaatacaaaaatattattatttatggaatcaaaatataaaatatttaaaaataaaaaaaaaaattcatttacactctacaaagttccaagtatacttcaatttaaaaaaatttacttttaattaacttttaaaaatcacttttaatattttttttaagaaaaaaatcacattctttttttcttattatcaatagttattttaactttatttttatatttttcaaaaaatcatttataatttctttttatatttttcaaataaattaatataatatgttactttatttgttgtcttaatatttaaaaactatttaatttttattttataaatgtttttttgaatatgagaaggagaaaaaattaaaaaactagtataaatgaaaatatatatttaatataaaataaaaattattaaaatatagtgtgcataaataacttgtataggtacaaataaaactcccttttaaaatttaaaaatattggtagtaaaccacctaaactttatgttttgtaacacataactatataaatctaaatttttctcgcaaaacataacctccattctgttttgcgttttactactatatctagaaaccgcagttaaatgtcatagtggaacatgccacattatacacttacgtacatgtggcatattttttgtgacttacgtaatattaactatttaaatataataaaaaaataattaaaattacaaaattaattttaaaatataaaatatttaaattggaagttataatttttttttcttttttttttccttttttttttcgttttctttgtttctggcacttcttcatcatcatcttcttcctcttctaagaccttcttcttcttctgccaaagtgccctttctcataacgctccccgaaatcaaaaccaaatcagcagtgtaatgccctaatctatagggatgacacttgtgtgtatttatgaactaatttatgataataaactattagtttaggtaaaaggtgattcaataaaattgtactaagtaatctaaataatgaataaatcatggcatagccaatttttttttttttttcttacgattgggagtcccctatataaaatattacaagacatgtcattacagtattatcgtaaaatacgttaaaagttcagaacatttgaaatacaattcttgacaactcagcaccacttgccgaataagctgatatatgcacttgctggagaaattttttgactcatggttgtccaaacgtctctacctattacttccaccacatagcactcgtgagtcacaaagactcaacaaaaaaaaagtaataacaataatcatataactcactacacaataccaggaagctaaactcacctcatcaaacttaaataatcatacattactcatatatttaaatttgggtcaatacaaacataataaaagttaatataaagatatagaatatacacaattaccaatctagtgataataattatagttgttactttataatgtaaccattctcaatatttctctagcaaagtaattctattgtctcaccatgcatactaatgcacttaccgttgttcaataaaatcatcatcatatctaaaactaataatcacaattaagtttccgaacagataaagcactcacgaatccaaatccaccctaactccaacggccacagttggttgttcctatatggaaggccaccatagaaacgagatcccccaagaaacttaaaaaaccccaactcttggattaaaaatcctatgtgggcaca

SEQ ID NO: 14222 - DNA, 4803 bp, Cannabis sativa
tttttttttttctcgtgttatgctgtcaaaatcatcgccatgttagcctatacctagggtattttcactgccctctttcctttttttttcatcataaccttttccaaaaccgaatgtgttgttcttccacctcttatttcttggtttcgaatatcaaatccaggtttcttctcccttttctctacgtaatttcagaaccttaatcgcatttactatttttttttgggtacccttttgcttggttggaaatactttgatttttggcggaattagttgcttattagattttggggttgtagtatttcatttgggtgcttactgatttcgtagaataccttcaattttcatagattagtatctagggtttggttgattcttaggaattgtatcacgttgttgattcttttgttgtgtagtgccttcgaattgtgttgggtaggactcgaaattgggcgcagagagaagtttcagtttggattgctgtttggtttgaattctttatttatattttctttctcaaatttgattctcacaatggacgacggtgaggttgacttttcgaaccaagaagtgttttctagtccaaatatggctggcgagcttcccagcagttgctcgatggacagtttctttgatgagcttctgaaagactctcatgcttgtactcacacccacacttgcaacccacccggtcctgattactctcatacccacacttgttttcatgtccatacaaaaattgtgcctgctgcaactgaaggcaacaacactgcaacagatgattctgcagattctgtaggaaagaactcgaaaaaacgccctttgggaaaccgggaagcagtgcgcaaataccgtgagaagaagaaggcaagagcagcatctttggaggatgaagttgtaagattgagaactcttaatcagcagttggtcaaaagattgcaaggtcaagctgctttggaggctgaggttgcaaggctcaagtgtttacttgtggatattcgtggaagaattgaaggggaaattggatcttttccgtatcagaaatctgtgaatcacaccattccaaacccaaccatgcctggttcttacatggtgaacccctgtaatgtacaatgtaacgatcaggtgtattgtcttcatcctggggtggatgacaaatgtgacgatgactccttgaatgaccaaggtataaatgcttgcgaatttgagagtctccaatgtttggcaaatcagaactcagcttccatggacctttctggttgtggagttggcaatgtgagtgtatcagctcgtgctaaatcttctgcctcaaacaagaggaaaggtaaaaccttgaatggccttttctgtattaaattatttggattattggcgatttacacttctagtttgatgtttattgccgattctctttgtatggttgaatctttaattatggtctgaactacaatctaagcaggaaaaaatacaggcactcttattgcaaattatttaattttgatgttattggtccagcaatgtaaaaatgcttcttttcagattgtcatatctagaaggacacagtataattacatgtctatcatagttcaagtgaactttatcagaggcttgtgcttatccgatatgagtcttatattgtttgttagtttgctattatctttcacgcataggaatgtatatccaaatgtatagtttcttcagttcgatagattctaacatattgacctaatcaaaatgcattgttgggtcctttcagtaatgcagaagcttgctcatggttttgtgcttctatttgttctccttgctaatctttcttgctgataatgggtacctttgacaatgctttttcttgtaagcctatagttgagactgattattttgtattgttttactaggaggggcccatgcagcaactgcaagttgaaatggctgataaggcaacgtgaagctgtgttaactgttagagatacatattctattctaataagtagttggcgaactgcagcatcggccggtcctcgctcaggtcctttgtatttttttgctctgtatttatttttccccttgttctagttttaaacccatttttgggtactttgacctaaaatgatttctgataccaagctgaagtttcactggatttgtatgttacttggttgttcggtctgtttatgaactcaagctatgcatgtattgtagagctagaagcttagtggagaatgtgtagtcaatatttttggaaccttggcagtgacccagtttatggtattcacaaagctcaaagctttttgagtctcaacctgcatattctcttgaactacacacaaactaccatgctttgattttgatattattacattgctgatcttcgttttaagtttcacatgtatgtgatatttttcttctttttttctttccctttccttagttatacttgaatttctaagccattaaactcttgtttgcatcacagaacataggaagttgggatgtctttcatgtttcattctatgagctgtgtgaacaaggtgagtcacaaactcccgtaatgagattcgtatttgtgattttgtgaagggactagaatttagaatattttttgcttctgctttaccatttttttccttctaatggaagaattagccaaacaattcgtctcagtgacattgtaagactgaggaggaattgatgaattgccattgctatcttgactgatgagtacaattgagacctctagcatggcctattaggcggacaacaaagatggatggagtggtagcgtccaaaagatatttatctcatgaaagatgaacttgttaaatacaacatgatttcatttcggactcggatctttaagtttttggagctctaatgcgtccgttacttgtggtaatttcatactcactagtcactattaccacacaatacaaacataaagctaagaaagtgaagtatcaaaaataaaaagtcagggtattcctaagtaaatcttcttattatagtttgtactctttaagcacacatttgcgctaaagaggagctggtattacaacaccatgatttgtaaagattacagcaaagaccaattgttgcgtttgaagatgctttgcaagttagattaagtgagattatctctatatatcttggttttcacgtttaaagcagattgagcgattttccggacctgaagagcatggtcctctcctctccctaccacactaaagattaacatgtttgtatgaccaacatgacaaaacatcagttctgatttatcgttctttaacataagcctttacacgccgaaacgtgttgttggtcccaaagaatcactgtactgttccatctaaactagcaaagccaaatatatcttcattgttgagattggattccggaccactcactttcgcatattggtaaaaagttttaaagtttggttctcatgatctagcatctaagcaccattaaaactttatccatattataataatattaaatattataataatatttaattaaatatacatttaaaaaataaaataatattaataattaaaaaaaattaatttgaattattattatttctaaagaaagttactttacattgtttttatataggtatttattttttttttttgaaagtaaagacccagaagttacaaagggaaagggtaggggtcttggctattccaacaccatgtgttatctaaccctgtagacatttgtgccaaattatgagctgctgtattcccttgccgtcgagtatggtgaagggttacagtagggagcgaagataacatccgtcgaatagcattgattatggttccatagcttgaaagattatcatcagttgattgtaaatccgtgagtaggtttttgcagtccacttctatatgatcaatgttaagtccattgtcacgactccatttaaggccttcccacaaaacccagccttctgctgctttaggttgcatctgtcccacgcgactgaaagctgttgctgcaattacttttccagtgtggtcacgaacgataaccccacctcctgttttattctggtggctagacactgcagcatcaacattgagtttgagggttcccactgggggtggtttccatgccaagttgtttaggtctgtggtagattggggctgtgtcatccgcttgtcttgagctgcttgataaaagtccaagtaatcctgggcttcttgttcaatgcgcattggatttgagtcttggttcctaaaaacagctgcatttcttgcattccaacacttccataacatacaaagaaagaggttaaaggcacctgctgaaaaattaagctgcatgtataaaatgatatctaacatgttcaagtgtttggtatcctttatggcagagttaaaaaaacgtacctgaccaagccttcttcatattcttgcactcaaacaaagcatgttgtaccgactcataacagagatgacatctaggacaaataggagagctaagacagtgcctatgataaagattttcagcagtaggaatggagttctgagcaagcctaaaactaaaatgcctaatcttagggggtattggaagacttcagagggatttccaccaacgggtaagggttcccatgtctgaagaggaaggttgtgtcaagtttatggatcgttttgcaacatggtagccggtcttaacagaatagtggcctgaaggggtggcacatcattactgcctatagcaaaagccagagtcgaagggatatcagcaatgtgggccacaggaagggaatccagttgggctgtggagggggaaatcatc

SEQ ID NO: 14223 - DNA, 7746 bp, Cannabis sativa
  modified_base (7098)..(7104): a, c, t, g, unknown or other
  modified_base (7696)..(7721): a, c, t, g, unknown or other
gagttttccaatgacaataaacaaaccaaacacttgaatgatctttctttaggaatagcaattccattcctacactcattcatgtaaaccaaacactagttcatcgacctcacgagtctgatttggctctatgtcccagagttgcctccaaagcggactcatgaatattgtatcttcttgaaaggagtcgagccaatctcagtttgcccttatcgttatgctcaaactcaaaaaaatgagaaagaaaaattggtgtaggatatgcttaaatccagcatcagtgtaccaagcaccagcccattttcaagcccagtttaattggtttgaaagaaagacggtagctggcagttttgcgttgactaccgggccttgaatagagagactgtagctgaaaaattttccattccgattattgatgagctcttggctgagctccatggagcaaaagtattttcgaagttagacctcaagtccggttaccaccagatacgaatgatagcaaaggacgtagagaagaccgctttccacactcatgaaggccattacaagttcttggtgatgttgtttggtcttactaacgccccaaccactttccaagtattaatgaacaccattttttgagaactccttcgtcatacggtgttggttttttttgacagtgatgccccaacccagttatggacacgcatgttgagcatttggaggaagtgttctgccgcctccaacaacaccagctatatgccaacaggaagaaatgtgtgtttggaagtgacaacgtggaatatttgggacatgttgtgtctgctaaaggtgttttagccgattcaaaaaaagtggcagccatgactcaatggccaattccaaaaacaatcaaagaattacggggttttcttaggttaacagggtactatcggaagtttgtgcggaattatggtatcgtttctcgttccttaacgaaccagctcaaaaaggatgctttcggttggactttggtagcccaacaagctttcaaccaactaaaagaggctatgtgctccgtcccagtcttggttttagctgactttttttcattttcaaaacaaatgcttcaggagttggtttgggggctgtcctaatgcaaaacaagtgcccaattgcttatttcagccaagctttgtcgccttgaactcaagctaagtcggtttatgagtgggagttgatggctattattttggccatacagaaatggtgcccttacttattgggtcgtctgtgtatagtcataacggaccagcgaagtctttaatatttgttggagcaaaggctagtggtggatgaacatcaaaaatagctaaccaaattgttgggctacaactttgagattgagtatcgacctggaattgagaacaaggcatttgatgcactcttacgcattcatcttaacacttctctagttgctctatcgatgcctattgtggtttcaatcccgaacttacaagctcatgtacaagcggacctgatgttgtccaaggttttaagtgagctgaccaagggacaggataggggcaaatatactttagtacttgggatattccattttcaaggacgattggtactaccatcctcctcacctttcattctagttctcttacaagagtatcatagcggctcagttgggggacattctgagtgttcaaaaaaccttccaataggtggttgctgatctgtactggccaggtatgaggaaggatgttcaaaagtatatcgctgaatgtgttatttgccaacaaaataagtatccgctggtgtattgaatcctctacctatcctagagcaagtttgggaagatatttctatggatttcattgaaggactgtctatgtcccacaggtttgattttattttggtggttgtggaccgctttttactaagtatggtcatttcatacccttaaggcatccttattcagccactaccatggctgaggtgtttgtacatgaagtggttaaacaacacgatttccctcactcaatcgtgtcggaccgtgacaagatcttcttgagtttgttttggaaagagtttgtctgttttcaaggcactcatttgaagtacaataccgcctatcatcctcaatcggaaggtcaaacggaagtggctaattgttgtttggaaatatatctcgctgttttgttggagtaaagcctaccaagtgggttaagtggctgatttgggcagagtattggtacaatacgtcccatcatgtttcagccagcatgccaccattcaaagctctctgcaatcgagattccccaacacttattcactttgaaccagccagcacaaaagtgtcgggagtggagcagcaactccaagctcgggatgccaccctagtgttgctgaaagaaaatctccaacgcgctcagtagaaaatgaaatctcacgtggacaagaagcgttgagatgtgcaatttgaggttggtgatttggtctatgtcaaactcaggccatatcgtcaacgcacggtggctaagcgcctggatgagaagctagcccctcgcttttttggtcctttcccagtggtagaacgcatcgcaccagcgacctatcacttacagtttcctcctgagcaaccattcattcggtgttccatgtgtctctccttcaagcagccttaggccctcatcaacaactaacaatccttcctccaggtcatcaacaactaacaatccttcctccaggtcataccactgacttggaatggctgcttgaaccagaagaagtgttggacatccgtccaagcacgcatctgtcggctcctcaagctcgtatcaagtgggtcaacttattgtgcatttgaagctacttgggaagattttatggtcatccaagaccaatttccatattttcaccataaggacaaggtgagacttgtaggtgggtattgataaacctcctctcacatatgtttatcccggaaggtttaggaaagaggcaatgggcaacgttgttggggattaatgttgagctagcaagttagttgtttggagggttttgctagtgtatgaggggtttagtcttgcacgggtctgtgagaagaaaagccaataggttagttatttgcgggtgtgaagaatttgattattttgtaacctttttgggagagaaccaaactctcaaaatcctgagtattcaatacaaaggcactgcttccattttcatccatcttcatcttcttctttctccattgtaacagttattaagttgaattgaggaggtcagttctatcaggatgtttggtgtaaaggttttagttgctggagtttagttgagagagtttgacattaagagaatctaaactcgagtgtttaaagagtttgagattaacccaaaataatcttaaaaataagactcctacaaacatatgtcttctattaaaattatcccaaacttaggtttgtttttacatttccattcccaagaacccaaactcccataacaaaacaccccttcattattttttgatttttcatgttaaaaagggaattaagaagttgtgaaatgttgtaatcatggcaatattgtggtgatcctgtgcctggaaaggaataatatcaaaacttgaaaagattttgaagagaattaagagtctttaggggatggagtcaactattgggtggctagatggatgtatattaaagattttatcttttcgaaattaatcaaaaattggtctacgtggttgttattctaaaagatgataatctactttcttttgtaacatttgtacttttgtttaatctcaatactatcacatttcatacaaaaatgttactaaatcatgttgggataactggttcataatttgcatacttccagcaagaaacatttcttgcaagtgcgaaagaccactttaatttggatatttttttattgtctgctttaattccttcccctgacatttttatttgttgacatgcatatagcaatccctactattctttcaatctctagaaataatggtttactgagataaccttaattgaactgacattaaagaaactatgtatgattatacttacccaattcaaggattgatctttagagtttaagaaataaccaaaaaaaaaaaaacagcaaaaaaaatatagatcctagtatatctcaatcagtcatatacacaccaaaaataaagaatttactagagaaaaataaaacttacaggaacttggaaatgataccatgatcaacaaccccatcaattttatcaaggctctctgcaactttttctgcaatacagttttatagatcaaccaaatcaaatacttcaaatgtactaacatgtgattacaacaggaaaagtcccaccaaaaacttaccaaggcttagtattggagatgtgaaaatgagatcaagaacattatggccttctctagtgataaatgggaagtcacctcctaatggatctgcatgtcctattgatggtctccgccataccttaacttagaagggaaaggaataaagcatatattatgattaatttctgaggtagtaatgtattaaaaattacaaacacaagctagtgcctagaagaacaacgaaactagttcctttgttccattgaggaaagattggctggaatgattgtttctctttcgtctttctaattagaactaatggagacaaacatgttaatcattaggtcaacaaactgtgtgaacaagaacaaatatattcattaggtcaacaaaattatacatgaagtcattcattgtacaaaaattagtgaaaatcgatacaattaagtgcctggaacattttgtagaaagagtgattaacggtgggtgagatgcaattaaaaaatgaaagagatgaaaagtgaaatttgatcaagcatgtaagaagtaagacaaggaatactaaatcaaaccacattcaaggaagaaagaaataaaagagaagggattttcatatgcttgatgtcaacagacctcggcatcacccaaaaacaagtcatcgatttcttcagcaggctccaaccagttgagctgaaatacaagatttaatatctgtcatcattcttaattcaatccataagggagggtcaaaagaatagcttcttacagaatcaaccaaaactggaatggaaccctccaaaccacttttgtactggttctttgagatcatgaacacaagattttcagctgcatttagtatactctgtatatgaataggaaaaaagattcaattaagtacacaaatttaccaagagtaatattgacataccaaataattaggctccttcaaatgaagtacaaattatatttatgacagaatgcatgcttttaatgctataatgttcaaaaaaagcacttcatgctaaccttctcttggacaagggactcatcacgtgaactttgtctccctataatagcaataagtgtgccttcttcaatgacatcagcatcatcaaatgcaaaatcaatctacaaaggagaaaatgtcatattcaacttgagatgatttcgtaaactaatcaaacattctgtacctaaagtaaaatacataactaaacagatgaaacattcaaaaagaagtccagtaacttctcattttctaatggttctttaaatcagattttgtgataaaacaaactgaaacaatttatttaataggtctagaacgccttagctattccaaaaaagttctcaaaagcatcaacttaaaaatgaaatcttttttacactcaaactggtacatacttgagagttatcttggtagtcctttaatggtattccttccttggctgcttcattagcactcacaacagaccttcataaaaatataaataaataaatttagttacataacagtgtataatgtagtactagaagatctcttacaaattttcaagatatttcaaaaaatgtaagatgcaaaaatcaagattcaaccagtttattgcacacgagtaaatatcaaaacaagcacgtgtaaaatatactatttgaattattatttcaacatcctaaattattctgaatttcctacaaatttatacagagtctaatgtaaagaaaatccaaagttacaattcctcaatataataaaatactcaaaatactatataataattaaaaacaatcattacccaacaatgtttctaatattataatcactttcctttcttcacatcacaactctaagaacattcaacactcattgcaaatgagcaattactaggcaaattatgaaaacttgcctagctgaaattcttatataatctttgtatgcaacttttatgaaatttgaaggaatactagaaatgagcattttgaaatcatatattataaaattgttcaaagaaaaaaaaaatcatatattataaaaggaagctttaaaactgtgtgtatatatatatatagggaaaaaaacatggtcagcttataaactcacatgggtactcccacaatatctttgaaagcacctgtacgaagttgctgacccagatactgaatcgccattgtagaggcttgaccggagcccaacccaacgaccatgccacttcttatgtacgtgtccacctacacatccaaaagcttgatgggtttatgtctaaataaatataattttcaaaaaataaaaacatatttggagaatacgaacagtgtggtgagctgcttttagcagaggagaggaatcggtaagacttgaagctgaaatcctgagtggacaatgttttctccttctgaaagtagtagttgaagttgaagctgaccaaagaaggggacttgcagagacggagaccattaatggctgtaatggtgatgatttggtaagtggcatagatgaaagtatgggtatggacgccattcctgttcttgtctcatctcatccaagttatgaggaggtgatcgttttcttcaaatcacaactgcgcctttggctcttgtgggactcacactgacactgatgactggttgagaaagggacccccaaatgctgactagactaaacatgaaaatggcatgtattttttcttttttttttttaagaaagaaccagtatcacaattagattaaacatgaaaattaatgataaaatatattattattattattnnnnnnnttattattattattattaggtaattaggaattttacaatgtactaaattatgcgctctaaatttttttggtcgttaaaatttttttttaaactattgagattgtttgatttaagtacttttgtctaatttcattcaatttgactatttaatgattgtttatgtactaaatcatgctctccaaactttgatatctaccaaattatgtccctcgaattttaacatgtactaaatcatgctccctgaactttcattcatgttagaatttttttactaaaattggacaaaaatccttaaattcaacaatctaaatagttcagagatatttttaacggcattaaaaattcaaggtgcatgatttggtagatataaaaaaaaatcttaattattattattagaaaaaacagtgtcacaactagattatacaatattaattcatcataaattatagcattactcgtcattagtggatgacacacatcattcaagatattaattcatcataatttgttaaaatatttagcattgctcctgaagggtttttaagctaaataatcttcaaaaaaattctatttgttataaaataatataaannnnnnnnnnnnnnnnnnnnnnnnnnaagaagaagatgaagagagaaagag

SEQ ID NO: 14224 - DNA, 8511 bp, Cannabis sativa
  modified_base (2479)..(2485): a, c, t, g, unknown or other
aattttaaataaaaaataaaaatttattaatcaaactttttgtggtcgttgacttgactcttaagaagtcagatacttacaaaatttttaaaaatataataaatattattactgttaaaaattaaattttggtgtcacaaattattctaaaaatatattaaaaaatatataatatccctagttgttatttagtttactcttgcagaaattgtacttgtactttaatttaaccttaaccttatacatatgattttagtgtcttgtaattaattatataagaaataacaataaccaggttacacaccatgcttataataaatatagcctaatttgataaattactttcagaattggtactgttacgggaaggcagtggctgagcaagcggcttgggaaatggcttctgagaaaggaattgacctagttgtgatcaaccctgttttagtgcttggacccttgttacagccaactgttaatgctagcattgttcacatcctcaagtacttaactggttcggctaagacttatgccaactcaatccaggcttacgtccatgttaaggacgttgcgcttgcccacatcttggttttcgagaccccttctgcctccggccgctacctctgcgccgagagcgttcttcaccgtggcgaggtcgttgaaattcttgccaagttcttcccggaatatcctattcctttgaagtaagtaattcataactaaatattaattaatgcgagttttacattttgggtatatttatagattaagtctgtatttagagttcacctaacttagaagtgtcaaaaatacgttaagactaagtgtgatgttagataacacccctgattaatcaatcagggttgtttcgagttgatgtgatatttttatttggtcggtagcttgaaattagccgaccaattaaaaataattgttaagtagaatttaatatatagaaagaatcttttaaattataataataagaagaatagaatcaggcacacacaatcatttaatagaaggtcaactaataagtctactgctttgtgtcattcatggttaaatgttttttatttatatgtttttttgggttagttactctatttatatgttttggtttgaccataatttcactctagtactttttatttgaacttctcatatatattggattacttgagttttaaatatttttaatggttaaatattgtatgttgtgggactctctctccatatatttatatataattatttggtgttgtgaaatgattaggactgtttaacacaatatgatgtgtaatgcttgaataagatgatgagaatgaatctcttcactttccataaaataatattatgtatatatataaatttacgaataatgtttaattagtgttatcttattgacactatcttttaaaagggtttaaaaacactaatggtttttgtttaataagaaaattacaagtattattcttttattatgttgttgatttgacacctaattatgatttgaaaaaaaaaaacaataaataaatggaggttctcccttctcatttttatagtttaatatataaaaattcatgatacttttttactcctaataattataaaataatcaatctaataatccccttcattatattattattttatatattttctcttttttaaaataaagtatataaatgatcatatttgatgccatattagctcatatacatatattttatatttggttatcatattacgcatttgcattaaaaataaattagaagaaaacttgagtaaactgctgactatagtatggtttggccaatgggacgaaacttaagaataaattacatgttaaattttgattggacgaaagatgaggctaatattagttaatgaaagccaaccacatgtaagtatatgggttgcacgtaatcatgatgtgttctatttttatgtaattatttaaataattagtatataatggtcttgcctccaggggtttacatttggtgaacccacttttgactcgtctacctaaaatgatgatgtttatatatatagtatactacacattttttcaatatatataaaagaagaaaaaataatgtatatatataagttgtggagctaagatgatcttcacctacaaccatgtcacactcaatactctctactactctttccttgttcaattatatatctagggatatgattttctcctgttattgtactttcacagattgtaatccgtgatatacgacagccgtcagatgacagagttatttgatctgacggctgagattgatttaagggtaattagagttaaaaagtagaaacgtaccctaacactcatttaatgtactctgagacccatcaaatgtaccacgaaatacattccgtgaaagtacatcacgggacaaaatcatatccctatatatctatcaacatgcatctatatagttatttctttcattattattattattannnnnnntattattattattattttacttaatttagctttaagatgtttggttttgagtatgaaccctccaaagactatttatggttttaataataaaaatttataaaatataagttgatgtatgtaagaggatgctaatttatggttgtggtttattatatatgtgtaggtgttcagatgaagtgaatccaagagcaaaaccttacaagttcacaaatcagaaattgaaagagttgggattggagttcacttcaatcaaacaatgcctatatgaaacagttaagagcttacaagaaaaaggacaccttcctctaccaccaccaccaccttcaccttcttctccaaaacaattagattctattattagaatccaataattaatcttcttaattatcattattactaataggccttctgctctgttctggattattattttactctatctaatccacatatatataaacaaaaactataaatattgttgtttgagatgtttaaagaagcatgataacaatttcataataataatatatgtttgctgtttttgaaacttactatttctattgagatgagaatttaccatatcacccatcaaactcaaaatgcaaataatgtatttttttttttccttattagattataacatgtgaagataaatatatatataaaatattaatgtaggtagcatcacaattttttctttggaaacaaccttcataagattttgaagaaattggattcttcacaattggctggccttttggcttgtagtgataaagtgagaaaaatatattgaaaaagagataagatagtagatgaagacaacaaaataaagttggcaatatggcaacggaattatattattatgttaatattaaaaagaataataaactaaggtttattatataatattgtgaattgattggcaggataacacgccctcttcaaattgttataaaatttcaaaatcttcatttctttctttacaattatttatgataataacatcactaaggaagccagatttaaccatcttcaatgattggaatacaatttatgtcacatttaactaaataaaaaagaatgaattaattttacatttagggtaattttataattgtgcataaatgtataaagtacaaacttataaattcaagggtactataaaatcaaaagtatataaaaaaagattattaaataaataagaattctaaaggattcaaatcaatatgaaccacatttttttaaaaaaaataaaagccttcattcaatacaccataatagttgggataagttaaaaattacctatttttattacacattaactaaatataactttaaaataattttatttgataaatatctcttttataatgaaagtaccaaatataacctcacataacttatcaaaattagagtttttaaatatgacctataaaactgagtataaattaaaaaataataaaatcaaaattaaaatcaaaataagaaataaaaagtgagtatagagtataattttctcataataatagttgtggttaaattatctatatgagcaacaaaattacattgaattacaatttttgaaaataaataaccaacaaaaaaggataaaattcttttacattgattagggtaattatcaatctctcatcaattacaaacaccagtcataaacattagttagtggtaaattacacttaagaacttcaaaatcttaacccccatgataataataattggataaaaccaatatttggtgtaattattaaaaaaaaaaaaaattaatcagtagtaaaaaggtaattacctacaattacttatagaatataatacacaatttttataacattttactgaagatgttctagtgaaagtttatgcatcttcttgtatgctgttctatatcttaataattatattctaacttgattgagaaatgttaggtaaaacattttattatatccttcccaacactcaataatcaatatcaacaactttgatatggtaggttgtttggtgagaggaaaaagataatccaattttcattttccaaagttaacaaaagagtttttggaaaaagaaaaaaaaaaaaagctaatgtagaagtagttatactatttgttataatataatgaaaataaataaataaataaataaactattttaagattacttgcacactagcataattatttttataccagctaacttctgtgttactccattcctataaagtacttttatttaaaaaagatagcctgtaatacacatttcatagaggatagatcactcaactagagtcctcaatcaatgtggctaaagtccttatcatttctcatacttaaaactggctatataaatatatatcattcgagttcttcggctgaccttctttgaggcaactgcatacacactatgtcctctcttggaaggcaatacattgagccattgctctgctcgttggtcgccctttgttgacactcgggacctgttagtgacaaaaggtgtgttacctttttgttcttgcgaaaaactagatatgcaattccagctaagtatactcccaagcctgagaatccaaatattccaagaaaaataacggctgcaagtggtaagtggttgtgaagaagtaagttgatgaaaccggtcatcaaatagtatatgtttatggccataatcaaggagccgatgatccaagtcactactgatatctgcaatatgatttgtattgtataaggacataaaagttatgacattgttacttatttttaaaggtttttagtatgtgtagtaatgagatttaccccaacagagtttacatatattcccatcttggttttgctgcttgtgaatttgagaagtgggacaagagcaaaagggagctcaaatgataaaatcatctgcaaaaataaatgaaaaataaagaacaatatgatatggaatgaaattagttaaacaataatagaatatcttacggatgcaataatgattagccttccagccccagcagagcctccaatgagtgcaactattaaactaggtactatagctaaacaacgggtcaaaaagttgcgaatccacggccttagtcgtaaatcaagaaagccctgaagttttttaagacaaacatgttaccaaagagggaaatgagcaagctttttgtgtatgaataatacaaccttacctgcataacatattggcctgcatatgttcctgtgatggtggaactctgacctgaagccagtaaagccacagcaaaaatttttgaactccaactgcctaagacattctgtacacataaatgtagataatcaatatcaggaaagactacatagtaatgggaaacatttatgaaatctcacacacccttagtaaaaatgaagccttgtttaagtctaaatcttcacagctcttttgatcttcaggattcagatttgaagaattgcaaacagttccactaacggaaatgacagacacattaataaggaaggccactgcaagagcgaagccactttccatcatataaaagctgcatgcctcctgtaaatgtatacatgccattcatatactttatgctttgaaaatacagtctaatactaatctattgaagataaaagcttactctgatgccgcggacagatcttggtattttcctagaaagcaccaatgcagaatggagaaagagattgtggctgtagcaagtatagggtgaagtaggagtgaggagagaagaaatgatgaaatatgaaggaaagaagtcataaagattatataaagatgtttgagtttttgatacatacggcataaccatagcaccaagaagtgaaattgcaagaccggtagcaccatttcctttaagttgaggcacaaaaagacctttaaggacttcttttggatcaggcttcgcatagtgaagctccacgaagaagcatgcagcaattgtaagtacaagaaaagcaatcaagaattcaagtttcctgacctgtatttagaaatatttttaggatgaccccttcaatgtcatatctaaagtaaacaaatatatttctgtcttaaatgggaaactgtaagatcaaagaaatataagataccccatattgctgcagtgctagaagaactaaagtactaaatccagttagtaaaacaccaatccacagaggaattttgaatagcatgttcagagcaaaggcagttccaatcactgcaaataaacaactcagtcaaaaacagaaataatgggctcatttctgttctaacaaataccatttaagaaaaataaacctattgatttgaaggagatttttctttttaccttcgggaatatcgcatgcaactatggaaatctcagcaagaacccaaaggataaagtttgtcactttaggatactcatttctacaatgttctgctaaatgttttcctataatacaaaacaaaattcgattaaagattccaaagaaatcctgttgtaaacagtgattaaattcatgaagcacatgcctgtgaccaccccaagattggctgccatggattggataatgagagcagcacaagaagccaccaatattatccatagtagctggaaaaagcagttttatacactaagaaattcaaacaagtatgaagaatccatatacacaaggatatgatgttcctagaatacaaggtgaacatctccttaaagcatttatttttgagaaaaatgtacaatcaacaaggtattgagtgtacaaaaaagtataatgtatcgtataataatacaaaaaacttgctaacaaaaaagataaaaaaaaagtaggaattaccatgttttcactttcaatagaaaatgctaaaggccaattacaaaagaaataaaaatgtttatgaagcattattcatacctcatacttgtgttctgctccagattgtaaatccgtctcaactgtttatcaagcattattcataacataaaaatgaataagttaattattatccatattaattttttgaaaacaaaattaacttagagatatcatgatcttacaatttcctggatcaatataggcaatagagacaagaaatccaggacccaaataagaaaagaagtttttccagctcgtcctctacatttaaccaaaatataaatcagaattattaaagcataaactaccattaatcaaacaaaacacctctcaaaaccaaagtagaaaactttgacagtttatttcaaaaataaagctcactccaaaggtagcatatttgaaaatataatccacaaattattttactcttgccctggagtgttttacttttaactagttaaatagtcacagcaatttgagcttagcaattttgcttaatcttttcttttagcttttgaagttatcttttactttggtagattaaattaggcaaagcatcatataattttacaaaagtcaattactgaaataggcaaagcatacacaacatgttgatatgtactatgcatagcaaaatgcatgacaaagaataaaacaatttccaagtacgtaaattcctgttgaacaaaaagggcccatgtgctcattgagacaaaaagatttaagagtcaacaaaatttcaagtttcataatctcacgacatactcagctttttgtttttggagttatcaacatcatgagtttctctacattttcttaaccaaatcttaagcctttgtcaaaatagaagaactacctaactcaactcaatatatattatattttaatttaccatcttgcccctgattttggagtgtcaccattcacaatatgaaggtttcagcttgttctttaaatacttttcatcactcattctcaaagatgactttttcaacttgatctaatttcactgagcaggtgagtttggtaaaagacataagaatagccaccttttaccaagtaaataaattagacaatatttatactcatccatagattaacaaaacacttttccccattgatcaaaagaagaaaaaaaaaacaatctttttatcacaaaagaatataaagaagaaagaaagaaag

SEQ ID NO: 14225 - DNA, 7697 bp, Cannabis sativa
ttgttttatgtatttaattatttgactctctctctttctctttgaagattataatattgtagttcatcgtagttcatttaatattgttacaatttatttgaaagatatcatgtggttaaatactttataagaagttggcatatacattaattatcagcttcacttttaattaaatgtaatcattatttgctttttttttgtgtatatatgattgttcaattaaaataagaaattataatatctatctctatatctatgaaaatttatccaaatttattcagatatttaataacaacctagatatttaattaaatttaaataattaattaaataaaaaatcataattaaaccacccacaattggtaattctcccttcgtctttctccatccataattaagaaacctaaacaatccattcttcttcagttttgaattaaaatctattccaaactctttcacagcactcacatactcataaacaaaattgtcaaactcacaatcaaacaaagaaattagatctcataaaattacaatttacaaacaaaaactcagatctcaatatatgtctcagcaaaatccttccatcatcaactttttttttttttttgaaacacttccatcatcaacttaatatatcacattcaaactagaaaaaagaaaaacccaaaaaattagctcagcatgcagattaatatccaatcaaaactttaaaatgaaacaatatctccttccaataatacccaccaatctctctggcctctctggcccagaaacgaaacccagaaaaaaaaaacttgtctcagatatatattttctcaaccagtttctcactctgcctcagatctgtttcacactctgtctctctcattttttttttctcctcagatctctctcaaactatcattctccatggtaaactctctcaacctcagttctagattcatattttaactttttatttttaaaaaaagaaaatattttatctagtctcacttacttttatttttggtttttttaggggaagaataaaaaaaacaagggaatttactcatatataattttttttaatttttttttaaatttattgtttgagtttctaaaataattttttaagtgatttttatagagttgttatattaattttggtctgtaagacttgataattttattttactttgatttatttgaaattttctttactaattaattataacattattatttattacttcaaatatattttttattttttaaacacatgtcatgctaatttttttaacatgtcagcaaatatgtagacaaatattatatgacgtcacaccttactcttcccaccttactcttttcaagataacagaaattttgaatgccatcacataatattaactatggtctaataatcacatattgattggaacatttttagttttttcttttttcttttttcaaacccatttatttattttctgcttttagtatgatatcttcacataatgtctttatctcagtctactatctaaatcctattaaatctaataactattattaatatatcaataataacaagtactcaccttttaaaccattttgttaattaatgttatttttgaaattttgaataaacaatcattaaatgaatttttaaattattaaatcatttttgtttaatatataatttttaagaatgcctggtttttaatatcacattatattatattatcttttacttttttagattgttaatttttttttaataaaattgttacagatttatttggtaacttatttttagttagtgattttttatgtttaactaatagagaatctattttcttatatgatctaccaatatttgagcattaataacctcacaaatcagcatatgaatatataataatatattggttaaatgatattcatatagatttgtcattagtataaacatatatatatttctcaaatataattagaaacaaaaaacaaattaaatatatcttttttaattagtagtttattatgtatattctatttttaaaaatttattctaaaaatatataattgtttttctaaaatttcaaattatttaaataaaattacagccatattgctatttacacttcgaaaatttaaaaaaaataagaacaatgtacaaattttaacttaaacccatattatagctcatatatataaattgagttgggcataaagcgacacaaataattcgtatttatgagctgtgttaagcttcactttcaaaatagagaaaattacattatatacttcttctaattttatgcctttaagttttactctcttttaaaatatcttatatttacagtttttaaatcattttactaattttacccttattattatttcacgaaagttttcactcttatgtaattaaaattttgctcgacttttctacaaacttacacgtatatctacaaatataaaaatctattatgtttgaaattatgtcttaattatataggtgtgtgaggatattttgggtacaatactcataaaaagaggtatatttgaattaaattttatttagaggtaaatttagttaaagtataaaaaaaaaaaatgagtattcttgaacttctcctctcaaaatatgtcaagttttcataataaaataggattttgtaaatacgagttggtcaatttgtttttacacctaacttctcaaattataaaaaaataaattatataaaaaattagtaaaatttgatacaatttaatttattacttagtatattttattttatttgtataatttaaaattttttaaatatctatcacgaaggacgagttgttactagttacattagacataattatttcatacttttccatttcaaataatatgcatgtatacatctcgttctttacatatattttaagataataataactaatattaaattcctttaagttgcacttacaattcagcaccatgtcttatataaataaataaattttatttaacaaaacatatctataactattaattaatctaattgtaaaaatagatacggagtaatgcaggcgcatgaggcaccggaaattactatgaatactccatcttcttccatccatcctttcccctctcaggtcaatttttaatttttatttttatcttattgtactatatattttatattagaaagaaaaatatgattttttttatatatattattttaaacaataaaatttgtatatgactatgtgataaaaaaaaattaaattgtataatggttaaaactaataactaatttattagaatattgtatgactaatcttattttatatacttattaaataaaaataaatgtaaaagtggtttgtgtaaaaaataacttttatcatttttattagcaaaataattttataatgcaggcgtataaggcacgagaaattactgtggacactccatcttcttctatccactatttctcctctcaggtcaatttttaatttttatcttattgtgacttcttttttaagctgaaaaaaaaattatatattatttttttatatgttattttaaacaataaaatttgttcttatagtttttttaattatattttacactggttcttttatatttggagaagaaaaaaaatacacaagtattatgtgattaaaaaattaaattgtatcattattaatggttaaaactaataactaatttattagattattgtatggctaaccttattttatatacttaattaataaaaataaataaatttgttaacacaaatccacaataccatagtataagaataaatatataagactgtttttgtaaaaatagtctttgtgaaaatttttaaaataattttataaaaaaaaaaaacattattagtaaaataaccaaaaattacactttacgaccagaaaatgaccataaatttacattacacaactatcatagtcacattgaggaaattattttgtaaattttattattttagattgttagtttaataaattctctaaaatataaataataagattaagtttttaacagagacataaatttttgtcaatatttatatttatgtattgttctgtttttttttttttccttttataatatatatttcgctatatgtattttttttattattattattaaactttaatttttatttcatcttttactattgtgtagaaatatttgttcataaaacttattcataatatattttattatatattaaagcaggagtttgataaatttgttatgataattacattaatttctattttctcaccataaaatatggacatatgtatatacatgataacgtaaataaactccaatgattgataggatcatactgctaattacgagtttcaggatctagcgttgcaaaattttggactccctacaacaagtaaatcaatcggccctggaagtgacttttcccttgaaaggttttgcatgtactaactttcttacttaatatgtttgatctatgaattgtatattgttagttgactttaattaataatacttatattaaattaactaaacaacattaaaaaaaaaaataactaaacaaaaatctacacacgagtgatgtttttttttttatattaaaatatgttgtatacatagtatcaactaagcatgaatatttttttttcttcaacgtatgtattaaaaagagttaattttgttttaaaaaaatttcaataaaaaattaataaatatatttatggaaagagaagtattttcaaaaggtttataataaataatagagtgctgatatcaagtgctatgctacctagcagcagcaccataaagtgtcgtcttataaatgattaatggttttttataatcaatttaaaatataagtgagacccagtattaataattgttgttagatacatagtgtgttttagtatttctctaaataataagttaataattattagattatatttatttgtaataataacgtaatagtacctttaaactttaacaattccctaatctttattgtcgtgttagaagaaagcacattttcttctctctcatactctttgtttccaattaattaatactatactaaatactttattgctaataataagctttcaatgatatttaattaatactacgtacataaaatataaatctttatacatataaaatagttaaagctaccacattgttatatgaatggaacttatttccatttcattccatatatgtcatcccaccccaaataacatcaacatcttttaaacactttataacacatcttttaaacactttataacactttatactattctaaaatagtttagtgtgtattaattataattttctattctttcagttcttttttttatagatggattcttttgatttgtattatatattgattaacatataattttgctttaatgtaaattttgtttttcatcaggaaaggattgttagatcaatcaaatgctgaatggtctgaaattttgaattttggagagtcaagtacttctctaaatgggctagatttcaataacaatagtttaaatgtttggggagaaattagttataattactcttttggtgatggcattacaaagatagatgaacaaaatattctatcatcacaaaatcaatatcaccactcagagaaggagagttatggcctacctatttcacaacagacatatgaggttgaatctacacgaaaagaaatgaatttcgaacctcgacttaaaaggcatgtatatatgttctataaattaattatgattagcataacttttcttacctaaagttttggatattttcaggcaaaaattcaactcatgcaaacgttgtaactgcaagaaaactgaatgtttgaatcagtaagttaatttgttaagtattatttagaattcatatgatataaatatatctcttgaattttaaataatgataaaatttctattttgtatatttactgctaataacaactttttaatacaccattaattttaatttctttttatgcaggtactgtgtttgttttgctactggtcagtactgtttggacccttgcaattgtgagaattgttttaataaagttgctttttcagagaaggttgaggtggcacgaaagatggttagaaattttctttaagacaactattactgagcttatgaaatcatgtaataagtttctataaaactaaaagtatattctttgtgcagagtctactaaaagcatcaactaaacgtagaggaggctgtaattgtaaaacaggctgctctaaagaatattgtatatgtttgaaggtagctattatatgtgcactttaattacaattattaattatatgataaaatctaattagcttatgtattacttactaatgaagaacaagattggatgttctgttgagacatgcaaatgcatcgcctgccaaaacatatttggtcaaagaaaaggtatgccttgacatattttattctttttttttattttatcattttggatatttttattattaatccagtctcaagatctataatttatcatgattaattaggagcaacaaaagaaggagaattacaagggtcagaaccaaatatgcactttaggtacaatatatcaacacttttgtaattatgaattattttgtgtaatatataatttgaatgctttctaattcaagctcttctatttcacagatttccaatccaacaaccacttgataacattatatcttcatcatcaataaacgattcttgaagatggaactcttgatccactataggctcaactctaaacagctgcaagtgattatttataaagtaatcgattgttagtttagatttatttgttgtgcggttcctaaactatgttttagttcctaaactctatttttagtaaattagtttttgaattttgaattttttaataattttaagtcctcacggttagtgatggtatttttgcccattttttttttactttctttaatttacttttgtgtgggagtgggttttattttagatattttttattttttataattttttaaagtacatatatatattttttttaaatggatattataatttttttttatttatatttttatcttattagttattttttttttgataaatcaaaaaattgtgttacacaaatcaatgtttacaccagcaccctatacatcttattagttattaccataacaaatttttacatgtattaaaatatgcaaaaagaaagtaatagaaaaagtgagcataaattaaaatgttatactttaaattaaagcacatactcttagcaatttttttagtatacatactcaaactagttaaatgatcaaacacatagaaacagaatgagttttggaccgaaatcaaaataaatgcaaaccaaaaaattaaacagataaattcaaggcaattatccttttgaattgagttttactctagttctctctcaagaaacttctccaatatgaatcaatgtgttactaacaccaattaattgtacaaaacaacaagaatcattctagacaataggctcttcaacactcaacactttcaattgaccatgaaagtatggtctttagccctcaagatctccttccttgattagctctttcttacttctctcttcctcttctatttttctttgtcttcgaaatagacttgagcttta

SEQ ID NO: 14226 - DNA, 4373 bp, Cannabis sativa
cgaacttgttcattgcgtggaggtggattgtgttggtcgttagacgccattgctctgataccacaacagaaatcaagaactgtatttcttgatttgagaagaaagtaaaaacagagaaatgaaatggggaagaatgactgaaatgaaactgcttaactaaactttgagctagagaaactttatttataagcagaattttacaacagaaaaatgatgcagctcaatgtgagctgtcaatgtccaaaccgttacaatttgtttgttgaatgcataactgattttcttatagtgctgaatcacctatttctctatttccaagaccatacaccgttcaatgatgcaggattacaccattttggtcatgcgcaaggccatgtttagacaggaagaagcagttcgtcatgcagcaactagtgctattattaaccttatattagctgaaaagcaatctaagagagatggtccattttctgctcaagaatcgtccagccaagccagttgcagccaacaagctgacatatcgggcagtggaggaggtctatttcagcagctgagtggtttgctgcagaggtgtctctatcagcaggtgtttcccctatttatttgtttaaagtcatgtttgttacttttgtttaaaaccacatctccaattacagctacatcgttgttcataggcaaaaatcaaagaaaccatgtatcatggactgataaagcttgtcttggttgacccgtcaactggaggagcagtccttgatcttttgttgcctcacttctgccggtatttccatgaggtattgataaaaatgttaagtttgctcaatcctttaagccaaattttgtctcctccttgtctctcatgttttttgagtattgttgaggcacttgagatgttgagctccacacactaatacagttaggtctcacatacttaaattttcctgtgaaatccatccacatacgtattagttatggttctgggcacaacaaatgtctattttgcttcttcctacatttttatatccattgaatgaaagaattctaaatgctgcttcttagtattatataagtattgtattttatgcatgaatttttgtgcttaacttttcaatgatatgcaacttatggtagcagggtgcagaggtagagcttggaatttgcagttgtgttaaatcagagaatggcaaagttgatattgatgagcccttggatagtttattacattgtgtctcttggattttactcctacaacatggtaaaaatgatcatgttttggattcttcacgggcatgttttggattttccctcacaccagagaacgaggtattctagttcctcataaacaaaatagagcaagttgttttcatatatggtttcttctttttgatttgagaagtgagtagagttcaattgaatgtcactaatttatatgtgctgcagacaggaaggtgttcatctggtgaatcattctccaatgctttccataagattcagaagtttctaagaaatcttaacctgggaggtttgttgtgagactttttgtccaatagttttctgcgcattcccaccaatacagacatttatagtctttctgaaatttttttgcttaccacatcttgcaaaattcatacaactgacatgttatgttggatcaggcaacttgggtcaaagtcaggatggagagtcggcatctattgatttggaaaaaaccaaatgtcgtgctttgattttatctggaataattgaagtggtattgaatgtaattgctaatgatttggagaaagcaacagatgcaaataggttggatcttgaaagggagcttgttgaatttgttgaacttcatcaatcattggaaaaggatgtaaccatgttaaagcagggcacgggtactagaaaagggaatacacgaccttttgctcatgatacgcacaactttgaactaggcagctcaaaagtgattcaaagacgaaattctttcttggcgaccacgagtatctgccagattatggaaatgattccgaaactatttaatcctgaaagcttcagtaagattggaactcctcaaaaccatgatcagccatctgtgagcaagaaatcaaaaggctgctctatgattatttcttttattctgaatgcctgccttcatcatataacattacttcctgttttcggaaaagatgatcccttgagacttttgatgtatggggatatcaggaatctgggacccccactcttgagattaatacatatccttaaaccagtgggcaagtctgaggcaagtcaaaagaaaaaagaggtgaagggaaagaaagatgttggagaacaaagcgaatatatttgtctagccttagtatgtttgaaggaattgataacgattggcctaaagagtccagacagtctagacatcactgctttgttggaagatttgttgtcagtttccactctcgaggatgccagtttggatggggaatgtcaaatggcttctgggattgttgatcaacccacaagaaacaaagaattgtttattatgaaaattttgaagccacttttctttcaacttcttcaacgttcctattctgatgcactggaggtacatgttattattcatttcaaatatacacaagtagagactttgtacttttttcctgatttgtaagtatattaatttgcataatatttgtaaatacacacacattgagatctttgctaaattcaggttatttgtggcatgatattgatgattggggagactataccacgtgacttgaggaactctcatggagcctgggctattcgtgtctgtaaaaccaaggaaataacagattccaaggttgcaagaagtgttatcacacttgctatttctttaagcattcctccaaacgatttaagcatagcacaagaaattgctacggagctgttaaaagttatggcgtcagaggcacatgaaccagtgacagagtctgaagtatatcctcttttaaatagctctgcaaataattataatgccatgagttcttgtatgctgcacttaatggaaatgtttgttattgatatggattgggccatgagaaagttgaagactttcagtttactctcctacaaaaacattcatgttaatccaaatggggaacaaattcctggccaggcgtttgaggagcatctttgctctagggcagaagcagttgcaaaagtactagcttcttttgttttaatgagcctaaagggtacgaaagaagttttctttgaacaatttaaaatcttgagtctgcaacctttaaatagagatttgtatccgtaaccaatataatatttagtgcataaccgtagtattatgaattttaaaacgcagatgctcaagctgagactctgctccgattggctgcaaggttttacaagcacttagctcaaatatcaaagcttagaattgctccaaaaggttgcaaacaggttttgccctcccttgagttccagcagcttgtggatataacatgcaaacagctgactattcctctgtataactttgtagctgagatgcagagggtattgacatccatttttttgtcttcatataatatatgtacatacattcacaaacatgtatgagtgtatacaaaatcaaattataactgattgcttgattttcttcctatttaatttgcaggttcaacaagagaatgctaacagtaaaggaatcatcaacaagattaaaagagagaatagatgtattccagatttgatattccagatagaagattatgagaagtttttaatccaacttagcaaggcaagcaaaatcaacttattgagacacgcaaagcggagcactgctcgggacttcaaaattattgacaacagcactacagatgaagaagttgctcctcctaatcatgatgaagctgtaaataacaactcaaatgcagcacaaaacgagacacgtgaagattctgatgacaatggatgtaataagaaggttttatctcccgaaccagattctgaccctaatgatggagatgatgacgatggaggtgtaccagtgaagagggtaaggagagacagaattgtgcaggactcagacgatgaggcttaaaagtttgaagttggaacaaagtaaaggagagttttggtttatatataatgtttccccattaactacgaccctttgtccatcctcattttccatttttcggagacacagctgtttcacttgaatacgggttcttgggtgtatataattaaaaaaggatcccaagtgtaaaaatcttagaaaaaaatagggttttttttttttttttttttttacactttaaaacatttttttatttgcattgttacgaaattctacatagaaactcttattgcaactagtgctgtgactt

SEQ ID NO: 14227 - DNA, 3603 bp, Cannabis sativa
tgtgtgtagtacatacagtacataaaacttctgacattgtagatagtagtacaacaacatatgaactaaaccattttctaatctaaatatattcttctagtactagcaaacgttataacctattacaaagaagaaaatttatataccatatatagcatatactaattaagacttagaaaatcaattaactaaggattacaagctgttgattaatttctacatgtgttttagaaccatcattccaaaaccaatgccaagaaaagttgcaatggaaataccaaaaatgcctgcgaggattgaagggacaaccaaagaccaccatcctttagctgtggccattccacatgcagtggtcgggccaccaatgttggcattcgatgccaaaagtaatagtttaaggtccaaaccaaaaagctttcccaggcccaacacaaccaccaaacggactgttacttgaaccaaagcaaacatgaaaataccaggggcagtgttgatcacattccatatgctcccacttgcaccaatagcagcaaaaaatacctgtagttgcaattatatatatgcatataatcaaaccttatcttttgtaatgtaatcaccaatgaaaaattagcataccctttttcttttactttattctatatcagggttttaaatattaggaagtataatgtattgtatttcaggattttctctttaaaatactaaatttaattcagttgaccaaagttttacttttctttttttggtggggagccataatatatgaaaagttgacttgagagattattcaaagtgtcaatagcaacaacatattgcactgaatgataaggtacttgtactgcttagcttaatagccttattcttaagtctttcataataaacaacacttagctctgaatttctgagctgggaaactcaaacaaagtaaagaggataactcacttcgaaatatatatataaactatttaatgcaaaataaatttggggggaaaagtttacctgcattaaaatgatagcaataacatcaccagcaggtgcaatgtgaccaaaatattttggtagaacagtggctaaaatgacagcaatagcagttattcctggaaggctacctccttgaattcctgttaactttgtgagatatgttccagccttgcatatgagaaaagaagtggcaacagctataccagtttgtaacactggaatcttatcaccattatcagattccaatttcattgtagaatctaccaatattagaagaagaagaaaaaaaaaagcattatgaccagtaaatgttgcagcagaaatgaaaacaccatttagcatccaaagtaagacaatgtaagagatgaaattgaatggaagacataccatttgtggtttttgaagcctcgggaggtattttagaggcaagtgcaaataacactataaaataaactgcacaaataacattatctgctgctactcctgcagtcaaaactgatggagtgacaccaagggcctccgaaattgcaacataattaacagctaccaggatgaaccaattggaaaagaaatgaagttttttatcaatcattaatattatagctaagaattgtagtacagattatgagaagcattgataaatgttgatactcacatcctccaatatagctacccatcagggcagcagctattttccaattatctgcaccaagtgatcgcatagggaccaatgcaaaggccaccaaggttccaactatagttgcaactgtcatagaaatagaataaagttaatttagaatcgcactgctatagcctagctgttatgcttaccaaaccagattcaaacaagtaataaaatcatcagtgtagcagcaacaatatccaaatacaatccagtaagaaaacagtaaaagaatacagaaaattacaacacagaccttacaatggtcagaggcaatacagaaagttaaagagcaaaacaatggcagtcctctctctcactctctactctctcagcttattagagtttgtccccacatggctaatgtgtagaaataaattgtgatatataagatgaatgggctactccgctctcattgccaattggttttgagatggaacctcattcatcttatccccaaattctaacacagctacaccttatcattcttttttacctcactcagtaaataatcatgcacaccctattcagcaccagctttaccaatccttatttcatgattataggacaaatgggatatccaatttgttattacaaaagcagccaatcaggttgggctccagtacacactaacaccagcacctggtcactaaatctgaaagaaagacatgtagacctcctcacaaagtgatgacacatcagcacattaatttatatcaccatcttcaacatttcagacaatcaaacagcaatatctaattgaggttggcctataatttgctgcttcaacttaagaggttagtttcccagatgactctcttgaagaaatttcttatgcataacataacgtcaaagttcaaatttatgaagagaaatattgtaaaactcgtattctctgaagatttgtgtaagaaaagaagtaaaagtacctgatgcaagcaaaaaagctaagagcaatgtcccagttgagcgaatgacattacgcaaatctgctctaaacaagagcaatggaatagttaatggtaaaaggaactccatgacaactgaatatgcaggtgcctcataaggaattatgcctaaattacttgctccaagtccaaccaaggtgctcacaagagcagcactgaccatgctaccaatcttagtcttctcagaccttgcttccacacatacaatatcattaccctatgatatgttaagaagaaataaaatatgctttgtaatgaaaagtcaaaacaaacataaatagagtcacccaataagtcaaacaataatcttcctctttcagtaaattaatttattaatccaatattttccaaacataaactaaaaactccattattatattatcacttaccagagaccaaaagcaccagttgcaaagagagcggtccacgtaccccaatggtcatccggagctataattggatacttaagctgcgacctcaccttccctgctctacccaaaggtcttcgtttctcagacttgttttgtcgcacccgacgagtacggtgcgccggaatgtgaacggagaggtgggcaaatgacacgtgtagcaatgggattgatggtgaaagatgagagagaggtgaggagagcaatggtaatctcaaagaagccattaaagttgtgccgtcagcttcgttgtgttctacttctaaatcttatacacagttcttcatttttttttatttattttttttttttttgaataattaatggaatttttattaatggcaattaagtacatctctcaactacatgagacacaattaacattagaattagaaaaataaattaaataaatagtctcctaattcttaaattgtttgacaaaaaaaattaaaatcaaatcaaataaaaatgaatgcagtattacaatttattttaagaaaacatatattttgtttcattcacttctcaaaagagtaagaca

SEQ ID NO: 14228 - DNA, 2421 bp, Cannabis sativa
tacaaactttttataatgtattttcggaaaaatattattatgtacatatgtaaagatttatatattggtaccttctaattttttttattttttttttaaaaaaagaattatacattaaatattttgtatgtacattagttaatgtttattgaaaaaaaattagcccacttttttaagttttaattctggttccatcaataatgataaaattatcttcatgtttattttctcatagttgataaaatttaattattttcaaaccattttatagatctcatttcgcaaaaccaaatttatatatcacaatacatttttttgtcaaaaaaaaaaataaaaaatcccataaagtaaattttttgaaaaaaataaaaaatcataattcaaattcctactttagaacccataaaaatgaaaatttcccaaaaaaaattttaaaaatgttagattaaatttagatgcagagttaataatttggtatagtttaaatataaaaggttattataaacatcttaatttgaaacaagagatttgagtatgaatgaaaaaattatgaactttgcttaaacacattgccatgttgtttcataataattttatatatatattttttattaaaagcaaaaataaataactttaattaactaatcatagtcataaatttcccagatccattgactgacaattagtttcttatggtttgcagtttaatgtatcatgaaatttgatgatgaggatttgaatgtacctgaaatcaagtgaaccaaactcttgatgtatgttgcaatgagataggtatattttatttacttaattattgacacaacattttcacaaaggtaataatggttgtggtgattttaaacaaatcttatatattgatatgagacatttctcattatatattactagagaattaaaataataagtttcaaaatttcttaatgttaaatgaatacaatcgattgaattttcttgtttagtttttgtgttaattttgtgtgcaaatatcgataatcttactgtatataaataatttatttttattaatgagaaatgtttgtgtggaactaaagttttacattggttaaaaattaaaaagatcatgaatatataaggatggatactatctctctattagtatgagacattttaagaaggtgcccaagaacaaatcataaaggcttaagtccaaagaagataatatcatacgaaaaatgaagatggatggtgttaacgtaccaacaaaaaatacctttcattcttgaagaacaaaatttccagcaacatcgttggtcatttgaagttaggagtagtactattgtacttactctttaatatggtcatttttatattgatatctgagaagaaggcttgagatttagtggttagaccctatatgcaacatatgcagcccggctctgggcataggcgggctaggcctgtgcctagggcccacctagcccatggggcccaaaaaaaatattttccttttaaaattatacaatttttttttattaattttgaaaaataccatatttctttttctaaataagggtccaaaataaattttttttctatggcccactaaaagtcagggccggccctaaacatatgcgatatatgtttaaaatttttatatataaattgaaagtttttaaaattttggggcctttgtgtatgtaaaaaaatgtaattattcaaatttggggacgcttggtatggaagcatggtgatatgtccatattttgagcattaaatatggacatgacatgtggatataagttacgaaaattaaaagtgttggattaaaatcctattgtgggtatatatgtataatatatatgctattataaaatgtgatataaatttaagtgactaattatgttgtgggcataaaaaaagatattaaattatcatggaaataatgtgtagataccataagttaatttataatttattgagaggcgaattataagtacttaaaactcattttatgatgagtctataaataggtagtggtctctaagaaacccaagaaacggttactgtattctctcctatcccatcagagaaaatactttagagaatgtattcttggaagatcataactttctgtacaatctctaacaatgacttcaagttagtgtttgtgcttatctgtattcatattcttctttttctactttagtaaatattctatgatttaggatttttttttttatattaaagtatttttaagaatatatttagatgtgtaataatgtatattttttgagtattttataaatcctaacaagtagtatcagatgcacctttgttgaattattgaaaatctggtaattttattgttaataaaatttggggattagtaaaatttgggctgttttttttacgggttcaactcataaggtaataaaccct

SEQ ID NO: 14229 - DNA, 6995 bp, Cannabis sativa
  modified_base (648)..(652): a, c, t, g, unknown or other
ttccggcgccggcgccggcgccggcgagtgatgaattgatgggttttaagagctcattctcctcaagtagtacaacaagcccatttgagtgttttccaagctcatttgatcaaataatcacaacagcaacaacaacaaattatcatcatgaagatcaattcaaagtacttatggctgagtcaacgctgagtcaaccatcaccacaaccaccatggcttgaagcttcaacaagtaataatcataataataataataataatgatgatattattatgccaagttacttgaattgggatgatgacatagatacacttgtctctagtgatcaaatcaatttgtcatgggattatgatgatcatgatcatcatgatgattctcattttcatcacaacaaaaattcactctaattataattattaattaatggggttgtgtttaattaattaatctcttttattgattttaattagtggggtattattaagtaagtatgtttttgttttgtaatatatgtttgaggctgtattttttttcagcttcaagctttttttttttctactaatttctatataagatattgtcccattttgtaattatttttttaatttttaaattgagttattaaaatatttatatatatttatatannnnnatatatatatatatatagtgatagagatggatgagatgaaatggggtcatttccagcatggcttgatttgtataatagaagattatttggtatgtatgtgaatttggatatatgaatggtttgtagtacattggattatagttgagcccacttgtactccacaccatatataaatatattaaaagaaattagagattataaatttttaaaaattataaaaatacattaacactgaaaaaatttcaattttattttttttatataaaaatacttctttagtgaaaataataaattatagttattttataatttatttataattgttatcatgagattatttttctggctattttatagttgttgtaagggttaatttttttgcttaaaaaaatatatttttataattttaaaatcctataaacgtatttttataaataaaaatagtaaataaaacgtaaaaaaaatactatttttaaaaattctcgcactcataaattactcataatgttaagaacatatttttagtacacacttttaaatatatgtttcagtagatttttatctgttttgacatttagaagaattttttattttaattttttttcttaatagtatatggtatagttatttaagaccacttctaaattttttaaaaaaactttaagtagtgtacactaccgaatatagttcaaacaattgtttacgtactaggctaataagaaaattgtcacacgtataacaaaatatttaaatattattttcgatattgtaaattattctaatttttttaataaaaaattaaatagtacacgattattaaaaaaaaaattgaaaaattctcagaaaccaaactagataagggtgccatagactttctctaaacattatatgctaatgtgatataattagtataattggttaggaaaaaataactcacattattgtatattatggttgtatgtaatttttgtgtgcacatattattatttttttcagaagggtcactcggttgatgtcttattattatttttttttttaaaaaaaaacacaaataatatatgatgctgaaatcataatttagaaagtataataatattttatgattgtgatttttctcttggacaacatttttgttgtagggttttttttttcaaatattgctcttcacacacatatgatatatagatagatatagataaatttgcaagtatttgtgaccaccatgttgtgtacttgattattattgatgatcataatggtctagctagctactactttcaacattaaaaattcttcatataattatatgaaatgaaaatggtggtgatgattttttctcatcctttcattcattttaatttcagtttgtgaagacaactatattactagtactacctaacatgtgccttatggggccacatttctaagctttgttttttttattcttctttattattctttcacaacaaatcaaatgacactacttaaaaacactacaacatcattcttagctctaacattttggttttggaccctacaaaatattttctttgcttgggaaattatgatactaattagttactaaaaaaattacatttccactattgaaatctctctctcaacttcctttctagattaggattcagctcaccaagtaagattctttataaaataataattataaaagtaatttgcaatataaatacttaaatttaactctcgattataaataaatacttaagttgataaatatataaatttaactctcggttatcaatggctacatggtagttcctgattagtccaaatcattaaattttaggtaagttccagaaatataacttttatttttcttatttcttttgtaagattcaaaaatataacttaaatattattacagttaaaaattaaatttaaatatttatctaaaattgaaagttaaacttagctatatgccgttaattcctctaaataaacatgttttcaatggtattttacaaaattatatttttatttatttatttgtaaaagtgacattctttcacttaacataatagttcctttgcagagtgaaaaaagtatatagttagcaattagattttgttctatctttaataacggattacatctaaagtgtttcataaaaataataattataaaaagttttattagcaaaataattatattttatcgctaaaaaattatactgtgcaactataatgatcacaaagtatgacgtagttattttgtaaattttacattttcatattattaaattggcaaattttcctcttcttaaaccgaaaaggctacattttcatattgttaggttagcaaattttcctcttcttaaatcgaaatggcttgggagaagaaaaattctcccttttctagagaactcgaggtaacaaatcgaaaaattgcccttaattctagagaactcgaggtaacaaaccgaaaaattccctttttttctagagaactcgaggtaacaaatccagtggagacgggacgaggcctgttcgaacaaaatctactcctttataatcgattatacataccgaatttcgattagtagtaaaagtaaagttctctcctttttaatggttgatccaaattgaaagaacacacacaagagaaagtttcatctaatataactttccataagtgaaactcatacaataatatttatcaataatcacataactctatccttgtctttccataaagaaaaactacacaaatatgtttcttcaaatcccattttcttttacatcttcatgagaaattttcaactacagattccccattctaacaccggtgtccctagcataagttgcataaccgtcgttcgccttagaaaaactaacataaaagagctcggtcgctatacctgtaagcacaacaaatgcagctcctgctccaaagaaacctttcctcactaccttacacgacaacgatctcctatacttggtgtgaaccgcgtttgacactgaagccgagagcaaacacgacactgcaatgacgaagaatatcctgaaatgttgtattcgagttgttagaattcgagctaaagagtgatttgattgaactgatatgattagaagttgaactataccagctagaaatgaacagaacaatggcccaagcccttgaaccgctcggtcttaatgccttcccacaacacaagcatcgggttactgccattataacgatttgacttatcaacaagaacaaaaacgccccaacgcctaaaccagtcgcgatatctttgtcataaacacaataggtgtaatcagcttgctttactaaccttgcctgttagggaaagaacagagtgagttcaaaatttataagtcataaccgataagttatggcgttcgattccttgaaaggattaggaaataatgcaactaacttaactaactaaagaacacttaactgaataactaactagtaactaaactaaccacttgaggctagctcaagtagccataggagggtgcgtgtatgttggaggtcctgggttcgagtcccagattatgtattgtaatataaacgcttaatttaaaaaaaaaaaaactagtaactaaactatcctatgagtgagccaattcacttgaccaataaagtttgcatttttaacaaatcataattgaaaagcaaaaagttcaactatgatacgaagtttacaagttctaaagagataaaatggaacatatgcaatcatcaacatgctcattcaattattatgtgtaatgttttcaacaaaacccgtatatgaaactaattttcctgcttaatcctacaatatttgggcaccagaaaactagagactcgaatctctgagaacattatcacatacctaactatttgagctacccttcttaagtgtcaatattgttgaatttatagataaagaatcttctaactaaaacgcgtaaaaggaaaaaagaatcttaactttttcgagttagtagagaataaggtagattaaaaaaactagtctacaattaaagacctagctcagattgattgaaacacaacccaagtcagtcacaagtctagaaaatattcatattcttctgttttacaattcagaaccatctatcattttcttgaactttctttgtaatgggatcctctcataaaaccttattatgaagttaaatcaagcaaaatcactaagtagattccatgggatccttatagcagtgtttggttggagataatgaaatggaatagaaataatttttattcatttctttgtttggttacattataaagtattagaatgatttttccatcattttagcagaataactattccattctgaaatggaaggaaagatcatttcgattccattctattccaactcctatttccattcttatgttttcattcttctgaaccaaacaccaccttaaagtacacattcatgaagaatggacactttaatctcacctaatcacatgagctaacctcaaaatagcatagtagccaacccacttgaagaactagcctcatgcaccataaacttgaataagtgttaatctttcacatgctgccaaaacactacctaagatcctattattagcatagaactacttgaatacatctaacaaggaaacttccatacaaattgaccatcatttctttaaaaacaagtcccatttctcacatgggattgtaaagattgttatacataaagcccccacatcaattatatatacacacaaaagattttccacatgttatctcaagatccacacaaataaaaataaaggattaatttttaagaaccacatcaaacaactcaaaggggttcttcaaaattatgtttacaacaacaaattttgctcaactttaaagagctcaaaaacctcatattcaaacaacagctaggttactcccaatcaactgaaattttttcccccaaaacccaaacttttaccaaatctaaaccaaagcttaaacatttcaatacagagagagagagagagagagagagagattaaactcacagtagttcttctctgctcagcagcaacagcaagagcaaaagcaatcaaatcaaaaatgaagaccaaaaccagtaccagagtggaagccatgacttcaaagcttcaaaagctctcacctttttctgacccaccaactcaaaaagtcaacaaaaccttaacaagtgtctaataattgatactatgtgtatatataatattgaaagacagaagctttaaccaacaaaatcctagaatagagagtaaaggtttggtttttgtggcacacaatatgagtttttatgccttgaaaatcataaagttatgatctttttttgattctttcgtttaaatttcttcttcattttccatttgtgaagagttttattgttgtacgatatcaaaacgcggttgttatgaacaagtgttctttatttgtatgacaattttttttatttttattttaaataaaataatttacggtataaatatatatttaagtttaattttaatgttaataatatttaagttataattttaaaatttttaattggtttgaattattaatttttttagaaaaattaatttaaatatattaataaaaaaataacacataaataataacttgattatcggatacaacataattgtaaaaatataacttaaatattattatggtctaaaattaaactcaaatatttatttatacttaaaaattaaacttaaatatctatatcaaaattgatcttttatataatactaataaactaggattattaacttaaagtataagtatgctaaaattctataatatttttccttaaaaaaatgagaaaagaaaaagtaaaattgtattgaagttgattagaataaagatggttgattccttttttagtatatataacatacatcatcaaaagaagtgtttgactaattagaaaaataataattgtttttttgtggagataatttcaaaatttcatggccaatagccaaatatagaccaattaaactttaacttgaaagttttgggtgcttctacatcgaagcattataactgttttggtatttagaaaattatttaagattttattattaaattttgataaatttaaaataatttataatataaaaaattaatataaaaaataatattcaaaccataatattcaaaccgtttattttacatatgcataaaataaaacaatcacgagtataataaattatttgaactttgtttttagtatattaattttttttgaatttctcataaattttttacaatatatcttaaataactataacagacacgatcataaaaaaatttaaattaatttttttt

SEQ ID NO: 14230 - DNA, 17260 bp, Cannabis sativa
ctctacgagtaaaaaaagaacaaaactatagccattaatatctcatgactactttgtgtacgtaatgctctgaaaagttacctgaaaacctaactctacggtaaatgatgtacattttgagagagagagttttcgtaaaaagaggtgagatatatataaagattcttttgagatgaaatatagggtgctgatgtgggaaacatgcatgaaagagagggaagattccattcagatcacacactatatggaatttaatgaccaaattgggtacccctcccctactctcaaccaagtaataaaaacttctttattaaaaaaaattactctaatatatttccatcataaaaaaaagatagaaaacaattgtcccacactaaagaatctttcatcaaaaatattctttcatattgacgtagaaacagtctccactccactaagtatatgtatatattgtttatacattattagcttaattaattggtaattggtatacgtattatggtaatcatggtcttaaaatagaaattagctagactagtggggaacaaatactagctagcttagtttggtttatcgtactaaacatataatcacttttttttattttcacatagtactatttattgcagtcatatcataaaattgatcaacctttgaaatcattattcttctacatatgacgttcattattattatataagtggatatagcaattatacttaagatatggacgaaaccgttaaaaatgatttattttcttcagcttttgtttttttgtacatgataacatataaatcgatttttgtccctacgcatacaattaatgagattttcttctaagccatttgattttgtgctatagccgtaaaggaattcacagtcagcaaaataatttccatatatatttagagagagaattttctaaattttgatcatttgatattcgtactaaaacactatctaattggaggtggggtatggtggcttccacaagagatgaatataattaattcacatcaattttcccatttctttctttcttttcattattttcttcgtgcgtgtttgagttcatttcctattcgaattttctagtctttcaatcatttatttatattattaatcaaggtatatattaaataaccacgtgttacgtaaattagtatttcataatgtattaaaccaatctaaatgtgacaactcaactaactattttttttttaaatactattaaccatgtagacaaaaaaaatttcttaaaatactttcaaataaattgatgtgtcatatttagattggtttaatacattatagtatagtactttttaatagaagatctttattcgtgtagtggtagggaaacttttattgttcactcaagggttcaactctcacccaagccttcaattgtgagagattatgtttggtcctcgaaggttaacttgatgtactttctttaaaaaataattaaccctcatgtataagtagagatgaccaagtaaaataaaataaagtataagactcatataattaatacgtagttctaaggatggagaccgaatctattttttctaataaaaaaaaaaaagaaagaaaagaaaaaaattatatattaaataaatatacaattgactccacttaattaatgtcacaccacccaccgtccatagaccatatagcctaccatatataccatggaatagtatttgaaataaataatggtggaaattgaggtccattagctatatatttcataatttgtactctattgtaggggtcacctccaaaacttagccctattgaaacccctactacattggtttgccctttttctcataattgcgttagtccaattacttggtacaggattcatgctatttgttagattttcatttaaataattataattgatattatcattaatcattcttaaatattgtaaattccaataaattttatgaggaaaggaggttgtttgatgaaagtattagtcaaaatacaatgtgaaacaaccacaactcttaaaaggagtaccaattcaaagccattatattttactttccttactaaaagttccttttaatttttaacaaatatgaaatttaaagtcattttttcttttgaatatctctcacttcttcaatcctaccaaccttttttttcccccttaaatgcttaaaatttatagtaatcagttatagaacttagatttatgttaattagtggaatgacacgtttattttacagaaatttaggtgatttgtcaatttgctaaatttcagataacgtaaatggtgtaaagaaggctgtttcgattttgttaccacttccaagcaaacggctatttccgtacaaaatgtacggaattacatgcttaaagtggtcctaaaccttttatcaaccatagcactttaacgatccaaaaataaacatatataaatagagagcgtccaaattaaaacttgcacgagcagccaactactcattttctttttcctcttttttttttcttcgtaaaaaaaaaaaaaaaaagagaagattatatataattttctaccctttatcgtgaaatttattttaaattggagaattatatagagagcatgcgtaggcaaggaccaccaccaccaccaacgactgactgacaaactgtcaggccctaccatgcacgtgcgtcctagcatatgccatttttccaaatctcttgctctgtattctatgtctctctctttctctagctaggcttccatgattactagtagagggccatttatgacatccaattctatttcacaactacaagatgtattcattaagaaattttaatacattatgagacaactaattacacatgcaatcatatatttaatagtaatactcgtttgttacttctaagaatattataatcaataaaggagatatgatatagtataatggtaacttagaaagcaacactgaaattgtaaacgttagttgacttaggtagcttgcaacctaaaccaaggggggctttagaagttagcctagtaatcattcattgctttagaaggcaacaagcatggatgggtaattagtataaagaatgaaatgattaccaagaagtggaagtgaaagtaaaagtgaaaggcctcgtgggggcttgggcctctctcactcaaacctgtgaaatcatgaatgaaaaatctaagaaatacaaaaaagaaaaaacacaaagggtctgcaatcccaatatatacgatcttcataagggatctttaaaaaatgacagcataccaagaccctttattagattacactcatgtggtaccaccaaagagaaaaaggatacaagaatcagaatgaagctgaaaataggatacaagttaagaccagcgtgatttggaaagagaaacatggacaacaacaagcctacttttttaatacagccaaattgttgagaatgttttgagagttaacttgggtctatgtatagttgcaaaatcatacttttttatatttttgttatatttatgaatgtaaactcaacagggctttggataaatattcttttaagcagatgaaacaaaaagaagctgaatagcgctgatgcattataattagaaaattataagtccttcatttcacagagaggggaaaaaggattgaaaaaaaaaaaaacttatatagctacttcacaatcccttacaacccaggggttagacatatattcgttttcagaagttggttgtccaattgatatgacccagttgaggctgctgatatgcaccaacctgtgcaccaggagcagcagcagccaccccaacaccgacattgccacccattgcagggcctagatgatgtggattagcgattgcagtaggttgagaagggtggtacaaacctggaaactgcatgtgggacgactgtgctgcagccgcattgaaggaagcatgaccagtatgagatggcatataagcagcatgaggagattgcccgggcatgttgtagtatggagtggattgcagacctggaagctcccttgggttctggatccagatctcagatgtctcagcctgtcacaccaagtaacataataaactaagttaatgatgaattttaacaacgtggtcagcaattgcaaacatattgcaaccaataaaatttaaagccatgagaactctagctagcattatttgtttcacacctgtggatttggaacataaagattgcagtctttgtatttaatgcgtgatgagtcttcatgcccagaggctcccccgacgacaccaggattgctgatagcatagccatttggattagaaaaatttccaaaccctgttggactgccagcagggacaggcttatactgttgaactccatactttaggctgttggcattaagatgggtaccaccaccaggcatcagcacataactgtttccattggatgggtgcggatatgcagggttattggaataaccaggcatggccattggtggaacataaacttgaggaggcaaatactgccgatatggtatcagatttgcgaaatgtgaaacatgaactgatgggtacatctgtggtacaggaggttgttgctgtggttgctgttgtaccatggcaattgttgatgagggaacattgggattatgagagctcaacgcctacagtcaaagacagtacacaattcagtcataaccaattcatgttgttacaaatatgcatgaagacatgtacatacatgcataaccagatacattacaccaatacactgcatacgctatcctaacacataacatttaaacgcagaaaaaaaattaattagagcaaaacaacacgactttaaggcagcaaacgagcaaaactaaaatttcaccaagaattttaaatagatataggagaaaaacctttttttctttccaacaagaattttatttagaactccaaaaaggaaattagaaagaagtaaaagtgtaaaacaagaaaacagaatataattgtaagctaatcaaaccagtagagaaattggctttaccatgctgaaagtagctaaagtattgattataacacatcaaacaagaaaaacatacctcctgatgcgatggtagggcttgtcctctcatggcttcctccattgcaggtctgaaatatggaatatcataaccggactggggatcataagcctgcttgtaaaacagcatgaattagaaaaaccttaggcaagacatgataattatgttcttaaatataagcatctgatcatcactaagataaacaaaaaacctgtttccaattgactaacaacaaaagatggtacatttgatcaagatcaaggatcatcttttacacaaaaaaaattacaagtctgaacaatgctcaccgagaaaccaggtaattctggatgatctggctgctgctgtgactctgaaggggtataggatggactgttgtcttgaaccaatccaatatctgaataactatccaaatttggaggactcgaggactctttcttatctgccaattgatcgtcagacactgcacctgatgtttgagaatcagattcagaatttctgtttttctcatcaatcaaatccacttgcttgctgctagaagcctcatcagtaattgactcaggagccgacaaactgcaacaaattatcatataaaacgggtatacattaaataatacacaaaataccttatttctgacagacttttaacttgtggtagagtgtctcaaacatttaaattatttctggcagacttataaaagtaacttaaggtctgagtttaacattcccaaatattcaaattttggactaaacaaattccaatagtctaaaaatgaccataaaacagaagaaacatagggatcacaccaaccttgcagcatgttcgtcatttgcctccaccgctgcacttcctgcttgaaagccattaaccagatcgtgagacgaatcgaaatcttttccaaagctgccaaaggtcagatgacaacggtctgtctcagggactctaatatgttgtgcaatgatgacattctgattttcatgtatgtttactcttgaaagctgatcttgcaccttagaatcatctaagtcttttgaattgtgagcaggaggagtagcagattttgtgggtgttccaatcacaccagggccatttaggcttggcttttgacttgatttaggcttccactccttattttgggaagctgcacgaaaacacatggttcatattctacctaatttataaacatgtatgaatgggggcctattattagccaacacaatacttcagaacacatactatgtgcaaaaacacactttttagaacatatataaacacattgtttgcatataaacattatttcaagatttacctttctgatgacctacgggttgttggtgtggctgcctgttaccgtaatgacttaataatgatctgctaacagacatgctagggataatggattcatgggtttgactaagttcatcctttttagatatcgtattgaaagactgtaaagattctgtagcaccctcccctcccaaaattgaatttggtaaagaacttccagctacagactgcttggagttgtcagaagactgtcggcgaacacccaccaccccaacttcgcgcttaatagcaccaacagaaccagaagatctagaatcaggagatggcacatgaacgggatctgtggaagaggaatacacccctatggcagagctgcttgatgccaccattgcaggctgcgatcgcggattgttagctttccctgcctgaacaacccgcttttcctcagatacttcttttctggcagagccactagaatcaatatcttggacaattctaaaatgggaatcaaacgatttattcaaaccctgagataaaatcttgccatcagagagtttctgactgcttgaactgccaattgaactgacaacagaagaaataagtagttatcatgtaacagccccccaaatgtttaagacgatttgaaaacaaataaatcaaatcatacaaaaaaaaaaaattgaaaggatatcaaaggcataataggaaagtggccttcaaagattgatgtgataaatcacattaatagaaaattcaacataggtagtttcaggttcatgctcaatcaaatatcctctggagcatgacatgttttaacaaaggacagtaacaaaccttacctaactaagtctcttccttccatttatgcttaccaggctcccaagaaacaaagttcatgggtaatttttttcaacatttagataagtttagaccgaaaaaaccataaacgacgtgccaaatacaaacatcacaaaagaagaactagaaaaacacaagtacacacaaatgacaatgacaaaaactttaacccatatatcaacaaaaagaggtaccgtaagttgaaatctggtaataataatgaattctatacacagtcgcagatcctacttgataattaacacttttatataaactacatctcatttgacaaaaactgtcaaatttacttagattttaaatatgtgtgaacaagtcacaacaggtcaagaacacagggtcttctaaacacaaaaatgcacttagatatctgtaattaaatgtctgtaaacgatatgaatctttaagcagctcaagttcaggcaatattaggacattttaatagaattttctattctttaccattttgtcaaaactaacgagtatcattccaatactttatctaaggataataggccttctagcctctaggacttactcagctggttgtataaaaaaatttaactccataaaaatatgttgcttattttaagactaacaaattaaatgatattgcagtaaaacacaactaggcattcttcaaataaaagaaaaagtaagttagcacagaaatgtaatgacataccccttcccagaaccactagacacgttctcaatggttgatgttgcagcaggcattaccactggctttgactctttattgatatttctattaactctgttgtctctcacaacacgaaactctttgctaactcctgcataaaatatgattatgtgtcaaacaattgaaataacatcatacagagcaattggcgagattccctaacaaacaataagttccttgaaaaattcaagcaaaatttaaatgaaaacaattaacaatgaaggaatatcttaaacaaaaagagttcaacaagacaacgattaaattatactacaaagaaaattacaaataaaaaccaaacaaacaaaaaggatcaagaaataacttaaacagaaacaggtcactgtctactaagctatttacatgtataaaaagattaacctttttttgacactgggagagggggattcgaactagaaacctcctatatatgagaagtttgaaaccactaggctatgtctatgaccataagattaactcttttttgattaacaagaaaaaaacttgacataaataagggaaagtggagtaacatctcaaattgaagaacaataatttaagaaaacttttcaggttaacttaaacaatttattagtgcgagaatccttcaaaagaaaccagataaaaacgcacatagtgagacctttggctatgtactatgtaatgccaggtcaagaaaagtttaaaatgatatatgtgtatatatatacgtaatacataaatacagttgtatttagattagtatttaaacacttcctatttaccaggcaaagcattccgagagtagcctcctctgcgagaattacgatcagaatgtgtatttgctttcacttcttgacctactggctcagaatgtctccgtggctccgttgaaccttcataccctacactctaaatccacaagcatgaatataacatccatcagtaaaacatcatcaacattcctaaagcacatttttcttcaccaatttgcagatattgtcatttatgatgcctaccaaacaacaaacatatgcaattatcatatgttagaaaatcaatgagacaccaaaagaaaacatttgcttgctaaactaaaccttcatatcattttactatcaactaaacaaagaaacaaagatgtttttttcccactttactcccaacattgctcattgtctataaccagaagtgtttgaaagtggcataaatttccctagtccagcaaacaaagaaaaacttgaaatgaatatgtcgataaactaaaaaattatgtccatagtgtatcaactctagacagtgaaaatatatctgtagttaaaacacaaagcttaaaaaacattaccaaaaaaaattgcaattttggccatggcagtttgaccaataaaactcccagtagccccaaagtttgtgagtctatggggattcgaaccttacaaagcactttccaacactccttacaactagataaccccataaaaaccaattcatatgaagacattaacagaagttactctgattcttttaaatataacggcagatatacaggccccaacccgactggtcccaaaggggatactccacaaaggttagctaagccatcaatttgttgtttctttttcaaaggaaccactaaaaagtgcttctgatgtttacattagaatgtccagcacataatcatgcaaaatacagtctaattccaatatagaagcatgaaatcttgatacagtaataacagaatgtagtaattctgatttagaaatgcataatttacctcttttttcttgtctttttttcttttcacctcgtgaaatgggtctgaggtaaatcaggggaacaatgtcagaattcagcaattaaaaagttacattaatgtttttttaaaggcataaacgtatgcaagaaataaactaacaaatgatgaaaagaaacagtgtgaatataaattccatggtaccatttgcgagtgcgacatgctttaaataatctctacatacagaagaaatttacagtacagacggaaaaagttgagttcacaaaagaaatgcaatgaattcataaatgggtgggtggtcacaaatgatgactcacaaataagtgataacctccaatccaagaagaggcacaaaacgagaaaaaaaaatgacagcaaagaactaacaaaactcgaatcattcccaacatatatccttacacatatagcacaatgcgaccaaacacagccagtaagcagagtaaatatcataattatgcaacaaaaatgtaactgcaagctgggacataattaaacagctaaaatactaaagccatttattttgcatgaatcgtcacaacaacccccacattaagaaaaatcagaattattcaaccctatagagccatggggaaagaaccaaaaaattgtcttacaatccagacttaaaattaatttacagaaacctaagtatgtaagcaaaatatataaccagctcgacagtcaaaatgcattactcatggacatgtaaacaaaaggctcaggaatcccaataaccggctgaaacgcaaataagagttaaaaaaaaaaaagagagcccattatccaaaaccgaggggggaaaagtcaaaattatgttctttaaagagaaaagtgtaaaggcgcaccttggtttagcaatttctgagtggtttcattaggatccatgttggtttctttaagcgcccagtatatttcaatatcagagtgattacccacaacttctttgatggattggatggttttgcgtactcccgccgagagtatctgaggcccaacttcgattcgcgaggcagagaccatatctttctcgctcgcgcgctcgttggtctcccttccaaatacaaaatagaagaaaagacaaaacaatatatatctatatataaaagaagaaaatcaaaaccctaacgcaaccgaagaagacgatgaagataaaagcaaggctagggttttgtgaagcattcgaagaagaaagagaggaaaagtgggggaaggttggaagcgagggttttgaaaaacgttactactactacttactacttaagactaccaagtagaaccactctaagcagttttctttcttctcttttaattggtttaattgtcaggattgggaaacaccaatttatcttaatattacaattaacgtaattataaccctaatttctccattaagtccaatcttattaatactgaatttacccgaattggcgaccgttaattggtttccacggcccatttactcatatttcggcccatttagcaagcgcttggtccagttcgaaactaaataaatcacttagctaatgattaaaggaattttttcataattaacccccatttttaaatatttttatggattagaattatttttaacaaaaatataaaccgttgttttttttttacgttattttcacaaaaaatatttatactacacttttgatattgtttctataaatatagttaaaaaaattcttaaaaaattataatttatattccgtatatcaataaaaaaaatagaaaaaatatgacaacatggatttaatgatttattgagttattaatcaaaatacaatcatttagctttaaaaagaatacaatcattccgattgtgcatgctttcaataatttcctcatttctgaatgtttggcatagatccactagcttctcgtttggaaataaaaaatatttttgtatatatggatcaaaacaaaatataattacatgattatcgtattctgattgtacaatttttttccaatatatttttatttttgttgtaattaagtcattaaataatgggatatataaaaaaaatatggaaacttaattgtactaaatataatatttaaaaaatttaaataagttaaaaatataagataaatcatcataaataaaaaaaaatatcatgaaaaaaaaaaacttaaaaatccatatataaattttattttaatataatcaaaattaattttttttaatgaaaaaatcaatttcaaaaatataatacatttgatttctgtagtttatgcttcaaacaaagagaaaaaaaaaattaaaacattaaatacatgatttaaaaagacatttataataatataacacacccataaaaaaactaaaaatacaaaaaactgaaaagaaaaaaaatgagtaaagctaaatgtgttatatttaaataaaagattttaaatttcttaaataattgaggacttgactgaaaagaaaaaataaagaagataattgaaaattttgcaatagacaattaaaagattacatgccaaattgacataacgaaaacttccaataacaaaaccgtagcaattttacttttcccaaatactatatataaaccgtaggggaaaaaaaactgacagtactcaccgcttaactataggcaatcacaacaataggctttattcaattgtacaacaatattatttatagttaataaaaaaaaaaacaaagatttatatatttcatctactgacacggacagttcatgtttataaatcagataaaaagttgatgaaatatccccactatgaattaaatttcactatcacaaagttaacatttgccaccatcttcatttccccccacctgttcaggcttacctatatgcacagatattattatgacttgcacggcatcatctccactaaagaaaacaaaaataacccaagaaaaaataaacataattcacaaggatttatgatatgctcaactaaataaaagtaagaaaattagggcacgttgacatatgattgctttgtttcttcatttgcttctaaaattgattttttgatgatgcccactcagtctcacatgtccatgtctaaaatgacgtaagttacaagtattgttcctgtatcctggctttgttttcttcccaccataaccttgcgtgcatttcgctgaacttttctcggctgcatgacataattcatacaccaaaataaataacttgtactagtctgtttcctatttgataatgcaaaaaacaataaatggagagaaaaaaagaaaagccaaatggctgaaatggaatattatgcggggtgagttttagtttctgatgacaatgataaaatttctgagttctacttttgtggaaagtaaaacaagtaaaagtggaacaatagactacataaaagtgaagagtaatctcaaaagctattgttgtttaaattataacatcataatccttactgtagcaaaaatattttaacagctcaccttttaattcatagatgataccaattcaaaattctatcataatcaaaatagtgtgagcaactactaacctgaacctcacacgtctaagttcccgagtgccacctggttgtgctctgacagtgatgtagactcctggttcatcctgttcgacccattcggtctccatgtcactggcattgctcatagagagctcccctgagcgatctgcctctctcgatgagctagtccttgcagattcatcgactgaagatgtctcagtcttcatcccactaatgctggaaagtttaggtgtagaagctaatgcccctggatcattgtagtggtgggattgcatgaggttgtgctcaagagactctgatgaagagtagcttatccccaattggtgaaagttgcgaggtaagcgttctttgcccagaggaggagtcatagggctgtccctaacagactcaatcttaaggctctgaaagattaagagagatttaaacatcaatccatccagaaagtgaaccatgatcattaatgacatatgaaaactaattattcaatttgctaattcttcactcttcaagaaaataataaagatcttgtttgtataaagctatccatcagtactacatgtttcaagtccatgtgcaacatatgacatatatgatcttccttgacagttcaaacagttacaagcatctctatattgtactaaagaaaatatatatacaaaagtgtgtatttaatattagattttgattttttaagagtttaatttcaaaaaaaaaaaaatattagattttgattttattcaaaaaaaaaatattagcttttgattattttcaaaaaatatatatattagcctttgataagtgataacacattttgcaaaggtaaacaaatatgtatatttacctcttgttcagatctaggtggggttggaagtgggactgcttggtgattgaacatctgaacgttgtataattccatgaccttgtcatagttttctgcccaccatctttgtgcttgccatttattgaacaattctcggctgatgaaattagaagatgatcattagaaaccccactcatgatctattcaaataaaatcattcacataagaatgctagagttctatttgcaagtttcatgaattgactaatcaaaacaagagaaatctttccatctttctttgccaagatgcgaagaggctttggcctagtttgaaacaaaggattggcccttcgaagagtgggatatctccaaaaattatcgaaaaggaagcagcttgataataatagctaatagctatgtcatgcataattcagttgctccatccaagcaaaacatggaagcaaaagacacaccaattattttatttgaaaatttcaattattattccaatcaaccagtggtaatcaagccgtgtcttcatactttcatctaaacatggcatgagccagtaagaaagcaaaacagaatacaacagactggatctgtattccatataaatctaaagagtaaattcccacagttatagagccaaaggcagtaatggtgtgtgtggtgcacataaatcccacacacacaggcactaaaagcaggtgagtagcagtgtctccagtgcaacaaaacacagttattctttacaaagactattgaacattgatcactgtgtacaaacactgcttcaaaaagttgccctgaatcaagttctcaagcagcataaaactttctcgtacagaaatccttgtttatagtttaaactttttgaataattccgctctaccatattctaccaaaatactcattgttctctctctctctctctctactttttcttcaatctctttttttttttttggtaagttggacaactactaactgttcaatcatagaggtgaatgataagaattcaccccttggtgacagatagcacactttattggaaatagtaatacaacaaaagctgcaaagtactaaacttgtctgcagtacgtaaggtaagacccacacaagggccacccaccaacagcaaaacaaagatgaatgccttacatattatttatttcacgtgctatttcagtgtcagcctctttaatctttacagtaagtgagaaaatgcaaatacagaaggacaataccacaacggttcaacatcacaattaaaacatactgttaacactttctattaataagaaagtcaaaactcaaaaccaatggtagaaaatgacgtaattgattaaagaatagaaatttgtgtaaatcacaaccacaactccaacatcacaaccaaatcataggcataagcatgtgagttcaattcaatcaaaacattttgggaggtgggtggggacttctattcaaaactagataaatcaattaccaaacaacaggaaatgagagagagagagagagagagagtgagaagagagagagtgagagagtgagaattgagtacctggagaattgagtacctgaaccgaatgcgcttgaggtcatttcctccctgaggcaatgaaacaaacgttatgaggacaccaggctccacttgagcaacccattccttaggctcatcttcctccatgaacacaactgactcggttcgtccgctcacagaagccggtgtcccttctccactagaaagccctttcaaccttgattccatttctttaccccaaacccttggcgtagaatttgagctccctgctctcttgtacccacaatggaaccttgccgagtccgaagccgcatcagaatcagcacagtttcggttattcgatgacccagaacagggcttgcaattcttgtaagcccctgaagccttcaacgctatatctttaatctgaaaacaaacaaattcaatatcaagtagcttactttggataaaaaaaaattcttagttcggattcaactacattttctcgggaaccaaacgagaccaggaaagttttaattttattttttacctgagcagtaagattcttgatggcatgctttgacctgggagtcccacccaccggatcttcttctcctttatgttgcagagatccattgttgagttgcttcgagcaagctatacacgtcaacatctatgattattcttcccttatgaaatttacacccagatttgtacggatcacagacttcgggagtatgaaaaagaaggaaaataacagaaccagaaaacgagcactccttcgataaatcgtataaattcacaacgacaacaaaaaaaaaaaagcacaaagcgtaatacagagaatgagaacaaacaaacaaaaaaaaacgagccaggtgagaatgaaaactcttaacgcttatagtgaggacaaaagaaaaataataggagagagagagagagattgaagaagcgtctgaaagtgaccgttaagggcggaagagaggaagatagtcaaggcttggatccaaatatgtagcttcaaaaacaaaaacccagctgacaaattcgtagtctggactctgaatcttcgttttcggttcaaagacctgatttgagtgagaaacacgcagatgggtgtctctctctctccttttgagtctttctcactctgttttcttgaagctaagaaaaggcattgagatttgggcagtagcagcagcgctagtaataactaacagcaataataataacaataaattatatatataaataatagtaggggagtaggaggaggcgcaggacagtagtattaggaaataggagttaggaggagaaaggtaacggtgggcgtggtggagtgagtgagtgagtgagtgagttgggttcgggtgcatgtggtttggagccttcggaggaggagtggcgctatgtgcgctggacctctgttttttggtgtctcgtgcgccactcaactcaagactgggtctctctcactcgcactcgcacacagggatggtacaaattgagagacagagagagagagaacatttattaatactaatactaattctaattaaatagagaaagatgtaaataggaagctagtgaacaatgacagctctaattgtaattattatataggaaaatgttttcattgctttaaaaagttgacaattgtaataaggaaagaattaaaaaaaaaaaaa

SEQ ID NO: 14231 - DNA, 9267 bp, Cannabis sativa
  modified_base (1664)..(1676): a, c, t, g, unknown or other
  modified_base (1894)..(1904): a, c, t, g, unknown or other
  modified_base (1954)..(1960): a, c, t, g, unknown or other
  modified_base (4632)..(4638): a, c, t, g, unknown or other
  modified_base (4699)..(4701): a, c, t, g, unknown or other
  modified_base (4750)..(4752): a, c, t, g, unknown or other
ccgcctcttctgcggctgggggcagtagtggtagtgggagtggccctagtggggtcagtactggaggtggtgatagtagtggcgctcctacttctacagctccttctacaaccactacagtataggttttttttcctttttttttttactatatttttttctcttcttaatttctccatttctctttttcctttaatatttaattatatatatatatatatatttataaatattgattatgagtttaatgtatatctgggcgattcacttattataatttgggtaaatcggcttattctcttctcatctcaatccatgaactaaatttaatttagaaaatttccattttccataaatattcctcttgtcgatcttccatcattctctatctttagctagctcccaaagtctactaattaattattatttctatcattattgatatctctacttattattacttttctttacttgatggcaactccaacataagtgtttcatgataattataagattacaactactcaaaaaaaaattagtattttaaaattttaaaaataataataataaaaaaaaaatcttatcattcttttatttgaacttcctcatactctttcagacttggatttttcttttattccatctctaaagaaaaacttgctcagtaccgtaaccattattcattttaccaattatatatcatatatgtacttttttgtctttctttatctgagatcaaattaatttctaagattattaccctgtgacatatcttgttattaccataataaattattatattactaatatatataagttcaattattacttatatcttagggtagctactagctagtaatatttggtttatacaaaactctgatgccgatatatacatatatttatattagcaggagaattaagtaataaatatatactagtactgatggtgtgttgtgtatataataaaactatagcataaaataggttaataagatagggcaacagaaaattacaactacagtcggtataaatcattcaataatctgccttgtaccttcatatttgtttttaatacataaggtcaattaccttaaaaaaaaatagtgtaagttacaaccctttgaaaatccttttgtatcattatcataagtactattattattactattataattatgttattaagatcgacttcggccggttcttttgtattaagacttcgaatttacattctttcttccctctccctaatccgaatcaaaacaacatttgtttatctctttttatttccatcccataaaattatacatatatatattataatattaaaatacaataagttaaaattaattttaaaaaggtcactacttgtattttcttttataaaggttacattattttatattaattaaattcaaattattttaatttttctcatatgtattttaaacaatgtgcataatatttagttttttaaaaaaataagatttcatttaattttttattttaatatttataatatattttatttttattttataaatatacttttttataatatgaaaaacaagaatttttttaaaaagaaacagaaaacacaaatacatattttaataaaataaaaacaataaaagaaataattacatgaaacaccatttttnnnnnnnnnnnnnttacatttttacgtttaaatattttttttatatatttttacatttttttttatagaaacaacatgaaaacaacaaaaaaaatacataaaaataatagaaaaataatatttaaataacatcaaaacaataacaaaaaataacatatagataacaaaaaatcaataacaaattaacaagagtacaatataaaaaaaactatattttttgtaaataaaatnnnnnnnnnnntaaaaatatttaaaattccgcacagctgtattttgtaattttttttgttnnnnnnntgtatttgtaaaataatcccaataataaaataacttcttctataaatttttgaagtgaatataaatgttgcatacatatgtatagtatatataatttacatatgtaagaaatttcaacaagaaaaattagttaattaatagtatgtatatagggtacaagcatggtgaaattaaaggataatcctttgtgtgattgctgggcttatatatattttattctgagtaaccaccacctcagtgtgaaaacgaccagtagccaaccctttcctccattccatgtatatcatattatatattttttattattgcctacatatatattataattattatatatataaataacaataaaaattcattatagtattctttttatgaatttgttataatatagcgtacatatattcatagacccaccgctatagctctcccaacaaaacccatttcttgaatttcaaataatatatccaatagaaagtcatattgctgtataatttattatttttaatgtataattgtcctattcatcatgatatgttgtttaaataatttccaaaggatttgttttcttgtttgattctctccctctctttctttatttttcatttttcgttccttttgttttattattaatcaatatatttttgatcatctatatatataagaatttttacaggttctttcactttctagcttttcatagaatcacaatatctcaaatttggcgaacgctttattatttactcttttcctttcttttgattgattttctttttagtattgctctcttcaattattttaacttgtttctgataaattaaacaaaagaaatcaaaaagtgaattccatcgatcggataatagtgtaaaagttattcaacctaatttaaaatacctcctcttctagaattagcagtaatacactacatcagatttattatattagaaaataggcttattattcatttgcattgtttataaatcaattacttcataatctttagagttaattggtagacaatatattaaagagtctcaaattaataatgtatgtgatttatatgattgtagacttttcttattatgaaatagttttaatataaccacgtacttattgtcaaaaattgtgtggctgattaactcataagttgagtctatggattcaaatactgtttatatgtatctgtattaatcgtatacaaactgtattttatagaggtatgtacaaaaagtatttaatttaattataattggatttgaaaatagattaattattggatgagacatcccatctaatagacaacaaaataaaatagtgatccaattatcatttaattatatttatatatttatttaattattttaaaaaaatatacattgattaattcttaatatgttagaatgtggaagtgtatgattgaagaagtaagaataagtgagtctatggtaaggtgcatgtggttccatctcaaaaccaattggcaatcagaggagtagcgtatgcatcttatgtatggtatttagttttcacatattatttagttttcacatattattaatgtaaaattctctaacatctcctctcaagatagtagtggttattttctttgctcactaatcttgcacgactcgatcacaagtggctctttagctcacagtggttcttttttggcacattatcctcgaatcacaaatcgctcttttggcttgtctcttttttaaccgatttttagatttggatcagttacttgtaagattttttagtttagctatgatatcgtgttagaatacagaagtgtatgggtgaagaagtatgaataggtgagtgtatattaattaattgattcttaatatttatttattttataatttatataatatttacatattaaacttgtttattaagacttatgcttagttggattcgatttgattaatgtgttgttatattctaattatggcatcgtgaaaattatatttgactaaattaacttattatgtatatgttgagtttatgttttattactgtgaaaattagtttttaaattatgtttaattatgtatatttattttaatgaaattcaatttaaatgatggtcaaaaaaattggatgaattcaatctaattcaataaaaaatagttcatacatccaatgcttggtactgattcaatccaacatatctattggatcagatcgaatcagttgactcaattcgattggattggatcagttgagtccaaatccactagatgtgatccaatgaacaacgactctaatatattattagaaaattttacataatacacttaaaatgaatttttctttttaaaattttatggattttttttttacacttttacggatgcttcttttttatttatatttttacgaattttttttaagaaaagtattgctttcccgtaggggcaacatcaaaataatattattctaaaacaatagaaaaataacactctaatagttgtataggcaaatattgttttcatgtagcagtaacgtcaaaataacattttttttaaaaaaagaatgataaaatatcacttcgtacactacaaaaaatcttactttttattcacaacaaaacttgtgactaaaagtaaaaaaaaaaaattgtgactaattataaattaataggggaattaccttatatactnnnnnnnttttaactttttttttcaaatttacggtttgagtttttaaagtggttgcagtgctagttgnnntaggggtttctatacgatttttgttgcaatttaggttgcagtgctagtnnnaataggagtttctatgtagaattcagtaaaaatgtaaaaacaaaactgttttgaaatgtaaaaatgaaaaaaccccaaattaatatttctacgttgtgactaaaaggtttgttactaaaatgtttgtgacttaaagtattagtcacaaatatcacaatttgttgtaactaaatgtacttttagttacaatacttgttgtaactaaaagtaaattagtgacaatttgtattcaaatactatgttttagtcacaagtaactttttgttgtgattaaaagtcacaaaaatttatgttgtgattatcactataagtagttgtttttatagtaatatttttgtgaaaaaaaaaatctgtaaaaatataaataaaaaataagaaattcctaacaaaaaaattcatttttatatacgtatgaaataattccattttattatatcgtaatatcgtataatatatacatcgtatgtgtcttatgaactttacgatttttatgacatatatatgtttacatacatttttcttttttgacaaatatgtttacatacatattgggtatacattattgtcaatataagatttaattaatgattattataattgaacaaaaacaaataagggaaataaaaaaaaattaaaatctttacgcaatattattaatttacacaacctattaaaaggtttataattactctatctgttttaaagtgtattaatggtcaaatagtatatatacatatatatttgcatattattgactcggagtaggttaagcattaatgcatcatgatgaatgcatggtataattatttatctgagaaatacttttttttcttaattatctgagaaatactttgtaaagagtgtaaatattatttgatcacgtgtaaaaaaaacaaaacaaaacaaaaaatatcgcaataattgctcttaaaatggtacatgtatatactttggaagaaaccctaagaacactaaaatagcaagactgagtcaaattgttggaagaaaacaaaaaaggagaaagccctagttagtggtgtacggtagcccaagataaaatttcctacactgtcccatttgtcctcatataatgcattggtattaatactcttcagcacaattcatgatatacttcatttaattataaagatatatatatataccataggggatatggtctttaaatttttggcttgtgtgtggtggggggttttctaatttctttatatatatgagctcatgagtccatgtattgatattttggggcagaagtgtagttacaataattgagatatggttttgttttgcaagaggaattaatatatataaccaatatatatgttatctattagctagttagcccattcaatttgttggcttcctaagaaggcacccacatggttttgcttttgtttcaaggcacaaatttataatacggacaataccataaaacgtggggtaatgttataatatttcaccattttgcaccctatatatatattttacacacacatgtacctggcctttcatcataataaataaatatactagtttgaaattaataaattgtgcattaacggtacgtgcatatattgatcgattggtacatgtaataataaagatcctcgggattgttcaaagttcaaacctcacagaaagtcacagaccatttttcaaaaggtaccctactcagtgcgaatatatagcctctctctctctctgctttggtaccttatagcatattattattataataatattaatggatcacagactttgttcattgaatatataaatgatcaaataaacttttttttttcttcttattttgatgaaaaaagtgtgattgggtgatggatgggatgcagtcacagagctgtgctcttaggaaaacataaacagttgtctttcagttgatagattgtctgataccatttatggtgtgttagattttggagcgtggaaaactaaactatggcttttcaaagaaagcatatcatttttttttagggagaagagctaagagacaaatgttcggtaactctgttgggacctgaatcgtccttatacttaacaccacatgatgtgattagtcattagtgtaatagtctaatactcttctttgttatctctctaggtttgcttcaattatacataaatgttctttttttatttttgaaagtgagatgaagtagattcctattataagtaaaaattagattttttttttctttagtctataggaataaagaacaaaagtaaatattaatgttagcaagtaattaatttaggctccaataatctttcttcgggcatgcttctcatctcccgcaatgaagaagaagagggtcgctcgaaagccgccccattcaatctaggaaaccacaattacgagtgattcgcaatgaagaacaagagtcgtctttgctttcaagggttgatttgatttcacaattgattgcagaaaaggagcaacaatagcatccatcaatgtttgttcgaaaactcaactcaagctaacttggtgagttttgatggtgttaaccaaagtcaaatcgggttgaggatgctatgaaagaaaatttccaatgttcagcttagtcacattgggcaaaattaaagaaaaatcatttgataagtgcggtagctaagctccattatgaggaaccgatgaaagaaagtaagcgaattgcagagcaagctcagaattagagctttgcggtaatttatatcactataagaaatatgggcatcaatgaggacaattgtcgtcattgttaagcttgttttaaaaaaaatttaaatttattttgtttttatttttaaaattatattaaatatttatactttttaactataattaatatataaaactatttaattaattaaaatatgaaattatttaattaagagtagaaaaagtaaatattttttcatagtaaatatttatagtcacaaacattacaatatcattaaatactgcttacttaaatatataatgagtcttcgtaaaatgtcaataaacataaaattgatagttcgtaaaactaaaataaaatttttaaaagaagtttgtagtagcatcgtcatcattactagcatctctagtaacatctggcatctgtgggtaatatggcggcatttgcgaactcgtcatcatctgagatgtctactgcccatgtggtgctggcatcatgagagatgtctgatgtccttgttgtgtcgacatcatctgagatgtctgctgttgtggttgtgtcgacatcatttgcgatgtctgctgcctttgttgtgtcggcatcgtctgtgatgtctgctgatattgttgccctcgtgtcgacatcatttgaacattttgcggtatctgtgacatatgttgtgtcggcatcatttgtggcatccgagactgtgacacatgagacgtctgaggcgattgcatcatcatattcatcattacttgcgaatattttggcgactgtgccaaaaactacaagaatgactagtcatttgactgtgaaactgttcaggggttaatgatgcagacaaaggaacaggaggttgctgtagcagttgctgaaacgaaataggagtctgctgcgactgctgatgatgaaaacccattgactgaagatggaccaaattatctcgaggcatttgagagtgagacggttgtggacgcattagttggattagagctgcatcattcatctcaacatccattgattcccgatgttcacgtgacaattgttgagtcaacatctgtatttgtctctgcatctcattaactattttccgtcagttaagtttatcagcagttggaggttgtgagcgtcatcttgatgattgccctttcaatttttgacccactcctcgctgatggccacacctctcttcaagagtctgccgaagtatcttaagctcaaaaacttgtgaagattcaggttatcaccatctattactataataagaataagttagaaaccagccaaacttacaattatttgaacatatttaaaagtaattattttataaagtcttacatatttatttttggcagcctcattgataaaggtgtatgtgcctttcttcgtatgacaatcttttcaagtctcaatgtaactctttccttgctgataaatataacttgttaggaaactatatttaaagtaaacttcataaaataaaaatttaatatattaacttacattttgattagccatagttgccgatccttgtcttaaagagtattttatcttttgtcgattgagagcattttgcttataccgagcaataaattcaggagttgtgaacaattgacatattaatcgccattgttcttcattaagttcattgggagggttcttgactgcattttcaaatgccatttgggttttggttaatattctttgaaatgtgtcagtctaatattctttctcgttttgtacttctcggccatctcagatatcgaaatagctattaattttagattgatgtccatctggtaataatgctgca

SEQ ID NO: 14232 - DNA, 13017 bp, Cannabis sativa
  modified_base (12803)..(12809): a, c, t, g, unknown or other
gcaacaggaccaccaccccaccgaccgccgccccgagatgagtcacggtcaacgagcccgccgaggacgtcgccccggttctaggtcacgtgactcctccagagatggccatgacggcgctggtagccttagggtttccgaccagaaaaaccttcaacaacaacagcagcagcagcagaggccgccttgtacggagttcgacatggcctatttccattcctatgctcacgttggcatccacgaagagatgatcaaggtttcatgcggtttactcctatcttcttcttcttcttttctctttccctgttctgcattttgaaatttaaacttttgcactttctagtttgaccataatttttctttgctatcaagttttagctatcgtgtaaaggctaatgttgatagaaatgagaagaaaatgttgaggaaagaaggggtaccgtacttcagttagagtgtgataactcataagtaggaggcagaagtggaaggcagggtaagatgtagtgggtttagtttaggatgaattggttgtttggctttaatcggagagaaaatggattagattattgatttcaattattagtttaagccaattttcaatccatgcgtacttgacatgtattctctattttctctggtaccaaacgaagtcttacttttcatctatactttctttctttctttcgattttgtagctttcttacttccaattttctctcctccctaacacaccttatggaaagggaagtgttgaggaaggaaagaagttttactgtttctttctcatttttttgtaatcggattagagcactggaaaaatatgcacgtctgttttgtagtaaaattttcagtctgagaagatgcccaagtatattcgggtatatgcacttggtagccgtccagtatgttcgttatcatctcatggtagaagcacaatcacatcctaactgtttgtttgcatctgagtttgaaatgtgagtgaaaactcaactgtatttgttttaagcattatgtctgtaaaactgaattagtcctccctcctcaaagggatattcgttatgtttgatgtgtatttgcatgtcattgctaaatgaaaatgttgtcatcacattacaactcgagttggcttatgaactgtgattgaggagaatatttcttcttctatacattgggtttcagttgcaacaaattgttttggttatcacttaccataattactgtttgttggcatgataaaactcaagctatgaatgatgtgttaatatcaatgtaattatttgctaatatggtaaaatctcatcatacaggatcaagtgcggactgaaacttatagacaagctatcatgcagcaccagagttccattgaaggaaaagtaatatagctttaattttactaatataatagtctgctgaattaagtgctactttattgtaaatacttctgtttttattggaattgcaattcctagtttacaaacttaattaataattcaaatcaatactttgtaagattcatgaaactttatactttatgtaaaccatgcttgcagctagagagactacatttctgcattgatttttggttctgctgctcactttgaggaatgtcatgagtacgtggtggttatgtgattcactttctaatggtcttttactttttgtttttcaatggaacactgcttataggttgtggttgatgttggctgtggcacaggcattctttcaatattttgtgctcaagctggtgcaaaacgagtaagcttacagctgcttgtaattttaataatatgtgaaaattgccactgtttttatctattactggccaaatgctcgaacagttatgttttgtatcttattaaaagaaatctcaaacaactaaaagtattattatcatcttttgatgaatgagaaatggcttaaatttgatggatgttctggtataaaacaaatctttaaaagaggatgatttctttcttctctctctctctcttttgtagaagtgaaaaagatgatggtattttattaatagctaatagaggaattcatttttaacacgcccaattgttccttctatatcaataaactagtttttttttctctcttatatattatatttacaaggaaatttattcttatgaagaatctgaggttatattgtgccatactgccataatctgtaattctttgcaacttgattctattaattaattggaatttagatactccctctgtcctaaatttttatctgcactcctaacatcgttgcagtcttttatttcaaactaagtataataataaatctggaattgaagtattttttcttatcctttatttttcattaggattattgtaatgggtgttacaattagtataactagctttacgtttttgacctttatcatctaatttgcataatatatctgatttattttattttgtaacttatcaggtgtatgcagttgatgcaagtgagattgctctgcaggtacagtttagtgtaaatgcacatgttttgttttatgcctagcatatgtgttatggtctccataatctacttgtcaaaattcatatatctattaaggttttgatgtgtgactgggcaaatgattttttttctttcttgtttatggtttgatgaaccggcctatagaagtttctcgcatttatcttgaacttgaaaatgtattgaatgcattagttattagtttctacataattaagaactggttattatattgaatatgagctttgaatggattgatcttgttttgcaagcaggcaaatgaagttgtcaaagcaaacaatttgtcggatacggttattgtattgcatggaagagttgaggtaagatgtcttaatgatgcgaatatgttagcaacagtggcttcattattattgtagaatttgttgaatttactcacatagtaactaagacagtgtagatccataggattcttatctttcaattaaggaggaaaaaaataaaaggttccaattggaataaaaagatttaacttataacgtggaacaaattactagagatttgtagttctgagggaagccggttttctcacatttgttgtttttggacactgttccatgaaacaggtaccaatgtgattgtggattacccatggtgattgtcttgacaaactcattggtagataacaggacaatgggattctcattagattgaaataaagaaagtatttgtgttttttttgtaataggttgtgttgatggctaataaagagtctagtgcaagtatgaggtcatgggaatggttcatgagattaatttttctgcaatttaaactggactagtgctataaaatctacgttagctaactgcctaagcatgttcatgttatgggagggcttaattttatttttcaccaactgacttaccacatttaagagctagccttctctctatacacattattttattttgcatttatctttacaccgaggcatgtaaattttgcaggatgttgaaattgatgaggaagttgatgttataatttcagagtggatgggctacatgctcttgtatgaggtaatttcacaccttgcagtatgttatctaaataattaactttatttaatttgtgttttattttttataacttaataagatctacgtggttttgtattagagtatgttgggaagtgtcattattgctagagatcgatggcttaaacctggcggtcttatacttccatcacatgcaacggtatgtttgagttgattgttggtttattctaatctattttctaatcaagaaaacgtttaagttactatgagttaattttagtatgctactttattgaatttatcttttatttgaaatgaacttgtggcatgcacattatgctgaacttagcttgaatggtttgcagttgtacatagccccagtgacacaccctgatagatacagtgaaagcattgatttctggcgcaatgtttatggaattgatagtaagaaaacatcaaactacgcaacatgaatttcttgattgtgttggtgatatttatgatccatattttgtcctattatctatttttagtaaaattgttttcatgtattgtaaggtgatttttaattcttctggtatgtgtatattttttgtgatactgtattgactttttctttttcttgggagggttcctagattgtgtttctctgtttttaaattagatacattttgctttgcttttctttccttttttgttattattatcttttggttggtgtgtgttgggggagggaggattgtcttgttatttttctcttcatcattgagatagtaatctatccattcagttcttttcaaaaacgggtttcctatttgcttataagctttctcaggcttcttccaggacctaagtaaacataattgtgaaataagttttcacatatagtgaggtacatttttcgtaatataagcctagtggtaatcaatatgtttaccatctgaaatttatcaatagaaataattcttttgacctcataccttcggcattttttccattgaatgtgctcctgaattacttttccaagaattgcttggtgtttttgatacccagaaagatccttgtgtctttgctggtaggtgtgatcaatttaagatagattttcttttctgggtagcctgtgcttggaatgctcagcttatataccacagagcttgatctaaatgtgctattcttcttgtataaaaaggtgtataataaataaaaggggtatgagtggagaataggatagtataaatagatgacgaagggaatagagtgggtatgcaggaattgagaatttttctctgcatctgagagatcccaagggatcactactgttgtctgttttcctctaattcaatattatactctgtggcttggctgtttggctggttttgtccgactgttctattgtctggtactatgtaactgggtgctctggtggccggagcacaacagcaacctgcgcttggcgtaagtttatatatcacagagcttgttctccataatgtgctgttcttcttgtaactgatccatctagactggaggttactattagaacgtcaatctgtaataccttcaatgtttattaatcatgtagtaaacttgacttaaaatgttatcagttacaaaaagttgatctagagtttaattacaagaaggcttataccttttccttgagcacttgtagtgaagttttctgagaaagttgatgattacaatgtttctttttgattgttactttgtttttatatatattatgactcgaaaacaacatcacgcatttttctgttgtaattgattcagtgtcagccatgatgccattggctaaacaatgtgcatttgaagagccatgtgtggagactatagtgggtgagaacatcttgacatggccacatgtggtaagtcccatcttttaagttctatgatggcaccgatggataaatgtgttaactttgaatatgtaataaccacctaatttctcttccacgaagtgtatggaaattaatttgctgcaataagcgtgcgaataaaaaccacttcactgttcatcacaaccataattaattttttgggaactctagttaaatgaatgaaacggagttcatccctatacatttgacctcgtctcttctcttttttaaaaaaattaatttctttttgctgtatctggattttccccccttaatttgtttttttagtccagagctcattaaaattttcactgtttccctcatttatttaacaaagcaatagtaataagaaatcagaaatacaaaagtcattgttgtttattcatccaattcttgaaattttcagttttaattagaaatctctacggatcatgtgtaaaatatcagcatcaattttaattaaacataattgtttggtgaaattccttggttctttgtgattgctgtttttcctatctatcctattgtcagatccatagatgggggcagctcttttgaggtaattgttttagggaagtttagatcattcgtatagtggaagcatgggctgtgcctcctcaaaattcaatagataatctcacatgaaaacaaataatttttttctgttttgttgtgtacttgtgtctgtagaaattttcaagctgtagcatctaatttttcttatgtattttttctaggtaaagcatgttgattgctatacggtaacaattggcgagctagaatcggttcatacaaaatataacttcaaatcaatgatgcgaggtgatcctttttcttttctttgttggtttacttattattattatttaattttaaaagattataactgaagatttttaggttgatgcagtggcttaactgcttagatgtacccttgggtaggactgaatacttttatttttttgatttttttaattctttttataatatttctatgattatttctttctttcctgagcaataaatattgacagatttactatttacacaatcagctttgtatattccttgtacttgaagatttttatagtgctgatgttcttatttcatactacttttgtgagagtcatcagtatacctaaactttccttgtttcatgaacagatgttttgttaatttattgtataaatttcaaaactgaaaggaagtaactgattgatggaaaatttcctaaagaatactaacctattattaagataatattatcttatttatgctacatattgatacttcaaataaagtaaaataaccttgctgaagataataagtataaatgcaacctaggtagcaaatttatgtgttttgctgaaaatctagatttaacttctgtaattatttatgacattatgatattctcatggaatctttattggatttgtactcatctgtttatttagtttgctcatttgttatttttgataccttgttttgcagctccattacatggatttgcattttggtttgatgttgaatttgctggacctgcaatgtctcctacccatagtcatgcgcaaccctcacttactgagacaccagttgacggtaatcagaggaagaaacgggtgaacccaaatgaagcacttgtgctatctaccgcacctgaggacccaccaacacattggcaacaggtacaatgcctttaggtcaaagtcttgtgtacttgataactcaaaagaccttgcactgttgtgcctatatcttcgaggagcttgtagtgtatgccattttctacatttagttaaagaaacaaagaacaccatcttgctacactgattatccaactgctgtagaatttaaatatatatgttgaatatgataggactaaatttgcctaattgtttaaatgaagaagttttccttattatgttaaggatagtaggtgcatcatggattaagtatttaggatcattaattttagaatttgggtaaaaaattgagttaaatccccagccatgagtttattgtactccgtcaaatgaccagagaaagcttggtattaattctttggaggaaatgggaagtgaatcatatagtcaatcaactccttaattgtgttgtagtgtacctttatgattaatagtctagtgtttaacaaaattaaatttgcagacgttaatatatttctacgagccaattgacgtggagcaagatcaactgattgaaggttctgtaacattatcacaaagcaaagaaaatgctcggtttatgaacattcaccttgaatatgcgtgagttttcacttgttttaagttaatgacatttttacttcgtataaaatttaaaaacaactcaagaagccattgtattttgttgctattgcagttcaggaggtcgttcctttgtgaaagagtctgtaatgcgctgactttacctgttgcatttcaatttaaggcttggttactcgttcctcttgttctacctgcacctcccttgctgccccaaaaggttaggtttttgacaaagttcaaaaactttactaccagggatactatgcaggttcactcatttcactagtttaaccatgtaaagaagccttacaaagatcagatctgcggctgattttaagaaagttttgacattaacccctgtttgtttgggctttacaaatgctgatttgagaatggtcttgatgttgtttcttcaaaacgtttgtcaaacgggtcttttaactgtttagtctttttctttgttgcacatcattagaatctagaactatgccaatttttagacatcttgagttgagtccatttgaaattctaacagattcatactaacatccttgtcatttaactcattgtatttttgcacctctattaatcattgataatcttcatttcagtattttcgattagcttattatactatttgatacgatccattatcatctttatataatgttcttattaatcattgatcatcttcatttcagtattttcgattagattattgctctacaagaccagctctagcgaagtttgatggtagtgcatcataatttcaatttgcactctagcctaatatcaaaataatttggctaaatgttcactgttgttagtattttgttgcacaatttgtcgatgatcgttattattattattattatttttttttgagataatgatcgttattgttaatgtcatgtgataataaataggtaaaagtaacttactcggggatgtaagtgttgcaaattttattacataagaatttttacagcatccttattttatgatattattttactcatgcatttatgactgttagaatgcattagctatattagctttatagttgtaaaatggtttagttagtttcctatttagtctctctaatttagttatttctcatttactctctaattttgtatattaatacatactattctatttaaaaatatatataattcattcaaaacacatttagagagtgagctctcactgtcggcaccaacagacaatccaattgccgatctgcagaactttggagtttggtggctgaaaccgtcgtgcgtgagccacacgcgctgcttgaagctgtggcgataacacccacgcgccacagcgtgggggcgtgtgaggtgtcatttcccagtcgtttctcggtcggttgccttttttggtgtttctgacttttccgtgcatctatttcaaccattgttttcttcttatgtgattgttgaggttcgtttgtcatcctttggtgttattttatcctttatctgcaatgttcttttctgtttttgatttggtttgggttttcctattttgcttgtgagattttaattactagcttgttgtctcattttatttactcctttatcaaatttgtttgttagtttgttgttggatttagtttggtaggaggaacataatatttgtaacggcctccgaaaggtcagttcttatttttgcagataaatgtgctgacttcttacagtatcaagagtctcttaagtattcatcttcttctattagagtaaactaaattcgtgtctccttttctcgtcttccaaatgagttattgattcttgtgctatagaccatatgacaggtaattgtagcttcttttttaatcttcaacctcacgttttcatttctattgttaccttagccaatgtttcacatctcgtgttcttggatttggtacaattatcttactccaatgcttcatttgtcgtctgtcttacatttatttaatttttttttaatttgatttctatcagtcaacttactcgtgatgttaattattgtatctcgttttttttttcctgatcattgcttatttcaagatcttatgacaaagcaaattattggtaaaagaaacatgaatttggaggcctatacattcttgatacaccaatacctaaatcagttgcttgttttgttgtacaattctccttcaaggcacattgtaggttaggtcagtcatctctttctccgcttaaaaagctgtccacaatatagtaagttatctttgttagatcgtgaatcatatcagtttgctaaacatcatcgacttagttcaagtcttagagtcaataaacgtgctagtgttccttttgaattagtctattctaatgtttggggtcctcctatcatttctaaacccagtttttgttattttattacttttatggatgattattcttgtgtcacttggttgtttttgatgatgaattattctgaattgctctctatttttcgtgccttttgtgatgaaacttaaaatcaatttaatgtgtatattcgtactctaagaagtgataatgccaaaaagtacaaatctagtttacttcaatcttatatggtttaaaatggcatgcttaatggaacttcttgtgttgatacttcatctcaaaatggtgtaacagaatgaaaaaataggcatctccttgaaacagctagaaccctcttatttcaaatgcatgttcctaaaccgttttggaccgatgctgtttctactgcatgttttttattagccgcatgccatcttctatttttcatggtgaaattccttacaattttttttttctaataagccactatttcctagtgagccaagaatttttcgtagcactttgtacgtgatgttcgcccacatataactaaatcagatcccaagtcattgaagtgtgtatcccttggatattttcgtcttcagaaagggtataggtgttattgtctcgatcttaataaatatcttgttcctatcgatgttacttttatgaaaaatacatcttattttttatcttcacccactcctactggttagggaggaggatgataatttgttggtatattctgtcacatcctctatgcctgatacatgttctgagtctcttgttccttcatctgcctcggttattgctcccgcaatgcctacacttctactacctcccgagcctcctatagtgtactccaggcatccacctcctacacctctcgtttcatgtcctccacctgcattttcatcattagatctagaactcaactatgatcttcccattacactacgtaaaggtaaatgccaatgcacttatcgtatttcttcttttgtttcttataatcatttgtcgtcttcttcttgcttttttatttcatctcttacttctacactattcttaaaactgttcatgaagctatgtctcatcctggtttgcttgctgcaatgatagaagagatgaacgctttagttgcaaatggtacttgggacttggttaatttacattcaagaaaatgggccatagggtgcaaattggttttcatagttaaagtcaatccagatggaccaattactcgcttaaaggcccgccttattgtgaagggttatgctcaaacctagtggactattgtgatactttttctcttgttgctaaactcacatttgttcgattgctcattttcatggcagctactcatcattggcctttgcatcaacttgatattaaaaatgtttttcttcatggagatttttaggaagaagtgcatatggagcaacctcttggaattgttgcttagggggagttggggaaattttttttgtcttcacaaatctttatatggattgaaacaaagttctcgtgcttcgtttgaaaaatttagtcaggctgttgagaattttaatttgttgaaaattaagtcaaatcattctatggtctataaaagatcaactgcgggtgtcattttattagttgtgtatgtggatgacattgttattacaagaaatgatattagaggcatctcattccttcattcattcattcatacccagtttcaaacgaaggatttagaggtgctcaagtatttcttgggagttgaagttactcagagtagacaaggtatttttctatcttaaataaagcatgtacttgatttgttaactgagacatgaaaattgggaggaaaaccttgtaatactctaatgaaagctatgcatcttacattgatggagaaccatttgaagatctctagattggttggaaagttgaattatctaactatgacttgtccatgtattgcattttgagttaatgttgttagtttgtttatgtcttctctaacaattcatcattgaacataattaaaaaaaaaattgtgttacttgaaaggagcactaggacaaggtattgttacaaagatcatgaacacacccagattgagtgtttctctgatgcagattaggcatgctccaaggtagatagacaatccactttaggttattgtgtatttgttcggggcaatctgatctcttggaagagtaagaagcaaaatgttgtgtctagatctagtgtaaaatcaaaatatagagctatgacatagtctttgtgtgagatagtatggatttatcagcttttgacttaattttggtttaaaactttagttccagcaaaattgtagtgtgataatcaagtagttcttcatattgcatttgatcttgcattccacaagtgactaagcacattgagattgattgtcattttgttcgtgagaaaattcaacaaggcttgatctccacaaaatacgtgaagactggagagaaattaggagatatttttacaaagattgtgaatgaggttcgggttgattatctttgtaataggctgggcataattaacatttatgctctagcttaagggggagtgtatattagttgtagaatttaaagtttttctatggttaagaatttccttaaacaaattgaggaacgttttgctaaaaacgataaggttgaaatgacaacacttcttggttctttaatgaacatgcattataagggtcaatgaaatgtaagggagtacattatggaaannnnnnntattgtctcaagattaaggacacttaaaattgagcttttgaatgatgtacttgtactcgtagttttgttaacgcttcctccacagtttaaccaatttaaaattagttacaacagtaaaaggagaaatggactctcaacgagctcatttcccattgtgtgcaagaggaagaaaggttgaaaaaggacaaaactgaaagtgctcacttgg

SEQ ID NO: 14233 - DNA, 9163 bp, Cannabis sativa
  modified_base (1709)..(1710): a, c, t, g, unknown or other
atatatattgctttgagagagagaccaaatttatgagtagtacaccactatgtgttaatgttataattaataatgagcaaaaaaatataaaaaaaaaagtgattattataaatgaagctggtgatgaagttaatcaattgttaaaatttggtcataagtagcattggatatggatgttctcgtagtctataattataattatggcaatttgagaacaaatatataatatttgaataattaagaagaatcgaatagtcattggaaacttgtatgtcaaaatttgtagaaatgatagatgaataaggttttgtaataattgattgattgatgatgatgatgatgatatgagggtacgtacgtacgtataacaaatatatattattacaaggaagatcagatgagctggggtctttgaattgaattgattaattacttggtaagagcatcaaaatcaaatcaagttcgatgtatagcgttgggtcgtagaaagagagagtacatatagaaattcaaagaaccattaattttctgatcatattaattataaatatgcatgtgcaaaggtaagtaaggtgtctgtaacttgcaaaattagtcaaaaataccagctatatatattgatgatcatatctactctctatctgtctatatagggagaccaagtttttagagatttatacagtatatggaagtatttctactacatacactatatacaaaatgagaaataaaaatataataattctaacactttgcaataatatatataaatattttaacaaggccagagaagaagagtagtttttacaaattaattactaatgtatatattgaaaaataatatataatttttattataattcttgattactaacacaactttttatgttaaattttaatttactagataatatgaatttttttttatgtaattatgtaaaataaaacaatgaaaatttatatataattgccacttttatatctaaataaatataccatgtattttaaaatattgtgtacttattaattagagtgtataattaggtaattaatatcacagcgattatatatttacatctaaatgcgctcttataaataacttttatggagttcaatatacaattaaacatgttttgttcaaaatataattcagtcctggctccccttggcttcgtccctaattataaaacgtctttgttatgattttaacataatattattaaataaagatgaagaagaagagaaaataattaaattgatttggctatatatatatttttcatgacaaaaatctatctaatctttgcgtggttataatgtaataaattagtaatattgtatataattattcttattagtcacacgtatgtagaagttgaggtaggaaacatgggaatatggctaaaatatataggacgatcaaagaaaactgctttgccttcgatgtctaaattacatatataaattatatatttcccaaatgtttttgattaactttataacagcccccattggcatgagcacatcatgtatatatctttcacaaaatcaattaaatattaaaaacataccaaaactatcccatttcaggccatgactcttcactagctccaaacattttaatataaaaaataaagttcaacaaaaaaagaaaaaaaaaaccgcatggaagtgatcacatttgtaaaaatttatttatatatatatanntatatatatatatatataagaacacatgtgccttgttgcgcacctagccatggttttcattttaaattactattagttttgtaggtttgctaaattcatgactgcgagtgtttatgaccccaaaagattaaacattaaaaaataataataataataataataataacagagtgatcaagttgttatctattgaatattgatgtcgatcgtaatagtgaagtagattttttttttatataaaagaaataagaaaataaagaaaaaattaaatgatttggattgttaggggtaattattgtggtccaagtatgtgtaataagtattgactcaaactcaatcatattgattcattgatactaatagaatccagttaataaagttttttttttaccatatggataattatgaaatattgataaatatatataccaatgtaccataattattaattctttataatccacggaccataaaatatgttttggaacgtggaactgaaattcaaagattccttaaacaaattatgcttacaataatcaacttaatttcaaaaaactgcaaaagaaaaataaataaaaaaataagataaattatacactaacttcttttgtttcatttttaaaaatatgaaactacattaagtttgattgtcgttatctgcaacctttagaccaaaactcacatgaagaatctattttggacaatgaccttagattttgctgaagaataaatggtttatgcataaatcaacatgttaacctaatttatattgtttgttttgtccttaataagctaaattgtattttctagtctagtctagtatttacatataaatatatatatatatatatttatatattcatgtgaactgaatttggtccattttgaaattttcatttgacatattttaattttcaatggtttctttctttgtattttgtaatatagctatatattagcatagctagccaactggttattaatagacaaaacaaaagaggaaaaaaaaaagcattgcatcttacgtacctaatactatatggatgagtgaaattttataatcaattagcggtttgttatattatttattaaaaaatattgaacggcatagtataaaattactattagtacaatttaatctcaagtctcacttattttaatttaataaaaattatagaaaatagctaactaattataatacgatatctcatagtgatacttagtactttagtgtcgtataaaaatactttatttattaaatcaaaatatgtgaaactaatattaaaaaataccaataaagaatacttaataacatgaaaatatttatggtatttttttaataaatgcttactatttgagtaaaaaaatacaaaaaagaatgtctgacattttttatatttacgacttgagactagtttaaatgatcataagaaagtatttgtgtgttaaaaatgtagcgttcgagtcttaaattatacattttttaatataaaaacacttaaatactatatttttaaataaggttaaatgcaataacaatatgttagctattgtattggttaagagtttccttgacaatttaaaagaaaacagaaaacagaaagaagaagattagagacttaaaaatcttagtgggtcccacaattacataaattggttgacaggtttgcaaacccaactacataaacccatcttcacccccacaaactttcactaacaccactctctttctctttctcttacctttccttttcttcttcaatctctctctctcaaaacaaaactaaaaataacaacaatggccagacctcaacagagataccgaggcgtccgacaaaggcattggggctcttgggtatcggagattcgtcacccattattgtaagtcgactcaagtttctaaaaaaaaactcaaagaaacgtttctttaatgtaattagaaagaaaaaaaaacgtttctaattttcgtttctgttttacaggaaaactcgaatttggcttgggacgttcgaaacagcagaagacgccgctcgagcctatgacgaagcggctaggctcatgtgtggaccgagagctcggactaacttcgcttacaacccaaatgcaactcagtcatcggcttcaaagcttctctcggcgactctcacggctaaacttcatagatgttatatggcttctctgcaaatgaccaaatcttcatctaataattcaattcaacaaaaccctttaataaaatcaccacaaagctccagtctttctgctacatcaaccaccactaagtcttcgccggagaagagaccggtcccggcagcggtgacagagaatgagtttgggtcaaactctgaactacatgttaagaaagtcaaagtcgaagttgatgaaagctataataacaataataataataataaccaaattcagcaatcgtttatgattcttgaagaagatgatcacattgagcagatgattcaggagcttattcattatgggtcaattgagctgtgcccaaattctgcttactagccatttttagctgatgatcattactattattattattattattaacttaaaaactagtactttatatattctactactatatctatacatatagtagtattttgactctatttttaggaacaaaattctcttcttctgattctgagtaaccaaattttataaatgttgcttcttctttctagctactctctctgtaaatctcaatgtaatgtattataatcttattattctctctctctatataaatatatatttctatgtccttaccttagtacaagaagaacagaggttttcataattttacagaacaaaacagagtattattaattccaaaaaaaaaatagtaggaagtttcaaatgaaaaatacgaaaatgacaaaatttaattttatttattttcacatactcaatgcattttagtcaaggcacaaacgtcacttgggagtgtcaggtcattggcaccattgtttttattttttttttctcttgtcttttctctaattttcttctttcaatatttgtcagtatagaagtgactttgcttttacattagggtatctaaatatatgacttattcacttttgtatacattctctagtgactacctgtttattgctcacttcttcttctttaggaaaaaaataataagagtcatgaaaaagtaacttttctttgtattggaactcctttgtcaagaactatgacagttatggtaacttgataattattattatattttttaaagtgtgaattcttaagagccaaggttgcattattgaggattatttgggttaagtttataaatcagtttagtttcccatgttcagctctatctaaagaaactgactaagaaaattgaagaaacaaaaaaccgaaaaagaaaaacagagaaaattaacttttgtttgaaaatgttgggtttgaaatggtttctttctcgactgatatttcaactcagacaaagcttttttgttttgggatagagaaatgctacatgtcatccttcaccaggtgtaatattggtattagtataagacatatataaaatctgtcaaactcaatattaaattatataatatatatattaatatgtcattttttttgtagagtcctaatataatttaatattgggtcacatgtaaaaggagcattactataagccatacataacagatttgaaacccaatattagtatatcatctctttctttgtagcatttaatgttttacaagaggttatctcatagtagtactaataaatatagcaatgttatgctatatagcctcatttgtttgataattaaaaaaaaaaaaaaagtagaaaagaaattagacactgaatgtgattgagtggatttttttaatgatttcaagagccccatctcttttcttcttttacacccaaaaagagaaagaaaaataaagaaacaaagaaagaaatctttttctctctctctatatgataataataaatattaaatacactacgcatgttcatcttcttgtagcaatattactgtattatctttaaaactagcagtggacaactttttctttatttgggttgaaaattaccgtgggataactgattgaacctgctttggttttatatacacattaattcttattttaaatattcaaaataaataaaaagaaatggtttaagtaattataggtgagtgtatggtataagctagtttcatttcaaaaccaattgactatgaaaagagtgatttatgcatcttatgtatgatatttagttagtttctaatgtattatcaatgtaaaactttttaccaataggtgcatatataaaccaatcatgcttattactattagatgttaatttggatccaaaaagcacacaagttcacgagcgtaatctactttccctgagttaggtttaaaattaattaataatattaatcagcagtaaacactctttaacatgggttcaaataattttttaacttttcacttttgttactttattacatatgatagttatgagctaaatttcatgaactgtaaggtgcattggaaaaaaccactttgtaattacaatgaattgaatgtgtaatttggaaaaattattaagttaatttggtgtgacatgtttgtttaataatgtaattatacattagttatatgtaattaattagaggtaatcttgggatttcaatcatactctttaattatcgtaaccactttggaattacatgcatgtaattgtaaaatattagtattttggacaatttataattattatataacatttgctaaaatcactaacttgtttatcaaaacatgaaaaataagaaattatatgtaattattacttaattaatgtcgatacaaactcaccttgtattttaaaatataataataattatacaacataataattacataattatttccaaacactccataaataaagaccgaataagagtctatacaatacaaagatacggttctcaagccaaaaaattgccataaaacaaaaacataatgactatgggatgagacaccataataagactatttatgataaattagtttacgcgaggaaagcaatacatttatcatttgatttaaacattttagagatgacttttgaaattagcctacggttacaaagttgagagtaactactagaaattacgcaattttaaacggttgacttaaatatgtaatttttttttgttaaggacttaaatatgtaatattaattttcaataatacatacctaagtatgtattaattttgtaagggactcgatgattgtaaaccatttatctcatacaaatagataattgtgaaaaagagaaaatgttagtcatattcttactatcgcaaatgtaagtaacatttgttgaaccgctgaaaactctttataaattgtttggttatacgtcttgtttttacttttatattaggactagtcaatctacgtattgcttaacgtaaaaaagatcataaatttgtttgtcattatattgaatcttttgtatgtcttgataaataattttataagttaattaataatgatattttctcgtattcataatacatttaactagcatgttaattaaacgactacaataaagtggacaatattaattttttgtaagtgagcattcactataatgtttttgttagtaaaatcctccaaaaacatctaattgatgaactagatctaggatagtaaagttcttaaacttaattaccaattcaataataatatcaataataataattaaattgaccccatttttcccaatatatatattttttattttctcatgattttgcgattatgatgtaattaatattcgagagagccatacacattatgatgatctttttctcttcttacatacatgtctttataatattctcttcttacatacatgtctttataatattctcttcttacatacatgtctttataatatatactcatttataattttgagaaggatatcatatcattattcattattaatttctgtgtcttatttcacaaacaaataagtctttcatttattttgcatataagtttgtaaccatttccatattattccaaaaaatatgccaacaactgcaaaattagctttcccaaatcaatacatagaatagaactagcaatgagtagtactttccctgtaaaaatagaaaccaaattattctgggtgcagtgaatttctaataaccaattaattactttgtttttttttttaaatatttgtaatatatatacatatatatagtttttgtgtaaatatgttttttggtgtcctatctctttcaatttcaatgaaacttgatgattatttacctgtttgggaattgattttgctccccacaataccataaaaaaataaagtagagttttattgtcattattttgttcttacttttgattcagcaaaggtggttaaataatgacatgttagtgagtttaccatcatcaacagtttgaaacttttcgacaccttgtggggacactttattaataattaaataaataaataaatgaaaaattaactacttttcctaattacttaaattttttattactaaataactctatctagctaagctataatatgctattaattaattatgaatattgtttcatatatagttaatttgaccaaacccagattgcattttcctctgattagtacaaaattgtataatgatatagacgcgttttggctcctaatataattataatttttttcttaaaaaataaaaattaaaatgaataaaaaaattttttcaacgtaaaaaagaatttatgaagaaaaaaaaaaggtgaaaacctcggattaagcactttggtgtgactgcagaccagccaactcataataataataaagaaaaagagaaattggttttagataacgtgactaaaagacacactacaataaattatatttatatataagcatgctttttgtctttaattaagatctattaattaaaaacaagttactttcactaattacaaaaaggaagaacaatacagtatatatacttgcactagccatgcatatatataaattataattgcaaatttttgaagtacctatttgttaaattttttattatatttatttaagattatataaatttaaaaaaaaaaatttaaataattacagtaacgaaaataaagtttaaacagttaattataatgtgtatataaaaaaataatcacgtgttcaataaaatatttaaattttatttttaacattataaattattcaaaaattttaaaaatttacgaatgatattatatagttgcatgcaacgtgcacaatcaaaaaaaaaaactaaataactttttgtaatgtcaaaactgataaataatctcctgaaacaactctttaagaagagtattgtggggtttatttactggtgta

SEQ ID NO: 14234 - DNA, 7057 bp, Cannabis sativa
  modified_base (720)..(724): a, c, t, g, unknown or other
gggttcggaggtatcattagaaacagcgatggactggttgttgctgccattgcccagcctcactccggaggaggctcggtcccaaccttggaagcaaaatctcttctttctgtgcttcagtggtgtatcaacgagcacttcttagtccatgaggtggaaacagattgcaaagccattactcatgctctttctagccataaagaagatatttcggtttttggtgacattattaaacaaatcaagaatactttatcttttttccctgttgctcggctctcccatatcaatcgcgaggctaacacactggctgataagctagctcaccgagctctagggttagatgaagtagccatttggattggagacgacccctataatatcattgattttctgtcttcttagcgagcaaaaaaaacaaaaataatttacatttacatttatactcggcatcttgttagttattagtgcatcatctactttttttttagacaattctttcataaacatttatcatatatagttaattaaaaaagaactttatagttatatatgattttttttattatttaaaaaaaataatttgcggtataaatatttaaatttaactccagttacaaataaatacttaagtttaatttttgaaatttttgtgagtacttaacaattattaagtaaattgccatgtagcaattcttaattggtcaaagtcattaaattttnnnnnttttaaaaaaattaatttaaatataccaataaaaaaatgacacattgataatgacttaatatttaactgttaggtaactacagagttaacttacttattattatcgtcaaaaattaaatttaaatatttatttgcaactaaaaattaagattagatatttataatgtaaaatactctaattaaaattatattagaatcattggacacgtcattgtactccattaaatgaaagagatacaagttataaatgtctacaacaaaatatcaaatttcaaactgtataaaacatttaaccattatcatttactaatcccagctcagcaatatgcatttagatcgtcttcttgacaagattatttgctactttgtttaagtttaatctcacttttgtttattttttaaccaattaatgatatttttttttctcttaaaattcaaaatttatttcattaaaaaaaaatcaaaatttattgagtaaatttctccaatttttgtttttttaattgaaattaaaatttctccattgaaaatcaatgactggggagtggggactcacatagatatggtccaaaccaaaggaagggcaagttttagaaaccaactgtcccaccgccctttccctatcgacgaagaactcttctactctttcatgaaaattgattgtcgaagcagataagaccaccaccaccaccaccaccttcaccctcaatcaaacaggcaaaccctctcttttttagccgattcaaatcctgtaacttcaatttcatgtccacttaagaaagcttctacacaattacaacgtatatggataaagataaaaagttccctccctttcggaagtattcttcttactctggtgcgtgctctcttttcccaatatgtttatgtacatatgtaatttttgcttcttttttttttttttttgctttcttggatcactactgtattcggtttttgttgattttattagtataaccaaatcagaataagttaaagaaacactacatggaaaagagatttatagcggttaaaaagtatactttttttttgtttttttttaatcttatgatgttccttgctgaacaagaagtagtgaatagtataaatatatgtatatatatacatatgtatatatgaatcgtaatatactgtggctcagttttctgtttggatcgatcgttacaccgataactgctgggttggaattttgtttcattgaataattacgaacaattttccatttcggttactttgtttccccctactttttggggggtggtttgattatttgatcattggaaggatgttgaatatatttcttttcttgtttttgcagtgatgtgaaatgcttttgggtggatactgaggtttccagctgtgtttttctttttcaaaagggtatgtgccaattctagtagatttttaaactatggcatcttcaaacagtaatgctcacactgaatcagcaaaaatggagcaaataattactgaattttttgccaaaagtcttcaaatattacttgaatctaggtctccctgtttatcctcacgaaattatagtggggaacagggcatttcatcaccatcctcgtcctcatcgtcctcatctagtgtgaggccgagggacaaatggtttaatttagctctaagggaatgccctgcagcgctggagaatattgatctctggcgccagaacaatctagaacctatggtggttgatgtgattttggtccagaggcctgttgattgttttccagtgaattcttccccaaggaaggaacttgttagaaatctttcaatgaaagagaggtatcctatctgtatgaactctgaccaagaagaatatgggtgtttggaaaggagtgagaagattgtagagagatgggtagtgcattatgagagtagaaaaattagagatactagtcacgggaacaggagatctagtaatagtactttgtataagaaaacaattctgctcttgaggtctttgtatgccactgttaggctgttacctgcttataagatatatcatgatctcaactcttctagccaaattcgcccattttttcttgctcatcgagtatcttctttcgctgagcccttcactcgtaaggaagaagcagaaatgcagagatttgcattcacacctgtggatacctcttgtggtagactttgcattacagtgttgtatcgttcagaaatctcagacataaactctgaaccatcaactcctttgtccccccaagtaatacctgattatgttggaagcccattggcagaccctctcagacggttcccgtcaattcctgtggcaggagtagcatctcatggctctccatcatcttcccaatttaccaggcggcatagttggagttttgatgcatatagaacttcaacgcctttgacttcattctctccttcaccaactcattcagaaccacaagctttaaactctaacccaggccctcgttgctttccaccttccagcttgcctcctcatccacctgagacatctttaattcataagaaagatacagcttttgacgagtattttcagtcacctgtattttctatatcatcatcaccttcggcttccccatcacctccaatccgtatccccgggagtcatctatcaaatgctcttttacgatccgaaagtgctccagtccgtatacctatggctaggattgctaattcccctgcatcgaagcaaactttgcctccatcccctccccttaaaagttcaagatccagtacttataggtctgataaaggcatgggtttactgcattctggaataccgaatgagaaggtacatatagccatgatggttaaactttgcttcaaatatggttacttgtatttaatttgctttgcttttagttgttcccactcaggaaagaggaaactaggcaattttcaagaagctctagtcggtcattcccagaggactttgatgagcctgacttcacttgcccatttgatgtggatgaggatgatattactgatcccagtagtaggtaagatattgaaattatgaaacggacaataatttttttgtttttatcaatttttatatattcacctgtaaactgttttcttttaccagttaaactgttttggattataatttgtttgtgaaaagacaatagttatactaagatggaatcatttgtagctaagaatgagtacatgatgtttgttgttggtgcattcctagaaactcgtcaaagttgtttaggatcagaatcagatacgaatgttcaccactgagcttggttgggtatctctctggctgagcaaataataaaagttaagcccttactgtttagttttaagcatgcagcttttctcaccagtattttcgtgtagattgacctgttgtgattgtttcatttgtactaaagtgcaacattacacatgaaaatcctagtcttctttcaagtcaataatgatgattggtgacaaggtgcaataaaatggggttggtgacaaggtcaatgtaagatgatctatattatagttgtactcaaaatataaggggattggtggcaaggtagtaatggagatagtggtacttgcatttttgcctatgattttatgactactttgtagtgataattgtattgttgaggttctgtatgattttaatttgaaaggtaacgattgtgcatggattgttgctacaccagtttgggatagtaagtaaaaaaaattagcagactcgataaatgagtttagggtgtatttggaagacctggataattatatgcctttcgaggatttcgtgatattatgtgcttgaactctcgtccttgaatctgatgttatttcattgccaacaattgaaactcactctgcatcagtgaggattgataactaagcccgttggcgagctagaaatggctattgcagaaaaatgaaaatgtggtttagaatagtacattctaccagtttattatgctactttttttttttgcactggtattacagtgtcgtgcatacatttgatggatatcaccaaaatctaaaagtctcaaagtctattatgtagaagttttccatgcgagccgtgtctaatcaccaattatatgataaatatggaaattgcttttgcagttattaatgtgttttattttttatttttaaaaattactgattgcttttattttcttctaatcctctttatcaacaataattaatcgttttgttactttctagacctgaatcttttgagcaaaagggacctttctgtgagccacttgagcctggaggatcgtttccaactaggacccatgacgctgctgttggtgcgcttgttttgatgttaagaaaagccccacctctccgccaagatttctccaaatctgtagattcatcagatgcattaagacccgaaatctggggtaacaccaatcagacttcagatgttccagttcaggaagctgcttcttctagcgtgatgtcctcgagactcgttgtctctaaaacgacagctgatgccctagaagaactccaaggatacagggacctgaaaaacttgcttttaagtcaatgttccaaatctcacatatagtctggtatatgtttgacattacataagctgggattttactggggtcttgaatccgcttagtattgaagtaaataaaaagacttacatgtgtacagcattttggtccaagttttcttggtaatgttttatacggctggaagttttgaaattttcttttgtaaatatttatatttgaggaataagttacttaatataaggattttaaaaagccatttatgtgtacatagtaattggttataaagtacttatataattgtatagttgcatttctttgaactattataagaagtgagttcttctttctttatcaatacgtgtactctttttttgatagtgattatgaatatatatgttgatgatgagatcggtgaaatattaagagaattatgatgaagattgtagaacttagaagaaaagttgcagaccaaaaaatagtgttcttgtttaaattttctgagaactccttttctaactgaaagaagtgatatttatagggcttgaatcggttacttttacatgtcaatcaatatctaatttacacaaacgtaaattttagatttttcaatccaatccaatctacactttgcgtattagattggattgaatcgtgcggattggattaaattaggtattttataaacatcattatttcctaaaatgttgtcttggggtctgatgcacttaacctttgaaacaataattctctttggacttcaaccctatcttcttcaagggtctctcttaataacttagcttctacattttggaaagagcttttagtgtataggggattatgcccttaaataattgtagttaataataattttattaaaataaataaatgaattaaattattctatataggtaccttataaattatattattatttaacgatataaagtaaatattagtaaattctgaagttcatctatgtggtctaatctcatatagttatgaaaagattgagatagaacaaataaacttaaatatttgtaataaggtaaaattatggaatctttagaataatcattgctagtacgactcgctagtattatgaatatatgtgatctaaatttaggttactagtgtagtaggacattttagtacaggtactatgcataccaagagtatgtataactggaccagatatgattttggataatacacgttgaatatcgtttaaatgtattgtcaaacatatcaactgatgatcatatataaacttatcttaatcctaaggttactatgaactcctatatatattgttgacgataaaaactcgtcaactaatctatgactgaaaatcaaaatgtgactttgaagtttagagataagaggaagatgaaatgtaaactcaaacaagaatgggaactccaagtagagagaaaaattgctttgtattgcttcacaccacgtggtcataaaattgatttttcaatcccttctcacatctgagaaatgggtatttataggctctaataacctgatatacacttgtggtcctcaagggagaggttggctatatgtggctacgagttgtaggtgttggtggtggtcttgcaccttgtaccattgtcgggtgtcaagtggtccagagttgcaggagtggtgtggttgcagagtacctgttgtcggggtgtcaggggttatagacgaagtacctccactactcgtacgctattgccatcaggtcacgctaaaggcatgaccgtacgctatttcatacctttccgcgtgcatgtcttgtcgtttgatt

SEQ ID NO: 14235 - DNA, 2671 bp, Cannabis sativa
acttttgaattcaaaaataatatagaatatatatgtcatcacaaataatacaatattaatttaagggatatatatgtcattaaaagtatcgtcccagacactttttaatatagtaagatataaataatcataataataaatttcaacatccattttaagcttagaaattcaaactgtttcaaaaaaaaaaaaaaaaaaaaaaaaagcttagaaatttaaatttctttttactagacattgcaatattgctaaggagaaagtgagcaaaaatgatcaaaccattgcttcttcagaagagatttgcagttaaagaaattactgaaatgcaacacctgaaaggaacctgaaatgaccctattcatagttgaagctttaggagaattaatatacaggctaccaactacaattatatgatgtaacataaagaatgaaaattttcactctttgagacacttcctagacagctaaaactcttcactttctgcaactacgactatccaacaccaatcttgaaatcaataaagaagtttgtcaattgattcattcacagcagcagcccgaataatgcgaatattatggggggaagtgctcaacatccgtagaagggaagctggattgtgttattctcattcctcgcaataaactctttgctgtttccttctcctatataaagacaaaatgaaaagagtataacatatacatatgaattgaattgtaaggttgctcttctgaaatctataatacagattaagttgtagtttcacccgtatgcaagaaatctataagaataggacttacggggccagtgtaatccagaagacgggtacaatacacctctgcttcttcaaatctcttcacattcctgtagtgagtagcgagaaaaagcaaagcttcaaccatatttggtccttctctctcttcatcttccatcctttccaaatcctttttgtagtaaaaggctgcctcttcagaacgcccgagctcatggtgtagctttgctaactggcgcagtgcaatagcttctcgatcattgcaattaactgcccttttgtaacacttaattgcttcctcgagcatgtgaagctggtcagtttcatagcactgagccatggcgatccacaatcgagaatcattcggctgcaagaaaacagatttcttgaagtaatgaagagcatagaagcgcatacccatcatctcataagcttgacccagtccataccaagctcgataatcacatgaatttatgtctatagcgcggcgataggcatcaacagcagcaggagtatttttcatttcaacaaactcatggcccatcagcgtccaagctgacaaataatttttgtccaatttcagcgctcttttaaaatataaaactgacttttcatgctgcccttttaaactgtaataatttccaattatgcaacaagattcaggtctgtatttatctgtcatgaacaccctatgggcaagataactgagggcagaaaaacattcctttgcataaagcacattagaatacatatccatgtcctccactcgatatggatcattccttaaaagttcttcaaaaattgcttcaactacttcaaattcccttaaactgtactgagctttagcaatttgagcctgaatgtaattactaaagctgaaggtaccctgcaaatattcatattttgctaaggactcattatgcattcttagttcttggtaggcaccggcaagaaagaagtccttcatccaatggttattaagattaaggttgttcaatatgtcaatcgaagtacataaggactgcaacttcgaccaagcatcccaattccatgggtaattattcacagattccacaagaactgaacgagcaagattctcactgcctttctctttgagcacaattccatacaagtataatccgaaaggatcaattgtgccatttttgcgaaatgttgatagttccctttccaaagaaactagttcacggttcaaagcactagtcttacctaatggtccctcgagttctatcatttcttcctctttccgcttttctccagcctacattaacagaaaaaaaattataataaagagaaaaatggtgaataaatcatatttaagagtataattccgcttttctccagcctacattaacagaaaaaaaaattataataaagagaaaaatggtgaataaatcatatttaagagtataatatacatacaaaggcatgcaatctcaaatctcaaccaatgactaacatcatataaatcatgttcaatgaaaagactcaagtattatcaaaaggtatagatctgaacttgaactccatcataggtggcagcaattaaattcctaaaagaatcaagtgatcaaataaagttaacagccaagataaagatttttagatgctcaatctagattatgcttcagaaaattaaacggcatcttctaccttatcagaaaagatagagaaaagggaaaagagttgcaaggtccttgagccaaaacctttaaaatttaatcaacaagcaccatacttgtctagtatatttagtatattcaatgtgctattttactagctggctgaccaacaaaagaaaaaacggtggcattgaacagttagtgtcataatgaggatatgcaattatagaatcaacagccaagaaccttagataatattca

SEQ ID NO: 14236 - DNA, 5580 bp, Cannabis sativa
  modified_base (423)..(428): a, c, t, g, unknown or other
  modified_base (1676)..(1678): a, c, t, g, unknown or other
gacttagcaaatatttataaattgtctgatccacgtgtccctgtccggttggtccacgtatattgggcgaaattaggggcaacaggtacagaatttgaattttttttacgatttttaagattttatttacataaaataaagtaaataaaattttttgatgcatttttatattgtactcttcttattttattgatgattttttgttatttgtatattattttgattttttttcatgtaattttttattgctttcttatgtttttataaaataccgtacaaatgtaaaaaaaaaaaaaaaaaacctaaaagtataaatatttactaaaaatttacgcaattttcctatattattttatatatgtaaccaactgttattatttttatttagtataaatgtgtaaactataataataataataatannnnnnataataataataataatacaaatttcattaacttacaatcatctgaaacaataaaaaaaaatacaataagtaaagtctccctcctatatatatgaacagcctctaatagagaagtctgcgccaatgtatacacaactttattagcagattgttttacaaactgaaaagaaattgaacacaaaccaacaaccaaagacttacaagttacaatccatcatgagaacacaaccataaggagaagctatatttttacaattatttaaatcactaataactgtaagactatcagatatatctataatttttaattagggtgtatatcaacactaataaatgcataaaaagaatcaagttttccattatatttggtcatatgagtaaccagtaccaccgtacgtagagtgagaataagagaaccaagtggaaagcaaaaaactaattatatattatataaatatttaaataaatatatatcttataaaaaaaattgtttattatatatatttatgtgcaaattgcagttccaaaacgtaaagtctgaatttctttttgatagaagtgttagcttattttgaggagtgaaaattaaataacattgaaaaagtccacttataaaataacagtattagtaatatccaaaaaataagaatgagtagttcttgttggaaattaattgattagtcgttgatgcacatgatagataagacttttaacggtttatattattttgttaggagaagattatttgcaaacttggttttcttttcttcctttctttctaattgatataatttataagctagttgggagttcatattataaaaattatactatgccgccatattagtgtgaaaggtgaacaaattagaacatagtaaccactaaacaatgggaaatttataatttctatgttatattatatatataacatatatgacttcttcccccattcttctattttctaattttaagaatctttggaaagagcatggaaacaaaaatatagcataccagcggacacaaagatagaataaatatgagcatattgttattggacacccaaaacattcccgcttcaaacctctatctcatacctacacagtctcaaaatggtattatagcaccaaaaataccaacacattttaaatgtgtcaccttataattggttagcgataattaattacaccaatgataagagtcgtaaataccacatgtcacttttgacatttctcaatatatatatatatnnntttatataaatatataaatatatccaccagcaaatgacgactatggatataaaacttacaaaatttgaagtcaaacaattccaatttataattgtcaaagaaagtattgtttccgtacaatgttgtaatcatatcatagggtaaagtaaggtctatctattcaaataaacaacacaatctttaaacatattagcacaaaaaatacgcctaataatactatattatattaccggaaatataaaatacagctcaactctccacaacaataataaaagaatgcgttgctaaactctctctctctatacactaccaaaaaaaaaaaaaattacaacgaaaagaccgctatgagtaacattagctgtccaggacttctaaaaaataataacacaacaaattaactgccttttttatgaaggactagagaaaaagttacaaagatttaataatcatgaacacagcacaaccattgaaacgcccattcagcactttatgcagctacttggatcggcacatttgatctaaacccacgtccccttccccgggttcccctactgaggcctcgacctacaaagaaatttagtaacaattcagaagtgggcacacaatgaagaacttttgcttcaaatgaactacatatcccaatccctcccatagtcacatgttctaaaattcagaacaagatgacaagaaagatatgggtctaatgtgctgaaaaataagtttagcagaatatatctaaagacaagcctagaatatgatgactgatatataagccaaactaccagtttatgagaaaaatatacagcacttgtacataccacgaccttggacagggccttcttgattgtaatctccatcttgctgtgtatcaacataagttccattataccctacccttccacggccacggaaacttcttcctctccctcgacctctgaaccctctacctcttgaattgttccgactcaagtcccaactgccatcttcataatcaacggaagcaaagccattccctgaaacaaaatacaactgctacatcaaaaatattatcattttgcagcccccaagatcaaccaaattgaatcttatattctgttaaagatcaacaagataaaccatgacaacaggtgcagaaagaaataaccactgaaacaaaggctaaatgaatccaccaatttacatcatacttggtacaacaggaacaaattatgctagcagtacaaccagcaattatattatagaagcatggtagatacatacctctggcctttgaccgtcctcgatagttgcgaccacgacctcgaccacttggtgagccctctgcagcacaagatattcaatttatttgaaatggtaaaataattgcactgaacaaaaaaataaagataaatgatctttacctccatcgtaatcaaattctgttgatggcttcacctggtcagcaggtatgggaggctggtacctgtaggcaaaaatagttcacgaatactaacagaccacaagtaaacatatttatacatatatatatatatataaaggaaataataataatgtacgatgttcctacaaggtcattaacctcataaagaacccattatgtactcacccaattaaagtactgttcaactccttctttgagagggtgattaaaatcatggaaacatgtcttgtcgtctccaaactgtgaggttaaggggagaagataactaagactcaagtaacaatgacaattaaaaccatcaaagagtaaattattatctaacaagagacagtgccaagctgtaataaaataacagtcacgatagtttaagatgcgtccttacggcaagaggccttcctctaagggctcccatgtatcagtaatgtctgtggatccaattgacgtattttggtgaagaccaacaactcttctctggaattaataacaaaccatttttcaggctcagagtgatgccgaacaagtttaaacaatccatctgacaatatacaaacaggaaacaggaatcaaaccttaattaactccactatggtcactgtcttgttgatagctcttcccattgccttaaaaacaatttcatcggatcctttttcctacatattaatatgtaaagagtaagaccaaaaaaaaactaaagatattgcattatattcaatatacaccaactctacacttccgcactcttagcagccaaaattagtatatcaatatttataaaatcaagcaaccagcacggccatagaaacgagttagatcccgttaagcgatcaagagcacaattttctcccatgagttctgtttgaatcctaagtgacccaacgttaaaactacaaaatgtatcatattcaatcctctcacttcgaatttagtatcaaattacacaactaaacatttcaaaaattatgttaatagccttttatcaaattttggccgttagacataacatactatactgcataattaattgttcaaacaagccttattaatttctcctttaagggttcaacactaccttcctaaaacccaaacttataaacccctgaactagaaacctggttacttaatgagatagtagcattgtgtcattaacacgcaaatacattaaaagtaaaagaaaaagaaacacaatataatcaattaattaaaaataatttatataataattaggaaaagcaagaaacacctggagtagagtgatggcgtaagtgatatagttgcgcatcctcccctgactcgtaatcctaatctcattttcatcaattggcttctcagcttttggcttctctactctctggtaccgatccatcttcaccgccaccaaccaaataaattaaaaaaaaaaaaaaccatattagcaccatgcaatcaagaaaagaaaaataaaaaaactagccctgaagtagaggagggtgcagagtgtaggaatttggtggaagaagaggcagagtgataaaattagggtttagtcagacgaggaggtcgacagtttaccgttggtgttggaaagggataagagttttttttttttttttttttgtaaagttgagaatgagtcctcttcttctacggctttgtttcttcttttacgccctaaatagaatactgcaatgtataatttatgattatttaatgatattttttttaaggtaatatttatctaccgagatttaaatagaatagaattgaaataaaataatttttattatatttttttatttagttttcaataatttttattttagttatatattttcattcattctaattaaatactatttaatgaagtatttgttatgtgagtttgagtttgaaagagtacacttagaaagaatataaaactcatgtgcatgaggagattaaggttatcattgtgttaatttgaaaaataagaacttacttggaaatataaatttcttgtcatttaaatttaattttaattttatatattatacttacttaaactaataataatattgttcagagagttgaataatgccatttaccatttctattgtatatactgtcactcgcttccaaactaattgtactctcttttctctaatggcacgtttgatttagtgtaataagaattataatggaatcattattactattacattgtttgcttttatttttaaacttatgtaatggctttacattataatggtcattacactatgcattttaattcccattacatcataaaactaatgtaataatgattacattgttagaaaatatctcttttgccccttttcattactttttttttttaaattttaaatattaaaaataataaaattaaggatatttttgtcaatatacaacttattttattttattacaatattcattacagagttaaaccaaacatcataatactatttttattacaattctaatt

SEQ ID NO: 14237 - DNA, 7840 bp, Cannabis sativa
acatataatccatgaaagatagtacacatttcatatatcaaaactcttgtggtgcatatttgatatttgtaaagttgttttcaaattttttggtcctcttatgaaacactaaatatcagttgagattttttttttcttttttttttcattttcttttcgaaatacacttttattgctttgattaattgcatttgtttgaaagcaaaatgatgaggcatgtgaaagcaatatatatgtatataaatatacatatatattacaaaaaacacaccaccatgaaagcaatgggtcccaaaaaaacccaaatagatggcctttcttgattgcaacagcttcttttacccttattgcaaagctgttgggtgtgtttaattagtgttgttgttgtagagacttgtagtagtagcagtagtggtagctctgtctctgtattagattaaatttatgtgtttgacataataaccatccatggctataggctagccacacccaactacatttaattagaccccactttctctctatcactatgatgtgatctcaattttcaattctaacgtgattgtctctcttcttatattaataatgattattgataatgttttaatctatgtctgatgatttgattgaatatataggaccctacttctttaaactattatatgtagatttttgcttatagttttgaagcaaataatgcatacataatacctactaaatctattaagaaaaaccttttttttttaaaggttacttacttggttatgagattctaggtctttcagatgcaatagtgccaaaacttaattaataaaattggtgttatttattttattttggatgaaaatagtaatgagaatgcctcataaaagctaggaaggtagcacccgtcacccccgacttgtcacaagcaccaaatactccaaccttgttaatagggataagaatacaaatatatgacagacaccaaatactaacagccaagcttacaagtgtcgtttttcatttttaaccaatcataatttttgtcgaaaaccaacaaaatcattaatgcaattggataaaatataaatattgaatcacaacacaaactcgtatatatatgtatgaaaaaagttactcctatccaaaggaaaaaacagcgccttaaatatgatggtgggcctaggctctacgggcccatacccatagtacagcccaatttttagccctattcatataatggtacggaccacttagctaaattaggctcttagcactatgttttgggtttcccaattttctttttcttcttctcattctcgttcattacgagattgactttaatattttcattaaataggacaaagggttacttgtagattcccatttttttaactttttattatgttccttttcctctcaaattgtttccatctatggttgactctcattcttatcctactttctactacccaattatttatcatgaaattcaaacttcaatgaaagtaattactaaaatgtttcaaattttcatttgaggggggaacaattgtattagtagagttttgctaactgagattagacagtgatttaattagcttttatctacacaaaaagaatgaaaacaaaagagaaaatgaaaaaaagggaaagcatgtgatttggggtgtcttttgacataaaagactaaaaagaagaaaataaaaaaagaaaagaaaggcaagtggtgtcagctgtgtcttctgttagagaaaataaaaataaataaaataaagtattactacttttgggattgcatcaaattgagagtatagttcccacacacacaatgcaaacacaaagtaaaatccgtttttgattttaaaaagacaagatcaaaaagcacaatttgatctaccactccatgattctgcctttattattcttttaaattatcattttaatttaatagacagatggcaaagagggtgttataaggacccatgtcacccaactcatagcaatttgtttaaaagcaaacgaaaaagaaaaaaagtaaaaaagaaaactcttcagattttaatttagatgtcaacctcatatatgtaaaataatcattgtcagtcatgtgatcacaataatttagtgtgtaagatacctttcaattcatctgtatatttcgtttattattaataataaaatcaagaaatatatagagctagcacataacagaattatgttgctaataatttagtgtgccatgatacctataagaattaacataagtaatttttgggttcttctgagttttatcctatgacaacattgttttgtttttaccttttttattgctacgtttggtgagagcgttgggaatggagaggagacccacctcagtacaaaagagaggacgtaaaatttttctaatttggtaggtggattgtaacatgtgagagaggaagatgataaattttacggattggaatttctggggtcattataaaaaggcttgtttgctaagaaaaaataatttgttttttactttataatttattcgaacttgaattgtctataggagtacatatatcattacatcatacaaaatttgctgatataaatattaatgttcgtgtttggaacatttgaacaaaaaaggtccagaacctgatgtgatgaacttatactgtgtttgttacagttaaatatagtaacttaagagataagagtgaagagaataaactgtgtctgcttaattttagtaaaagagaaaaataagtgaaattcactaaaatttatatttataaaggtggaagaaacaaaaaaaccttagtaaattactaaattaccttcattaataactttgaaataattttacaaaataataattcataagaaaagaatttatttatttatttccctcttcattgcaagaaattatttacttttctcctaagtttgggtgttcttttatttatatataaaatttaaaatttattttttttaaaaaaaaaaaaagataaaaatattcttatgcaagaaaaggttataaactagtcagtgcatccttttcctcaattaatcaaatcatgtcatgatattcggtatcataataaagaaaactcaaagaattttatatttaacacacaaataggaaagagacataatttacgagttactcaaacgaaagattcttcaacatattagaatacaagagtaggaagatatatatccataataacactaatatactactcatttctagtacactagtattttctacagtaaaaccaaattagagtatagtgccataaacccggtagtacttgatggtacatagaaaaatgtcacaagaagtcgaagtaaatcaatagcaacacattttgaatctccataaaaatttcacatttctaacacttttattatcgatgtcatttttttgtgctcttacagaagtgacattccacaagaaaaccaaacaggtaattaacctgcagcttaagggcaaataataactagttcgtaccaaatatagcaggggaagaaatcccacctaattgaaatttcagaaaaggggaaacaaaaaaacaaaaaacaaagtttcgtgcacctacattaagcagaacaatctcacatctgccgaaacaacaaccaatttatctcgatgacgcagaaataatttcagttcattttcctcttgtttgataaaaataagaagacattaataatcttacacttgcgcaccaagttccaatagtagagtgtgattagttgcatttgatgatgggccaacaaattgaataggacctgcgctcaacaaagtttggacagcactagttaagagtacgaatattgagcagtaagaatattagatgtttatggacattcctggttcgtggtaagaaactttagcaactatcagattcattactaaccgggactgatataacaattcttgatggcccactggtccctcaaggatgcaaacttcttaaaaggtgcacctgaaattcatttaaataattagagagggcagagaggaaagaattttaaggagttaagcaacctaataagacttatcatttaccccacattactactaagtataaaccaaataaataagtagtctgcttttaccttcaagctccaccattgccttcttgatcactggcttaaacttgcctgaaaacaagagagtcccataaatcaaacaatattaaagaagaagcaatacagcaaggacagagcagaaatcttcaaatattcgtccaatatcatccttgcaaactttagtttacaaatgccagagaattttggatgataataattacactgagtgcgtaaataaaggttatagtagtaccgtgtcttctctccacgtccattagtgaggttaaagctgtcccacttactgtccattcctcaaccggagcagccaaattccctacctgtatacattaggcagaaaagaaaaagagaaaagagtcgttattgaactaaaaaaacttcgttctcaggataacaaaaatatacaatagttgcaaacaagaacatataagaaagaaactataagaggaaggggaaaaatgaaaaaaaaaaaagaaaagaaaaaaaaagtcacaaaccgatgatatcaatccagttttcccactgtgaaggagagcccctgcaccataacccaatgcataacaataggtagaatcaaaatttgttggtagaccacatcttccttcatacctgcacatggaaagataacaaggatgaactaaagtatgcttttcaggattgttaaagcttcattgcttttctcacagatttcaatttcatataatgtgaaagctacaaagcaataaagcccattgtacgagtcatacagttgtcagcaaaatctcgcaagcaaatcctcaaactcaatgagcctgacacattaactttcaagctaaattaaaatgtcatgcaacattggtaattggaacttgcgactcaaattaattagcgctatttggagatttcagcttatttatggatatatttaatatttacagatccatttagcttaaaagaaaaagacatgtattaaattgaagtgtatagaaaagaaatcaaatataatttctttctcaatttaggcaaaagacattaaatacccgaaaaagtgagactgtccttggaatccacctttgtatgcacctgcttgactccttttctctaattcagtttcaaccatttgaataagcatcttctctgtttctattttggcaacctgatggaaataactgtacatgaataacactgcccaatatatctagaacagtaaatatggaatagttgagtgacaatgtataaacatacctgaacatttccatgaggatctctttcaagcatcaactgctcttggattgctggaggtaaaaattcaaaaagctgcaaagattgatcagcaagtttctttttccattgcccatcctcatcgacaacctcgtgggctagaatttcattcagttcggcgataagttgttgcacctacaaattgcaattgactgtaatgtgggtctaatataaagagccaaaaaataggaaataaatttacacagcaactatgaccaagaattttacctccggaatgaaatcaattagaccttcaggaataagaatgacaccataattataaccaagttcagcacgtttggagattatgtcaacaatgtaatcggtaacatttttcagtgtcaacttcttttcagcaacctgtacagagatatacagtgataagattatttgtttaagggaaaaaaaaaactgtattacagtacttcaggttcaatgtggtgcagaaatcaatagtaattactttcagcaccacattgaaaatagattttatgggaacagtaacttagtaatgcataatgtcaatactaaaagggtgaagtggacactagcacctttaccattattatagtgattctaaaaataaaaccaaaataccaaaatcaactttccaaagtgtgttccatagcaagatactgtatattgtctacattataaaaaggctatgtgcctgcagttatataatttttaattgagtagctatacaatgcaagacaaatcattcaatggtacctcttctcctataattgtaatattgggatgagtttgcaaagcacattcgagtgttatgtgtgaagctgcacgccccataagccgcacaactacagttgagaaataaatttcattaaactcacgaaagtgcaacaaaaagagaatatggattcaaatgtatgctagaatctacaacactacatgttccatgactttcaacaagcatacttacagtgataatattttccagttgacctggcatctatcatgacatttccaatcatttctgcatatatctgaataaaatgaagagcatcacgttactatttagttttcctcagtgtatccgtagttgcattgcatatcatagaaaatgatacactattaatgccaaggaaagtctgtcagagtctaaacttaatcagtcagagtctaatttagtcagtcagtcagttagagtctattaagtattacacgcatgatccactaattctttttttcagaatttttattttagcacctgtttagttttttaggcagaacagagtacattgaatactatactatatttcattaatcaaacacaatatcaccaaattttcttgctacttgtagttgatcgcccacaattttgaacaattaatcaacagatatgcaaacaatattctatgagaagttccttctcgtaaaatttaaaggttgatgctttggagtgaattcatgagttcatgaccttaatgaaatagtcgtatcatggaacaataaaattacaattccaaataaattttcatcaagtaaattgatgaaattttcaagcttgttgggttaaaaaaatatagaatgttgctaaaagattgctaacacgatatgtggaaaggaccatacaaaatttcttaattctagtcgtaaaataaattattttagtttagtcaccttgcaagcagtatcaaacccaaaacttgttgggacttctttgcatttcaagtcaccatctatggtttttggacatccaatcaccctagttttcaaattctttcccctggttgaacgaaagaaaaaaagaaaaaagtatgttaaacaaaccagtagaacagccttaaagccagactcctgtgaccctgccatctgccaatcaagatttctctagagagagagagaaaaaaaaaagtcacatacctgaaattttcagcaaggaggcaggcatttgtgttcgagtcatccccaccaataacaacaagtccatccaaatcaagcttctgggcagtgtctgcagcttgttgaaactaaaaggaaaatccatttaaacaatttattttgggtttaatgtgtcaataaaactaaaaatgaaactctgaagaagcaaagaaaagtcacctgctctggagtttcaatcttatctcttccactacatatcatatcaaaaccaccctgataaaataaataaataaatcaaatcaaatataatttcttggttaaaaagcacgcatgcatgaattttatgtaaatcactagaatacaaataacaatggatgcacgatatcttctaaaacattcggaagcccctatttaagcaagcagcgttaccagtgatcatgaactattcactccataaattttttgtatcatatgacaaactaaaccataattaaaactcacctggtttctatatgggtaaataaattctggtgtcagttccacgtactttcccttcatgattccggcgggacctcccctgaaaccgtacaatacgctgccttttgcacgttcctgcaagtaatct

SEQ ID NO: 14238 - DNA, 1982 bp, Cannabis sativa
tataggattttccacactttcttaatgttacagccttacattgaagtataaggccgatgctgagttaaagacagcctcatccaatgaaattccgagcattttgggtggatcctcgcaagcactcaaagattgtgaattcttctcagtatatctaggaactggggcatttctacttgaagtaaataaaccattgatgtcaaacccaatggaagaattactcagtaaaggcacattcactagtgtcacattcagagaaccattatcatccaatggaatttcctttggaagagcttgcagaaatgaatcaagcttcaaagtcccttctttgagtttcttggtgataccattctccactgcagactctatttcttcttcaaaggcatcaatcaacctaagtgattgaaagagatcaaggattaaaaagcataaaatcagattcagacccttccttaaactaaatgataagaaaagcccatcaagaatgtgtagtgtgaaatacaaagccaaaatacttattctccaaaaaattatagcactgccaaagaaaaagaactatgactctgagcaaacagcgaaaagagatttcagtttgactattctaaacactgcccttggttaagttcgatcaaccactatacttgagcctcccatttttcttcagtagagagataaaaacgctgagaagaatatgtagattgcaatgcaaaatcgtccaaattacttaacataggacagtcaaggtagaagaactgttccttcaggtaaaaaacaagggagatttcaaagtcaattttggagtgttgaagggtaaaagtggatgattagcgagaacagcggagccttcaagacattttacacttgagttaatctgagtacggataatgaccagtaatcacagaggtctcaagctagtttacaagtgaaaagtgtgataacacatacatattttccctttttcgagaggagccaaacaaaacgatagtactctacagcaaaacaattgaaaaaatttgcatacccttgataaagccacgaagctcctccatccaaatttatggagatttctttaactaaacatccacagtccaaaagtgaaagcttcagcgttccttcttggatctccaaacctaaagtaagcccaacttccatgccttcaaccttaaccaggcaagataagaatgcattatttatcaaattatcttcattagaaaaaaggtaagagagaccaatttatccaataaattgtctctctctaaatatatgtataattatgatataaaagaacgaattataactagacaatcattaaagtacaaaaccatacctgaattgaggcacttccttcatctgaaacatagatgggaaaaagccaagtactgtaactatagcgccaattcatggtcaaactacaagttattccggaagcaacaatggcgattcccgtatccccgggcttgacatacgatgatgatccaacatcaattccatgtatcgtgatgttcgataacaccatttgaacgccacccaaaaatggtattttcatggacttcttaatcggagcaagttcgagtggtataatggaagaaatcgccttggtaacgagcaagtcctttacaaaattaagtcccttttgggaaatttcgacagaggtgaacgattcaccacttgattggagctttgtttgagcttgaatgaagaacgccgccgtcagaaggagaagaatcatcggcgccggtgctgtccctgccatggcggtgtttgttggataatatctggtcgtgttgagtgttttggcagaaaaacaaaagctttaaatttaatcaaatccaatgctgactaaacttcttgacaaagacgctaaagctctagaggaaatgacaaaaagacccatgcattttttagtctatttcagaattatcttttggggtatttatttgaatgctgtatatataactaggcaaaaattaaaataaagaacgatg

SEQ ID NO: 14239 - DNA, 18585 bp, Cannabis sativa
  modified_base (18129)..(18140): a, c, t, g, unknown or other
  modified_base (18554)..(18559): a, c, t, g, unknown or other
tcctgataaaataatttccaacagcagcttacagtaagatggtagagtgattttcaaaagaagtcacttaacttcgaacatagagtttatttatctaaggagctattttcaactactctagaaaagataaaggccaagaaaataattctctaagcatcaatagcaagaggtcttatgtatactcttgaatgcactagatcaaacatctactgttgagcggaagctttgagtaagtattagtttaatctagaaaggaacattggacggtagtctaacacatcctgaaataaaagaagaggaactatatgttagttagtaagggtggtgtattaaaacccttaggctacaccaaatcgaatttctagacttgcgtcaatgctagaaagtctacttaagaaatggtgattactataggggtggagtagttgtttctggaaaactgtaaaagcctatttggaatcactaactctaccagtaaggcttaataataaggttgacctaaaggaaattagggaattattcagactcgagaatgttcgatacagactttggcattatttccaaacatggaataattgctagtgtgactctgtgttgatacagatgccattgccaaatagtaaggaaccctgtatcttaagaggagtgaagcgtatagattgggaattcacaaaattatagattttgtgactaaagaaaatttaatagtggggtaggttgatactgaatacaacctatcaaattctattacattgtttatgccaaatactacatttgaacaaatatgagattaaattaaaatgtactttagttttatattagtgcaagtgggagtatgttgggattttatgccctaaataaaatacaatttcattgtaatcatattgacttttaataaagatcaaaaatcatttcatgactcagtcataagctttgttcacatattttatacatgattataaaatataagttctattaaatcccaaacatatagttattcacaattacagtgatgtcatcacagtagaaaataattatgattatatgcttcaaattatctaggcccacgttttatcagtgcacaagatttttattgacatgataatcagcaataaggtttacttacacttggataagtggaatgtcttttctaggacattagtaaagtaaactagcatcagatctattggctatacattgaactggatcgatatttacagtgtaatagatatcgtaaacttaccataatatcttttgtaggtaaatatctaaatgttgatcttagataagtgctcttaatcttgagatgattaggttctagctcaattgtgtttcacatgttctttgatttgttcattaaagctttcccattggtttagctcaaatacttatatcttaggaacatggtagtgcaattgagtgggagcactggtcataaatatggaatatatagctaatataagtacttagaagtgaaatgatggtttccttagagcttggcaaaacgagtttaaatgattgaggtctcatttcaataattatattagtttcctaaaatatcatttacaaggagctaagtattttaaggataaaatatattaaaaaaatggtaatttagtcctattcaatgtagaccgtctatagaggatcattaattatttaaattaaaataatggataactaaaagtgtatgtattcttggagaatagaacgttctatgtaatcaggagtgtaattctgaatctatggtagaatcaggaggaattaatacgatagaaaatttactcaatttactcaataaattttggatctacttattaggagctttgttacataggcccatggtccccacattttctcagataatatcatcttgtagactaaactaatttatttaataaattatttagaattcaaaaatagactgtcttatttgagaatttttttcaaagcttgggcaattttaaggagaaaagagaaataggggtttatttattaattagtaacctttgtgggtctaattaataaatatatttaaattttatttatttgataattattaaaaaaaattggtatttaaataattagatgagataagtggcaaaataagaaaagatactttagtttcattagttaaaataaagtagcaaacatctaaatctaaagcccataatatatgtggccttatgagttagatatcaacctaagtctttattttagtccatctaatctaaacctagtcctaggtcaatccctatataaagaaagagaagagaattaaaaaaactaatgtctcttcttctttttctctttatttattgaagttcacaagaaataattctctcaaaattgttctaaaggtatttgactatcatcccacactattaaaggtgatacccaggcctttgtggaagactgtgatgaacacaatcgaagaaggagaagatctaggttcggttcttggcaatactctacgatagaaaggatcaagggttagagaattgaacaaaaggcgatatttagtttggctgtaatcactgtaaggtttcttaagcttgtatgtgtttaatttgaattgttttaaggttctatatttaggatgttagattagtattaactaacatacttgtttagtaaaagtaagatccttgttaaatatattttccaacatttctaatcaagggcttcaagtggccattgatcaaattctcaatattggccctactactgatgcttctatggctgggcatgtctctcaaattccttttaataatgagcctaatagtcaagctcaaacttagagagtttctacgggtgcttgtaaatgctaactactttgcccggctccaattatggttagttctgtgataactcatgctgataaggggaaaggcattgcttatcaagagagtcctagacctagtctctcaatagatattaactcctcttttagaggtttaactaatggttgtcctacttcttccattcctacttctgttgtgagagttaagaggtctttttcgaagaaaaatgttcaggttcaaaactcagttagaagcatgctgaagcgtgctagaactgcaaaggaagatgatgatgttgttcctattgctgctatcccgaatgaaacgatgagtgttgctttgcaaccccatcaggaaaaatgagtcatgtgagtggaatgctcatggttcggagagtccttgagcattctaaaatctctctcttttggtgaagcaacactaacttgtactcctttctgttatggaatctatgttatagttgggctaggaggtgaatgttaaaaacaaattttattttgacaatgtttttaaagtgcgcagcagagtcttagagggaggtcttttacttttgtggtggaatgttattaatgttaatattttaccataccctactaatcatattgacgattttgtaaagttggaagatggaatgaaatggcatgttgcttgtttctatggctctctttatcttgttaataaatctgattcttggactttgcttagtatacttttttttgttactcccatgacgccttgtatgatctttggggactttaatgactatctttctgtggatgataagaatacttctactaggcctccatcatatgctatgactaatttttaaacttttttggataaatacaacatgttacctatagctcacatattggcagctattttacttggaagcatggtagtattttatagcatcttgattggtgtgttgtaaataatttttgcaaagatatttgtccttcgacttctttgttccatttttccttttatggttctgaccataaggccctcaaagttattcttaaggatgaccttagaggtcatagtaagaataaaagttttttctttgtgaaccactagcctactgatactaatttttatcgtactattaacttttcttggcataaaaaattgtgatataaatgagggtgacaacctgaagtattttcttaataagaaaattatatgtgtaagtggtattagttcttggaataatagtaatagtaatctttggaataaaatcaataagatacagaattatcttgatgctaatgatattgtgggagttaaggcccttcaaccattccttgatactttgctttataaaaatgaaatctattagaagcaaagatcaacggttgattggctaagcgctggagttaaaaatatgaagtttcttctttataaggcttcgactagaaggaaaaataatttcattatgtcaattaatcttgaggatggatctgttattaggcacactacatctattgttagacattttgctagtttttacacttctttgtttttctctcaaggtccaaatttgttgcaatctctgacattatggttggtatatctagtcatctctcctcttctcaggtttccttacttgatgctccttttgtggaggatgaggttagaaaggccttgttatctttttggggataagtcttcttgattggatagtttgaatgcttatttttaccaaaataatttgtctactattagttctaatttttgtaaggctattctggctattctaaataataattcaaatatttctcttattaatgatacagtaattgttcttatatcaaaaaagaagaatgctagtaagatttgtgatttcaggcctattagtctttgttctactctttataaagtgaattctaaggttttagataatagtattagacttattcttaattctattatttatagcaatcacagtgctttcctttcagacagattgatttttgagaacatttttattgctaatgagcttttcaataaagggtggctttgaaaccttatatggagagacttttcacaaagttgagtggagctttgtaaagaccattatcaatcatgttggtttcccctgggtttatttctcttgttactagctgcatttcctcagtttcttttaaaattctgattaatggttgtctttcttaaacttttgtctccactaaaggaatcaggcagggggatcctttaactccttatttgtttttattagtggcgaaaggcctttttgttgccatttgtgtcaaggagcagactaaggatgtttctggtattgcaatttgtagatctgcccgtgttatctctcatttaattttcgctgacgatagtttgttgtttacctcggttaatgagagattgtgttcactcattaaggatattttagagatttataatcgtgctatgggccagtctgttaatttttctaagccttctgttctgttctcccctaacactagtcctgaggataaggactttttttgtagtcaactggggcttaataacgagagttttgttgataagtatcttggtgttccttagtgtttgggtagggttaacaattctatttttcacaatctgttccagaatgtttcctcaaagatgaatgtgtggaatggtaaattcttctctagagctgggaaagagactcttacaaagtgatggtccaagcaatcctgtcttatgctatgtcatgttttaaattagctaaatccacttgtaagagtcttcagagtctcattactaatttctggtggggtacttcaaataataagaataaaattcattggaaaagttggtctagcctgtgtgagtccaagttttttggggttttagagtttaggtatatttgtcatcataatcaagccttgcttgctatgcaggcttggagagtctggtctaacccttcttctcttctttcttctttgctaaaagccaagtgttttatgcataatgacttttttacggctttcaaaggtcactattcttcaattacttggaagagccttctttggggaagggaatttctcttaaaaggtcttatttggtgagtgagaaatggtaattccatcatatcggttgattccaattgggttccgggtttttctattgaaggaattgggttccatgtttgaaatctccttccttcctgactaatgttccatctctcagcgatgcactgtctcttttttttattgataattatggaagttgggatgttaagaaactattccacaaattcctattgatccatcttctgatgatagtctcatggggatatcatccttcaggtaaatttgcagtcaattcagcacactttgtttggaaagcttgtaactatgttctgccttgtgcacttaacctatctaagaaatgtgtcattgataatcctaattgttccttttatgtgagcaaagtagaaatagttactcatgcccttataaactgttccagagctaaatttgtgttgaacaacacatcttttaaccacttttacaatgtgaataaaaactatatgttaagaaatttcttcttagaggtctggaaaattttgacaaggaaaactttggtttgttcttgagtattgtttggatgatttgatctaggaggaatgcagttgtttataataaaaaataagttagttgttttatggaggtaaaaggttttgccagtgggttttcgcaggagtacagagaaactcaaaattttcagccttgtaagagcaacttagaggaattggtgctgaggaatccttcaattattgatcagcctacttcaggagaatacaagttaaatgttcacagtgctcttgattctaaaaagcattgtactgatttgggagcagtggtgagagatttgaatgaggagcttcttatgcctgaggcccaagctttatatcatgcattcatttggtgtttagcaatcaggttacttgtttctcttattgaatcggattgccttcaattagtgacgaagataaaacataggtggaaacatcgatcacctcttcctggccttgttacaaaaattattgattccttatcttacttttctaatgtatctcttcattttgtaattgtaactttgtattcagttttggttttcttatgtggaagttacaattacttccaaaaaaaaattttttttttttttgacaaagaaagaaagctgctaaaaggtaaacaaatgagaagagcagcaaataggagcctaaacagcgtcctcaagatcatcctctcacagcctaattgcctctcttgctaggaaatgagtggttgtgttgaactcccgaggtaagtgcacaagagacgcatcaggaaaattggagaaagactgtctaatctgtttaacaatgagtgcgagtgtggaattgtcctgccagttgccattaaccttcgaaaccaaattgaggcagcctgtataaattattcttggttgttgctgtagagacatgcactaggagagaccatgagcaagagcttgggcttcagcaaaaatgggcggaggagctccaggcttctgggaattggtagttgcaataacttgatgtaagccaattttgaggacacagccaatgcctgtgacaccacggtcttgatctaaggcagcatccacgaatagagcatgggtgtcttgttgaatgagttctggatgacgtagttgttgaggtgttgaagtagtggggtctggagaatgtatatgttgagcctcccggtaatcctgcagtaaagtataaacaaaatcttgcacattgttaggctcagtgcagtttttgaatataattgaattcctggtagaccaaatatgccaaagtatgccaatgaaaagaggaagatcgtctttaggaataagttggagggcctgaagatagtagtccttaatgtcgtggtttctgtggttggtgtgaaaatctttaaattttgactgcttccaaatattgcaggctctggaacaaacaacaagagcatgagagaccgattcaatagcattgccgcagaagtgacaagaaggttgcagaaggaccttcttgtgaaaagatttaaggcacagggcagaatgcaattgaaggctttccaagagaaatgtttgatcttcggggggatgggaagggaccaaagagttttccaccatcgctcaaaagggtttggattagaagaagagggggagtgaatagttgtttgagcagaggcaaggtgataagcagatttaactgtgaggatgccagagttatgaaaaccccaaacgagagtatcagtaggataattgagaaggggaatttggagaatttttttggcctggtaagaaggaagatagtgctttaggcgaggtacattccaagtgtgatcattgtttatgaaaaaggaaacaaaagatagatgagggtcgataggatggagaacggtaggggaagaaatgcccgagatccagataggggcagatataggaatagtactgccagagccaatcctccaaacaagaccctgcttaaggagttgacggccccaaagaatacttctccaggtaaaggaagagttgtagccctggggagcagacaagaaatcagagtgtttgaaataacgagccttgagaagggaatacaagatagtgttagggttggaccagaggttccacgcctgcttagcaagaagggcttgattgtgccaattgagatttcgaaagcctaaacctccgaaaaacttagaaaccgtaagagtagcccaagacttccagtgaattttgtgattattaggagaagagccccacctgaacttagcagttaattgttgaatctgggtagaaatggatttaggaatcttgaaacaagacatagcataggaagggatggcttgaataacagctttgatgagagtttccttacccgctcgagagaaaagtttgttatcccaaagatttagcctagaggagacactttggactaaataatggaagacagaattagtaaccctgcccacgcaatgaggaactcctaggtatttactaacaaagccttggcccatcaaatgcagagctgccctgaactctctctgggaaacagggggagtatttggggagaaaagaatggaagatttatcacggttaaccaattgaccagtgccttggttatagagattgaggatattgttaatggcttgagccgaatgatgggtgaccggggtgaaaatcatactgtcatcagcgaaaagaaggtgagataaagaaggggctcccctacaaattctaataccattgaaagttcccctagtttcctgcagatggatagcagcagaaaggccttcagcaaccagaagaaaaagatagggggacaatggatcctcttgtcgaatacctcgagaggaatggaagacatcggatagagtgccattgagggataagcgataagaaacagtggagagacatttcatgataaggccagtaaaatgtgaggggaatccaacatgacataggagatggttaagaaacttccattcaacccggtcgaaggccttctccatatcaagcttaatggctgcccaaccagtacttccagttcatctggtgtgaatggcatggattaactcattggcaatgagaatgttatcagtgatttgtctgcccttaagaaaagcactttgattaaggctaatgatggaatgaagaacattcttgagcctattagctagaactttggatagacacttgtataaagtattgcacaagctgatagggcggaaatcacgaacagatttggagtgcttctttttcggaataagaacaaggatggtttcattaatcaaagagatatcaccattgtgattaaggatgtgcaacagagcacgagaaagctcaggccccatggtatgcaagtttttctgatagaagagggaattgagaccatcagggccaggagctttatccccagagaggctaaacatagcctgcttaatctcaagtttaatgaaatcctcatacagataggcagtttgggtaggggagagggtattagttatcccttcgagaatagagtggattgcagtgtcactaaccccttgagtagtgaaaagatgagagtagaagttcgtaaattgggagaaaatagtaatagaatcctgagtaatagagccattagggagagtgagactacgaatgaaattagtctttttcctggcagaagctttacgatgaaagaatttagtatttttgtcaccagcacgaagccaatccacacgagaacgctgcttccagtatatctcatccttaaaaagcagcctatctaactcagattgcagaagagcagcttgagaggaagactggggagtaggctgggaatcatttaggagccgattcaactcagcttgggttctagagatttgggtctttagaggatattgagagccactccaagtcttaatatcagagagacaagtggattgtttattgagaaaggagtgaagaggggagagagtggacggggaaggaagatgccaagaagagtgaacaatggtaagaaatgaagggtcattgagccagaagttttccatgtggaagcgagtagacttgtgagacgccatggcagtatcctccaaggcaactttaaggactctatgatcagacccatagaaacccaagtggtgcaggaaagcatggggaaagagatccttccaagaagaagtggtagtgcacaagtcaatacgttctagtgtactaccatgcttccaagtgaacttattgcccatgtaaggaagaggggaaagattacgggtagataaaaaggcatgaaaataatgcatgctatgtgagggagggatgctagaagagtttttatcactaacagacaagaaatcattaaaatcacctataactaaccaaggtaaaagcagtgcagtatcatacaacctattaacaagagtccaagtagcatgtttatgagtaggataaggagaaccataaaaaccagaaaagtgccacactatatcattagaaatatttacaatacagtcaatatgattaagggagtaagagataatagttacatcaaaatggttgttccaaaaaagtaagagccctccccctaatccatgccgaggtacttcaaaagcgttgtcaaaatgaagcttgttcctgaaggttgtaccacgacctgtcggcagcttagtctccataacaaaaagcattgtaggctggtgctgcttgaccattagggagagatttcggaatgctcgagggctacccaacccccaagcattccagctacagatactcatttttgtaggcggggccgcgtagcgacacccaccgttgcatcatcatcagaaactgaaggaacaatagcatcctcgctagctacttcacgagctctcttcaggaagctacgagcagagtcacccacctggttagattggcgagtggaagagcgcctgggtcctggtgaagaggtaggagaggtaagggaaactggctcatatataacattacctggaggcccagtgcgtgggggtgaagggtgaatggaagtgggttcagcaatgccctttcctttgtcagtgtgggtgatgacagaagtggttataataggaggtgggatggtggttttggttaaaggaagggtagactctaaggagacggggtttgtgggcatgagagtgacgatggagtgggataaaggtggtgatggggatacagaagagtggaagccagtagtaggattgtccatacgaaggaactggtcaaccgcttgctggaagctttgatcattgggactgccgcggggggaaaaagcttcaaggcgattggagttagagatttcaaagggattcctcttttggttgggctgggttgtagcacgaagagtttctttgtattcaaggatagggggaacgggaaattgtcgcatcgcataagatatttgttgcatttgttataggtgtggtcaacaagtccatagaagtagcagaagttggggagactctcaaactggaaacttatccatttcggattatggattccacgaaaacggatagtcatgccgcgtctcagaggctttgtaatgtcaaatagtatacgaagtcggagataggggccaaagttgtcaagaagagatagaggatatatttcaaggagttccccgatttcatcggcaatgaactgagcaagctgaggactcttgcgaccgaaggggatattgtgagcttgaacccaaaaagggacatagcagactgaattgggggtaggggtgggagagacttcagggtgagagaaaaccataaggaatttgtcgaagtgccatggctgttcttcaagaacacggcgtctatcaccatcgcactggaaagaagctagatacaggctagaatgatagtcagagatttggacggggaaacgcagtgtccaggcttcagacatggccttttctatccaggagggtttgaccgattttggtgtgagaagcttgaagaacaagcaaaaagagttggagtcgtttgggtggttgtgcgagatatggtcaaattcatggattaaactttcctcgtcttcgagcagggtaaggtggttacgggaagaagaagccattggaaatcggatagggggagcggggaaggaggtctgagagagaagaggtggtggatgagaatgggggtaggtgtggatataaatagacagtaaagtaattatgaagaaaaaatacctggagcagaaggggcatctcgattgttggaagtctctggaggcgaactcttcattttttgcaggagccgtctgaagggagaagataatgattacagagggggggtgatcttgagagagacggagcaacggttaacatatcaggtttgatacatcgaagagagaaggagagagaggtagactgagagtacattaaatggagaaaagatagagccgtcaaaattaaatgcaaacgggagagagaaagagcattaaagagtctctgagcagaaaaaaagaggggttgtttcctaatgattattatatatgatgttagcataattaaaaccacgagtagaacagagagattaaacctgggtttggaagaagagaggaacaagaaaaacttttgttgaaatcggaccagagccgtgcctgtaagagaggaacaagaaaaacttttgttgaaatcggaccagagccgtgcctgtaggaagcttcacgaagaagaagtcaatttgcttagttttgttgttttgtttacattagtcatcttccaaaaaatatatatatatatatatataataaatggctaatttagtaaactacacacatacagtgttcttttttaggtttgtcctatatgccaattacttttctgaattccacatcaattcggatcttagttaggcttcaaaactaaattgcaataattaaaacttatgaccccaggaatttaaagtagttggctcattgtggggccatactagtcaatgcaaacttggactgtttgcaggagtaagatcacatgattttcaacaaatatttgggtagtaataaaagttaaaaatgaacctaattaattacaataagacatccaatgcttaaatattttagagtatgaatgaatgtgtttttatttatttatggtgtcgatttttttttttttttttgaaatcttaaggtgtggaatttaaattgacgtaacatgtatgaccggtcttgtattatggggtcggccgacctctgaaagtaatgtcaaacataagttatataggtttttttgagagaagtaatatacaatatagttgaacctatttatttgcatttaacacaaaaacaatatcagccaaaccgtttgcaaatgctaataaaatatatattttattattgagggtggattctagtgacactttaagatttcccatcaactaaaaatcttcctttactaatgcatgtgcaaacacccatgtgatagagagacaaaagagtatattttaattaattaattaattaatttaattacaaggataaaatacacaagttgagcaaaacagaaagaatttgaggcaagtggttgtgtgtgtacacacataaataagaaaagaatcattagggattttatatagaaggcatgtgattaagagaattgtcacccaaatactctctctccgtatccgtatctcattatatgtgtacatacacacaacatacaagtcccataagcacacaacaattaattagatcccttcctttaaaagctttcaagtagaggcccctacgattggaacatccataaaaaggaccaattctactcctttgaccaacacatttgaaaaattgagtttttttaaatgtgaataattattacaaaaatatattatatataaaactgtatacgtctgcagcagcagaacgtaattctgttactgtagaaatcaattttacagagacaaaccagagcaggcaaaatataaaataatagcagaaaattaaatcacttgacacaagagatttgtacgtagcatcagtgttctttcgaacactcctagtccacgggattacgcccagagaaatgaaatcaattaataaagtatcaacaactacaaagacaattgatttaaacaagtttagactccttctaaattattgtcgcagtcttttgtaatgcactttatgaatctgatctcagaaacaccttcaagcagtaaactccctttgtcttttaagtgtgcgtgcttacttcctcccgaagtaaggcttcaataagtgttctcccgaagacctctctcttgttcaatcaagtgttctaaccaaccctaagacagagtaagaacaaatatgaaaacactagaacctagatgagcaactaagttctcataaaaagaactctccctttacaaatgagaaaatacaaaaaatgaaagctagaagagttgattcgaatgactgctctctaggttctatttatagaatatagaaaccctagagatagccacaaactcgaatctacagctgtacaaaactttcctaaataaaatcctgatttgcagtatcataaccaaattttgtcgcagtaaatcagaccagaaaaagaaacttgccataaatgtatccgatcatgtattcttaataccttccataaacagtgtgtttaatctgatcttatcaagacacaatcgatctcattaaggaaaataataatagtcaaagtttccataaaaaaataaactttctgtcttctcttacaagaagtttccaaacaaggaaaagtccagctaaaaaatgattctttcctaagatagaaaagatcaataaaaccaaataattaaggagagaaaattggttaagaatgcaaagaaatctcaccataaataaaaaatattttggtatctaaatttccaaaaaaggactttacaatctccccctttggtactttagataatcaaaatatttttttaacagaaatgtacctgcaaatcaaagttagcaaaaccaaacaaaaaactccccctgagaaacacaacataaaaccaaaataacaagctaacttccaaagttgatcacaagtaccaaacacaactcccgctggaaaaagggtccagagttgagaaaacaagaaattaaaaacaatctattactccccctttttgtttatctaagggccaaagacaaaaagtaatgaaaatatggccaacaaaaacatgaaaaagaaagaaggacttatgccccataaagcttgatcaatgtggacagcttcttggatatctcttgttgaacttccttcatggcagcaagatgattgttcacctgaagaacttcctgcttgacctcctggacatctggaggagcagaactggaacttgcagcagcagcagcagcaccagctttaggacgcttgggaaaagctccatcaaagtactctgagggtagaaagatggtgccaatgaagggaggctcaagtgtctcatgagaataggccacatccttctgagaggaaagaatcttatagattaagttaggaaaaacaagcttatgagtacgcttttacctcttcgaaaagaaacaatctggtccaagatggaagaagccagatcaatggatgcccctgaggtgatacgcaagagaaaagatgccaaatcttgagacaccactatttgttggagttgggaagccaattgctaagagcaaacctcactagtgatgcatgtgcatatgtgagatgagtaattcgaagactttgcccagatttccattcaactcgtgcaccaatgagttcagtgagcattagatgatgatccatacacatgacaacattagacacaccttcgggtaattgcaaaaccatagaaatgtccttgacagtaaatgaaaactaatgcccccgaacatagactttactaaaaaaattcagagttctcatcaagcaaatcattagacaaattggcataaaattctttgacaataccatcattatacccttcaaaaccagtaagtgtattttcccattgatgatattgaacaaacttaacaatatcatacacttgatgagcatgcaaatcatagtttctttcactttcaaactttcgagtagcataaatattccaatcacgctgatttttatggtaataaaatctggaattgacagcttgagagggagaaatattaccagaagtggaactctggataggctgcttgcctttggcagcagcagtgactttggctgcagaagaagcagaaggaggtgttggagcagatttggtcaatggaggcttaggttcgagatcagtttcctcactgtcagaggagacaccaaaatcttttggaagctctttttcagaaggaaaagacacgaatttggtctcgaagtcatcagaggagacttccatatgttcttcttcttcagaacttgaagaagccgaggggggattcaacttcagcttcttggcagtaggattcggtctgtcatggctttatttggtgcaaagttccttctcgagtgaagcttattgggcacgagttcgagaggatggacctgttggagtttatgcagcaaaacccttaccagtgacagcaggaggtgatgcagtagcacgaggaggagaacccttcgacgatgaagatgatgaagtgcagaatttcatgggtctcatggttttcctagccacttgtttgggaatccgtttaggcttgatcttcacattctgagattcacgctgaggaagcgatgaatctccttggagaggagcatttgcaggagcagggagcaaaattggagccacaggaagagcatttgagggggcaagttcgggttccaccaccttttttggttgccctaaattctttgtcttagccatggagatctgaaagagagaatgaaaaataaggaaacaaagaacaaggaagaggaatcgggtagatggtgaaattaaatgacaaagaaaattgatttaaataaacatgtgagagtggagcaaaaaaagaaaccaactcaaaatttttttaaaaaaaaacttaccatcccacgaaccaaagaaaaccacccactcttttcccaaaattattatttttttaaaaaaaataaaaggaaacaagaataaccaaaatactttccaaaactaggccaattaagaaaatccttcaagattaatgacaaaatacaatgaatatgaaatcaaactataaaaggtaacttatcaaaataaatcaattaagatcaaatgttgatacttaccaaacaaagcacaaattttcttagcccacaaggcaagtcacaaccgtctcccttcttgattatatttattttttattttttttatataaatccaaataatcataaaaaaaaaatatacaataaatataaggtattctagagcaagcacctaatcgaatttcataacaagtgacaagtatacatgttatgcttttaaaagaggataacagattagtatctaaataaccaatgacacttcatagacgttgagaaaaaaaaaaggacatgttacaaataatgtgaaccaggataatttttagttgagtagatgagacttacacacttgaattcacttgttagacataagtgtgtagtgaaaataggatcactgtccttggcaagatttttatttttcgcctttttttaatggatcccacaactagatgctatcacaccatactgaaggtagcccttttctatggtagtccatcctcatcataactcttaattacaaagttccaacttactcaaaagatggctttcacacctcagtatgggtagctctatcccagtaaggggcatgacaagaaactaaaacaagaaacgctcaactctgtataagaacannnnnnnnnnnnaatcacacataaaaagtaacatgaatgttataaatcaacctcaaaagtatgataagcacaagatcctaaactaattaacatccaaaagcataaacatgatttgtcaaataagaatgaaacaagattagatgcaagtaaagaacaactcaacaatattgtaaaaacaagaacaagagagattaaacaatgcaatctcccaaggattttctgagggagtcaaagcgaattaagtctagggccttggtgaaaatatcagctaattgtttctcagtatcaacatattctaactgcaaagatttattttcaacaaattccctaataaagtgatgccttatatcaatgtgtttacttcgagaatgttgaacaggttttttagaaatatttatggcagtagttgttaggttttatgccctnnnnnnaactccatttcaatgtaatctatttt

SEQ ID NO: 14240 - DNA, 28374 bp, Cannabis sativa
  modified_base (37)..(43): a, c, t, g, unknown or other
  modified_base (635)..(636): a, c, t, g, unknown or other
  modified_base (4818)..(4826): a, c, t, g, unknown or other
ccgaaatatacattaaataataaaatatttttgtcannnnnnnatgccaaaaatggaattaacattgttcacttttttgtttttttgttctaatttttgtttttttttcctgaaaggttctaatttttgtgggagttggtgtggaggggggagggttggttttcttggcagtaagaagaaacagaaaggaaaaaagaaagttaaaagaaaaaaaataaaggaaagaagaaaaaagaagagaaaaaaaattattttttcttttaatttttaaaatttttaaatattttatttatttttaattattaatattaagtggttcaataaaatttaggctaattaggatttttgttctctaaattttgacatgtaccaaatcatgtcccctaaattttttaggccgttaaaaaattccccgaactattgaaattgttagatttaagaatttctgtctaatttctttcaattttactaatatgatgattgtccatatactaaatcttgctcttcaaactttgatatctactaaatcatgcctctccatcttttaaaactacaaaattgtgccccctaaattttcatccacatcaaactttgtttagtaaaattggagaaaagtccttaaatctaacaatctnnatagtttggggggaatttttaacgacttgaaaaaattcagtaagcatgatttggtacatatcaaaattcaagggtaaatatctaaattagcctaaaatttatctactaaacttaaaaataatgagaatttagtggcaaattaccaaaaagtataatcatatcttgggtaggaagaaaccgcgtaaggtgtccaccacccaccgcctcttatgatttccaaaaatataattcaaaccaatctagaagaccacgttcatctaaaccgtccatatattttatcaacatttaatcttagccgttcatttaaacatttttttgctataaatagaccctggctctctcttattcctcaccccattgaagtctccagaatggggtcatctcgctctacgagcaagagctatggttagcgttttctattcgaagcattttgtatttgattgcttatcgcggctttgttcttccatcgatatccctgcgtttgattaatgtttgcatgcgttttgtacggatcggtttttgatctttgtcgaaattgatttatgcagacgatcgtcgatttacgcttgggattctgattagatcggtgtcgtttgaaatttggattaatatttctttttcgattcttttttcctatttagagtttcctttggctttttcagcttatggattggtggccttgggcctttgttttggtttcatctatatatgcagattatgcctacaaccattgagtgtggttttcacataatctgagatctttctttcgataacattgttcgagggttggcttggattgttgaggctgggaatgccccttggtcgtgtggtatcaaatattcaggttctttctggttaattgatattctctgcagagttattcataaaagcatgtacctactctgcttgtgaaatttccagatttattgaatcaagtctctttctccagcttgctcaagaggttgggcaagatgaggtccgagttttgccaaccccttgtcttatcttgcttttggcgatcttaccctaatttctgaaatcatttgtcatgttaaatttctgaaatcgtgatgactttttttatgaatatctggtttggatcattgattatttaagtacggacggatggtttgatatacttacacatatacatttcatttgaattgcagtgccttgataaaccgcggctcatccttatgggtttgacatagtatcatcatccctgccctttttgtttatcatgctttgttttgagtttctttctgcgtttaggtgattgagaggatggttcaaggtcttgtgtcgttagattaggcgttttcttatttgcatatgcattttattcactaatttcaggttcgcgtcttgcgtaaggcttcagtcttctttaatcgggtcaattaaacaagaatttaaccttggaaggtagttgtcttggactagcgcttccttttaaagtacctttttttttattttacaacttaagcttcggtctcttgtgagattttggtttatgtcttttgttttggacgttcaatgaattttcaggactcttcttttactcaagaatattataaatcatggatgttttaattgtcttccgcttctccgtttccatcattgcgggctagatatgtttcatcaccttttcatctcttggtattgtatggttgagttatgctttatgataagtatctattttcatatatgattgtcagagcatcaccgagtgttgatatgcagcttaggtatatgtattagtacttatatgcgtcttgtagaggttcagaggttttgtgcaagcacaactactttttggttaattcatattctctatgcagaattattcctaaaagcatatacctatttagcttgtgaaatttcttgatttattgaatcaaatacctttttccagcttgctgaagaggtttggctagaaaggcttcaagtttcgtcaactccttgtcttatccaacgtttggcttttaatttctgaaaccgtttatcatgttgaacttctgaaatcgtttaaacatctttttttctgaatttctgatttcgatccttgatttccttctttcaaggacgggcggatggtttcatattcttacatttatatttcagttgataaactgcggcaattcatcctaatgggtttgacatagtatcatcatccttgcttttatctctccttttgttcattatgctttgttttgaatctcattcttgagggttttggtatgttttcctcttttaggtgatcgagggaatggttcaaggtcttttgcactatggaaggggtgtaatctgattatttcgaatcttatttattcatccttctttctttcaagcgttttctgatatgctgtccatcttagcatatgcatttttttcactaatttcaggttcttgacttgcgtcaggcttcagtcttctttaattgggtctatttaaacaagaatttaaccttggaagggagttttccactagtgtttcctcttaaatgggtttttattttctaaaacttgagctttcatctttgtgagattttttgttcatgtcttccgttttgggcattcaatgaattttcagggctcttctcgagaatcatttatcatggatgcttttattgtcatgctgcaagtcttgaatgccctccggctctccattccctttactgcgggtttgatctgtttttccacctttttatatctttgtattgcaaggttgggttattctctgcgttaattatctatttacatagatgagtctctgagcatcacctattgttgatctacactttgcaaatttgtaagtgctggaggtttttgtgggtattctatgtgatatttgcagatccgccttcgatttctatgtggggtttggatatacacttgcgaccaagagttattgtaccttcagataaaaggtcaaatatttagttaatgacgtccaggttcgtgatttctatggttatgtttccttgtagctttgatggatgcagagcataaatagtggtttgacttacgcttggtactttgcatgtgcatctacagcacgtttggaaactttgaactctacacatctgttaaatttatcttgggttgtgatctccagtcaaataagaatgctataattttggaaatttactctcaaactatatgatggtatttcctcgttaggtaaatgcgtcattttttgttcgtttgatggttgtgctccattctcactccttaactttttgatggttaacttattgtttagatttcatttcttgtattttcttgttttggacttcgaacatcattgcatgacttatggagatagcaaagcatggtttaccagagttatattattggagttcatgcaactgacctatttttctgaaaacaataccgatagttttatttacttccaatcgttgaatcgacatcctctacatatatgaagagtattttctcattaggtaatgggtagtttgttttttcagcttctggagatggctctaacggtttcacatattcaacactggatttcctacagccaacctaatctgtgaaataagaatttcagctttagttatctcctttatatatgtatatatatattgatcgtcttcctctctccctatgtcttttctcatttggtgattgtgtcgttttttcagtacatatttgacttttgactggattgaaccttgtgaaataattaaagctggggtgcattggtgatggtattttgggaacaacattgcattggtggtatcatattcatcgttcctattgtactatatcctactttgtataatgtatagtttagttttccttcctcttgaatttttttgttttagtcttcaaacaacattgcagttcttatgggatagcaagcatggttttggaatcaagattagagtttcctacagctgacctattttgtgaattataagatactagttccatgtactttgcattctctaattgattctctccctggatgatggtattttctcattatgtaaatgaatcatttgttttttcagcttacagacatagctgccatcgtttcacattgtcaacactggattaccagcaatccctgcctgcaacctacctattttttgaatttttttatttcatcattacatacttatcctattataaattgactctctctctctctctnnnnnnnnntctctctctctctctcccccccctatgtcttttttcatttggtaaatgtgttgttcttttcagtacttaatttgactttggactggatagtactcttgtgaaataaagttgcgctggtttgcagtggtggttgtgttttgggaagggagcgacattgcatttgtggtatcattgtcattgtttctgttttactatttgtacttccttgtgtaacattttgtttacttttctttcctctttaatttcttgtttttgccttcttacatcattgcagttcttatggggttagcaagcatggttatgggctcatgatgggagttcctacacctgacctattttgtgataagactttttttatttactcattgtctaattgacttcctctctccctatatgatggtatttttttattaggtaaatgaatctttggtttcttcggcttatgccatggtttcacttaatcgacactggattacttgcaacctacatatcttgaaaaataagaaattcagctttacatacttatccttttcaaattgattgtctccttctctccctgtatgttttttctcatttggaaaaatgtttttttttttcttttcagtacttttgtgacttttgactggatagaattcttaatgaactagtcaaagctgttctaatggtggtggtgtttgggaacattgtattggtggtatcatagtcatctctcccctttttctatttgtataattctatttttgttccttgaattttcttattttggactttgaaccacattgcagttcttatggagataagatggcatgcatggtttcagagtcatggttggagtttcaaagttttatgtacttctcattgtctaattcctttcttcctgtatgatggaattttctcattaggcaaacactttttttccagcttacggagacagctgccatggtttatcatagtcaactctggatttcctaaaacctacctgttctatgaaaattaagaatttcatcttttgtactgaccttatttcaaaatgattgtcacctcctctccatatgtttcctctttcagtacttattggactttgattggatagaactcttaactaaatctggcgagcaatagtcgtcgtggttctggaacaacattgcacaagtggtgttagtcaatgttcccttatatctatttttactacttttgtgtatagttttgtagttttcctttcttgaatgtttctgtttcggactaacaataacattgcagttctcatggatatatcaagcatggtttcacaagctctagtgtcttgattggagttcctagaaccgacctattttctgaaaaataaggattttctttttacgtactcaattataagtcgactttcgctttagatggtatccacttctgtggacttgtttggtgggatgttgtatgtcagatgtttattggtatatggtcaaggatttggtacttggttgagatatctttagtttattggccgtaactgttgatttatgcagagcaagacatcgtttgattgaattcacaatgatggttggcttttgtcattatctactgttatttctccccaacatgttatgctcggccaactatttcttggtatgaggttaggcctttggttttatcattatctactgttattgccactcaacctgttatgctccgccaaccgctgatttacaatggggatgtttcatgtttatcttaatgtgtgggaatgtggatacgtttatgtcgtatttataatcctttggaagattaatttgatttctgatcaagctcttttttaagtatgttaacgggatggtggcctggtgtttaagagtttcaatctgtgatggtatccttgttttggtttggacttccttttagggtgtgatagtctgcaagttgcatttctctctgatattctatctttgaatgctcatggtaggatataccagtttggtggtgatttctctttggttatactttattgtgagagggtggtggtattctgttgtgtattctttgatctgtctctgaatggcttggttgaatgtatctggtatatatttggtctgggacaatcgttgacagtcatcttatttgatcaaacacttcgtgcgatacacatttgacgtttgaagttgtcttgtgatttttatgtggattcaatttctgtgagagcacatttgatgtttggtgctgtttcatgactttgaaagcttatctcttacaagaaatgtacccatgttttttcataataaaattttgtattttgattctttttgtacgttaatgtctaatttaatctcatattgctcttgtcataactaattgtattcctctgagaatgttttctttgttagcgatatagatcttttaagacaattgttactttttgtgtgttgatctaccatttatatatagcataccttttttgggcattttatacttggctagtcacgaactatacttaatgacatttttggctgacatatttttagaaatttatagaatttaagccaagtcttgacataatttgaagtctagtaaacaaatattaggctgaaaacaagaatgatcctaaaagcctagccctaaagtttgtattttttattttatttttaaaaaaagcctccttaaagcacctacaataaccaagctatgcaatgttgacccaataaggaaaaaaaaaagaagaaaaaacgtatgcaattcaaagattattttagctgttattttgtttgcatagcaatcattcacactgaaattatgttataatgttgaccatatgaaaatagtatttctgctgctgaaggtataattaatatataattcaataattatgaatttctctcctcgaaaacataatatactgaattcaacaaaaaaaaaattatcttatacggcttacacaattttttttgacctctttggcattgatcacgcatttttgtaatctgaagtcttcagcgtaatttttatttgtacttttaaagaaattatcatgtccatttttgtttgaaaaatgtaaactaaaaataactatcatgtgctttcaagttgagtgaaattgtggttttgttgtcactgaacttttcttcttaaaaatgttataagggaagatctttgatcatacatttatttctcttcgttcgaggctttttgtaggtgatagaaaatggttcaaggctatcttcgcatacgcatgtgcttgataattccaagaatacttgcatcaatattcccacctacaagcacctaggaagggtgttagcttcccttctcactatttttgcctcatactcttgcggtttagtttttcttgaattttcttgtttggacttcaaacatgcagttttgatggagaagcaaaagagtttacattggacttcatccaaccaaactattttgtgaaaatatatgacgctgttttatattctctctcgttttagttttatattgttctctacttttagatagactgtcctgtctctcacattgtatgttggtattttctcattaggcaattgtcatttatttttctaaatactaattgtcattttatcatttgttgtcagcaagatctttaacattgtttggattttggtttaataggtgatggaaaatggtttgacttgctccgatattcccatctaaacatgccatcttggaagggagttagcttgttgtagtattttctttaatgacttatttgttcatgtcttgtttgtgctttgttgtgttcaatggattattagattttctgctttttctcaagaaaatcagttggtgaattttcaggttttggtaattgacaagtatgtcactttgagtgtgcaataaatcttcttgatagtttacttgacctattttattactttgtttatttctacatgcatatagttatgtggacaagttcagcttttatccaggcttcatgctgcagtttgcatgtatggcattggacttacttttttggctctttttctgcttccaagtattttgtgctgacgtgtcctcgcattctcattgtttgtcggttttggaagctctatagatatatggtcatttgcagcagtggttatgtttattatagttttggaggcagtttttggacatctgtgacactttgtgttaaattattcaaaaaattgaattacatgtatttttgtggtccacacttcatgtttaaaggtcttatattgttgatatcaatgaaatttgtcttgttttacattgcatatctgtgtttggtgtacggttatattttaatcattgattttgtaatatctacttttatggctctaacttgtggtaaggttttttatgatggctctaacaaagtttaatcaactgatttgtttttgctcgaattacatcactattttcaaataatttgtggtgtcttcagtggttagattttatattctgtgttggcttattttaaaaactgtttattagattttagaaaatataatagtttatgtgttttggataaacgactcatttttttagttaaaaatatttatttttatattttgaagtcaatacaatgtaattttgttttgtattacgagatcttttaaatgtttttagtactgagtatgcttgctctttttttgactgagtatactttctcttggttttttccattttattcatgtttatcttgctgacttattactaatttaattattttgcaggtcctaagaactacgtggagcttgatccctatccctattaaggaatagggtacgtaggcaactttttataagtgcagctccaaactaattttcaaaaaaatgtattttgtaaaaattgaaatgcatcacatcattgatgctcaccctatatggtggtattttctcgttaggtaaatgtgccacattttttttctgtactcatttggcttctaatctaattaaagctggcatgtgatggtggtgttcccttctcacttttaactgatacattgaacttacggtgtagttttcctttcttgaaatttcatgcgaacttatggtggtgtttgaacttatggtctgctttacatacgtattttttgttttaaattgatttttctccctctccctatattttttttttctcttttggtaaatctgttatttctttcagtacttatttgacttctgacttagttgtcttgtggtgaactaataaagctggcagacaatggtggtggtgttttgagaacaacattgcgttggtggtatcattgactcagtcatagttccattttttatttgtacttcgtataattgattgtttggttttccttttttgaatattcttgttttggacttggaacaaaatttattacttatgaagatagcaagcatggtttcagtcatgactggagttcctgcaaccgacctattttgtgaaaattaagaatgctagttttatttacttctcattgtcaaattgactctctctctctctctctatatatatatatatatgatggtattttctctatgtgaatgcattgtttaatttttcagcttctggagatcgctgctatggtttctcagtcaacattgatttcctaccacatacctaagaatttcaacttttcttacttcccctttttaaattgattgtcatcccgtgtatgttttcctcatttggtaaatatgctttcatttttttcagtacttatttgactttactggatagaactcttgtgaaataattaaagcttgcctgcaatggtggtggtgttttgggaacaacattccattggtggtatcatagtcaccgatcccttatttttatttcctttgttgttatatagttttgctttcttttttgaattttcttgttttggccttcgaacatgattgcagttcttatggagttagcaagcatggttgcgcagtcttgattggagttgctacgactgacttattatgtgaaatataggacactagttttatttacttctcattgtctacttgactttctttctccccatatgatagtattttttaattaggtaaatgaatcgtttgtcttttcagcttatggagatgctgctatggtttcacatatggattagcgacaaacatacctactttgtgaatcatacgttccatacttattcttttgtaaattgattgcctcccactctcgctttatgtttcactcatttggaaaatgtgtgctgcgtgtggttttttttcagtatttttttatttttttgaatggatatgactgccggcttgcaatggttgtggtgttttgagaacaacattgcactggtggtattagtcatgagtttctacaactgacttattttgtgaaattaatttcatatactagattttaaagggaaatttgattatttatgcttacaaatgggagattaatttcataaatttatttattttaaaattttaaaaataagttcactttacattaaatctaaaaatactattttcatttttcaaacctcaactctctctcttcctctatctctctcgttgtttctctcacagtctcaccctcaccaaatcaccaagggcctacttagaccaccaagcaacggacctagccaacctacggccaccgtgagttgcaattccaatcttctaccaccgaacttcgaacagagatgtcgaaggtaagcctttagatcttttttttttattatttttgtcattggtctttttaggtgatttatgatttctagagtattaggtattgatttaggtttatatgtatgtgtttgtgtgtgcactatgagttttgttagatttagagtttgatttaggtattgattttttcaaagctgtggtttgggcaaaaacttgggttaaggtttttatttcggcgggctcgatgcaggcccgacaccggtctgatgggtttacaaaattgttgaagaagatgaaggcccgatggttgtaaaaaaatttaaaatttgttaggtcccgatggccttgttgaatttttcatttctaattgtggctcgattggtccgatgttgggctcggtatagagcccaatggccttcacataattttaatttttgataagctggatgcgttcgatattggtcccaatggccttgtcaaaatttttagttatggctcgatgtgttttatgttgggcccgatgtcctatttaaacttgactattttggctcggacccgatatagggctcgattctttcattttttttttaaattttgtagactcccacaattaataatttcactgtcggagtattacacaagccatgttacttgacgcggagaagttattgcgactcgaagattaagactaaatttgaggaatttagattatgggataaggtgagggaatcccctttcaaaaaattattcgagagagaaccattacaatttttgggggcattgatccatcaattaatgttgcacaagattcaatctgacaagtcagacgaagtattttttttacttggcgaagaaggcatacagattcggtagggtggagtttgattcggtgactgggttaaacttgttctccggacctactgaagaagaaattgaagagaaaggaagtttaaaccggttgattatgaaattttttaacggtaatctttccatcagttttggccaattgcgcagagtttttgagagctgcacagaaattgatgatgtttacaagttggggatgaccttgtttgttatgagcgttctcacttgaaaggaggagaagattgccgttccttcatttgtcataagaatagttgacaaacttctattcttttacgtacaacaagttgataaatttttttaataaagactacatagatgtgaggaataaaatgcttaagaaaattgagaagggagttagtcagtaggaggcgtaatactcatcttacggctatactgtagcgttgaagtattgggcgtacgaggccatcttggagctgggcaacgagtatgcagtgaaaaagtcgcatcgctttccgagaatggtgaactgggagagtaagccaaaaatgactcgggaaagacaaagtcatttgatgatttattagaaatgcaagttttttacattttatatttatttcatgttaaaaaaatctatctattaatatacttattttatttttcagttgacaatagactttatgttatgtcctcgatcaattgagattgagtttgtgagttgcgttactagtggtcagacgcctttatttgttgacttggagaaatttgtgttgggtcatgatggacaaccgatacaggatgctttgcgaagtcagaccaaaaagcttatctcgacaattgaagaacgagcggatgcagtttgaatatttagagactctacaccacctgcatcgtctccaccacctgcaccgtcttcactactggatgagcttgatgttgccctatctacaacattagaggatcctcctctgggcccgtcaacatctattctcagcacctttgaggctcgcaaaccagtatcacatgccattttggcaaggttgaatactgtgaagagtgagcagattgctttgagggaaggccggactactttgttaagaggacagaaagagattgtgggtcagttgaagaccataatgagattgttgtaagattttggaaggcctacactagaaacacagcagcagctacaactacaagaagagcttgagtcaccggaaaataaaattattctccaaaagaattatagaccgaatgacgacgatacgtcctgtacacctgacaacacgaggctcaccagcattggggatagtcaggattctgagatataggtgttagagacagttccagaactagtggaaaactgtaaaaagaaagcggcttaggtggttggcggagtacactgggctctcggccagattgggaacaagtactcgagagagtgtttctctggtagacacgatttaacttggttcttccagttacatattctgaagacatggatatgatatttcatttaaagaggaggtgacaacacttttattcggaagtatacgtaaatagatgtgtcatcatacttcacattttctacataagaagttattggtcggtggcaagttgcaggtgataaccacactaacttttagtggaatgacagcatattgaatttaattcgaggagatgatgcccaatacttggacaattggaagaataaagagaatgtatatgatcctcttcttcgatagtgcaaagagttgagtgacattagaagcagattttgatcattgcatgttgagcatatttgactcgagccttggtcgatttcttcaaatgaattgaagagtcacttgacattgtggtaaaagttattcctaattttgatactatagtccgacctattcgagaatcatgaaatgatcgtcatgcctcaactgaccgtctcagagagccaggttagaaattttagttcaacagttatcgacgggagcattgtacgacagatagaatcaaaataatttaattacaattaattttttattatttaacttgaatttaatttacatatttttatttaattattttttattgtctcatacaacagcgataaaatatgtaaattaaattcaagttaaataataaaaaattaattgtaattaaatttacttaattccgtctgtcgtataatgcatccgtcgatgactgttgaactaaaatttttaatctgactctctgagacggtcagttgaggcatgacgatcattttatgattctcgaataggccggattgcagcatcaaagtttggaataattctccccacaatgtcaagtgactcttcaattccttcgggaaaatcgattcaaggctcgagtcaaatatgctcaacattcaatgatcaaggtctttctttaatgtcacctgatactctgtattattaaagaagagagccatgtacattcttttcttatttttctaactgtcacagtattgggcatcatctcctcgaatattgaacagcccactgaaagttagtgtggtcatcacctgtaacttgtcaccgatcaataactttgatggaaaaatatgaggcatgatgacacatttaagtacacctccgaataaaagtgttgtcgccttctcatcaaatgagatgttgcatctaaatgctaaaacttaaaaattaattatgtcaaaagttaaataaaaaaagttaaataaagtctttataaactaaagacgtaacaaattttaaaaacttatatcatctttaatccatgtttcgaaatctgtagttggaagaattaagttgaatcgtgtctaccgaagaaacactctcgggtacttgttctcaatctggccgagaactcgcttgtaaaaagtcgagagcaactttcgatcaacgtttctaaatgggtccactttcacaagtgtctttgatgcttggacttcttcatttcagtgtgctcctcgaaccgcttaagctttctctttttcgattttctactagttctggagctgtctctaacacctgtatctcaaaatcttgagtattcacgatgctggttattttcgtgttgtcaagtgtacagaatatattatcatcatctgctttataattatttgaaaaaatgatttcatttttcggtaatcgaagctcttcttgtggttgtggctgtgtatttggtgttggccttttaggatcttgcagtgtgattgtgtatctgatgttggccttttaagagtctcattatggtcttcaattgacccataatctctgtctgttctcttaacagagcggtctggcttttcaaccttatgaaaatggcagggtatactggttcgcgagcttctgaggtgctgggaatagatgttgacgggccaagaggaggatcctctgatgcagcagatggggcaacaccagactcatctggtagtgaagatggtgcaggtggtagagacgatgcagatggtgtagagtctctaaatattcgggttgcatccgctcgttcttctaatgtcgaagtaagcttttcgggttgacttcgcaaagcatcctgtgttggttgtccatcgtcacccaacacaagttcctccaagtcaacaaataaaggcgcctgaccgccagtgatgtaactcacaaacttaatttcatttgttcaaggacgtaatatagaataaactgtcaattaaaaagtaaacaaaatatattaataaatataaaatatgaaataaatataaagtataagaaatttatatttatagtaaataattgaatgatttcgtcttctttgagtgttgtttttgacttactttcctagtgtaccattttcggaaagtgattcgattttttcactgcatactcgttgtccagctctaagatgacctcgtatgcctaatactgcaatgctgtaatatagtcgtaagatgagtattgagcttctttctaactctttttttaatattctttaacatcttattcttcacatctatgtagactttattacaagttttcgtaaacttgttgtacggaattatttttcacggatactcgtagaagaatgaaaggttgtcaactattcttatgacaaaaggagggactgcagtcttctcctccttaccagtgaggacgcccataacaaacaaagccatccccaacttgtagacatcatcaacttctgtgcagctctcaaaaattctgctcagttggtcaaagctgatggaaggattaccgttgaaaaattgcataatcaaccggttcaaacttctattctcttcaatttctttttcagtttgtccgggcaacaagttcaactcagtcatcaaactaaactccagcctatcgaatctgcatcttttctctgccaaataaaaatgtacctcgtctgacttgtcaaatttaatcttgtacaatattaattgatgaatcaatgtcctcgaaaattgtaatggttctctctcgaagaactgtttaaaaagggattccctcactttatcccatagtctgaatttctcaaattataccttaattttcaggtggtaataacttctcccgccccaagttatacggcttgtgtaatgtaccgagagtggaattattaactgtagagatttttacaaaaaaagtgaaagttagaatcggacccgacccaaaacagccaagttagaataggatatcggaccaacatcagacgcatcgggccatattaaataaaaaattaaaattttggcaaggccattgggcccaacatcggacgcatcgagcctatcaaaaattaaaattttgtcaaggccatcgagtcctatatcgggcccgacatcgggccacaattaaaaatgaaaaacttaacaaggccattgggccgtattgggcccaccatcggacccattaggccgtaaccaattttaaattttttacgaagccatcgggctccattgggccaactatcggacctatcgggctttcgtctactttcacaattttgtaaccccattggacgtcggacctacatcgggcttgtatcgggcctcgacaaaatcaaaccccaaactcaagtttttgtccaaatcacactttttaagaaatcaatacctaaatcgaaccttaaatttaacaaaattcacgatgtacacataaacacatacattataatcctaaatcaatatctatcaatactctcaaattcataaatcacctaaaaaaataatgacaaaaataataaaaaaatatcttaaggcttaccttcgacatctctgttcgaagcttaggggtagagggttggagttgcgtctcacggtggttgtgggttggttggatccgttgctccgtggtctgggtaggcccttggtgatttggtgtgggtgagacggtgagagaaacaacgagagagatagaggaagagagtgagttgaggtttgaaaaatgaaaatggtatttttaaatttaatattaagtggacttatttttaaaattttaaaatacataaatttaaggtattaatttctcccattaatatgcataagaattaaatttcttattttaaattggttttccttctcccgtattttgtcatgtaaatgaatcatttttaggtactcatttggatttttcctgtgatggcaggtgctccattctcaaacttaagttatatgttacttgttctttggttttccttcgatatttttgtgggaactttaggattcaaagtatctgaattctgtcattttaggtgatcaaaagtgatagcggtgctactggaggtttggcaattcattaatcttaatttgggcatgcataattttttgctgtgaacgtcttcatcatcttattctattgtgttttgggatgctttgccttcatgctgtagttatattatttatgatgtcttctctttctcagtgtggatatgtttcgacatctagctacgagtatatttctcaccaaaaaacatctttccgattcgacatctttccgattcgacgtctttccttatgatgtcaagctacggtatatttctcaccaaaattgatacttttttaatttgatgtgtaaaactttgctgattgtcaatttgcaccatgagccaaaatagtatctttcttgaaacgacttttcatttgtgcaattttttgccttggggtgttcaataaatttttagggtccagcttttctcaagattattttcatcattagtgtttttctcttgtctactcccagcagtgtgcatttgataagtttcatcatcgacttatatgaggtcatagtacggtttaatttcactgacttgaacttgccaattgttgatttgcacccttaggtgagatttcagattttgtaaccgttccttctcttgaagtgtcaatattttggctggtatcttttatatattgtgctggttgctaatagtttactctcaacaacagagagttttgtggttctctatgattattgcagaatgcagatgatgtcaactcttttgtatatatttttgaatctttaattttttttttcaataacctatgaattttgggcttggaactgctttacccatttctaaggaagcttttatgaattaatccactgttctggtacttgtttggttggatctctagatgctatgtcagatgtttctcggtattaggtcaaatatttcattcttggttgatatcttcagtttttagccataacttctgatcatgcagagcaaggcatcatcgtctgattgaactcattttgtattgagacgatttgtttttatcgttatctagtgttactgcccctcaacttgttatgctcgaccaactgtttcttggtacgaggttagacatttggtttttattatttactgttttcctcaacttgttatgcttttccaactgttgatttacaatggggacgttgcatgtttatctttacatgtggaacgtggatacattggtgctgtagcctttatctataatcctttggaagataaatcttatttctaatcaagctctcttgaaagtatgttaatgtgatgttggactgggtgtatgagtttcgatgtttgatagtatcctattagtttcaggtcggactactttctagggtgccacagtcttcaagctgcatttctctctgagattctatcatcaaatgctcaggggagttatatatttatagaaaaactagtgaattgacattcgtttggtggtgatgttctctttggtcaaactttattttgaggggtggtgatatcattctgtttctgaatggctttgttgaacgtatcggtgacactgtcatgttatttgaccacacttttggggatgcacagttgacgtttgaagttttttgtgattttatgtggattcaattttctatggagcacatttgatgtttgaagttgtttcatgagtttgaaagcttacctaatgtttccataataattttgtatttggattctttttgtacgttaatgtctttgaactctaattgctcttgacatataactaattttgttgtcatgaaaattgttcattccccgaactgtatttttattaagggtctaattgattcgattctacatgttttgccatgttagcgatatagatcttctaagataattgatgatttttgtgttgatgaactggcttttgtttaatgacatattatgctgtgtatattttaggcatatatagattttaagctctcttgatatttttttcgaaaaaaagaaaagaaaagcttttgatataatttgaattctaattatgaaatttctaaaataatcatcaaagtctagccctaaaataataataatcatcaaagcctatccctaaaacaacacgaaaccaagctatgcattactgacactactaaataataataataataaaaaaaggagcattctattaggtaccagtagtgcctagcagtctctcgacatgtcacgttgcgattggttaacgatactccttaaaaactaatcttttaaattatatgggactcggtacttaattggagcaataacgatattgacacataggaaggtgttaggcaccacctgtgctctttagcatttctctaaaaaaaagctatgcaattcaaagatttttcaattttattggaccagaggaagacggttatacgtaacaaaaatgtattagtatctctgttgccaccaagttaattaatatgtaattaatttatcatttaaaaattaagaattctcttgcgaacatataaaatatacattatagtattgatcacatattagtaataataccatttgttcatttttatatttggcaaaatcttatgggtgatgacttctttttatttgtattttaaaggaagtattatgtgctttcaagttgagaaaaattgtggttttctggtggtgatgaaaaatggttctagtgctccaaaaaaccacaatttcaagttgacttcagctgctttttatttgtattttagcatctgcatctgtttgatatataacaaaaactcgacttgcttcaatattcctatcgttaggcactagaaaccgtgaatacttcccttctcaccactttttcctcatacttgtggtttagttttttttatctcttgaattttcttgtatttggacttcaaatatgcacttcttatggagaagcaacacaagcatgatttcagacttaacattggagttcgtacaacatacctattctgggaaaaacacgaattctagttttatattacgtctcattttaaaatggcttctcccaatcaaatagtattttctaggtgaagacgtcttttttttttgtctctttccaggagtaaaatttgttccaacaacatattttgtgaaaaacaggaatgttttgttttatgtttttatgttggtattttctcatcaagcaattgcatcattttcttattcttctatgttaactttttctctggtttccattttgatctgtggaaaccttatatgatttagagttttcttaattcttttgttttaggtccttgaaatttcttggtgtgctggaaagggggtttgacaagtcattaaatcttaatttaggtctttaatttttcttgaatcctttgtctttcccaatttcttttcaggcatatgcaagctaatgtttgtgtttttcttttgttcgttaatgagaatgttggccttttcacgatcattatgcctaacaaactgcatcttcgctattttaatgatcatcttcattctttgtttatgattaagtacgtgttctctttttctttcaggctgttgaggtttctgtcaactcagtcggtctaggtttatgtattattattattcttttatttgtacatgtatgtttatttttttaatgttcatgcatagtttttcattattcaggctcttcggttatactgtttagataatagagtctttttcgagacaagaccagtctcccaaatgcaattagattgcagttttcatttcattaaacttgaaaaattcaaaatacagagtcatgggttatatacccagcttacatttcaagaaatcagcaaaaatgtaaaaattgacaaacaataatcctgggttcgcacccctcaacgagagtccatcttaacaaaatcttgtaacctcctaggcttcacgtgcacacgagtcccacgcgctcgcatacttccttcttctataccttcccgcgccatgctcgaactcgtctcactttttggtggcttttcaaatggaggttctatacccagctggtttctcatctgttcttgcatccactctgtgttcaattgtattgggcctgtgacttgggctagcccaacactgccccctcttaaacactgacctgtcctcaaggttgaccgcaccgtacacttgttcaaactcagccaaattttcccatgttgcatcttctagtgcgctcaaggaccattgcactaacacttatttctgtcctttgtacgtgcgagatgacagtattgcttggggcaacattattggtctgttgttaatgcatagctccggcagtgagtaacacacatggggcttggggccatagaatggttttaggacagatacatggaaagttgggtgaattctgctatgttcaggcagtgcaagggtgtacgccactaggccgacttgagctgtaatgggaaaggggccaaaatagcgtttggagagcttaggatgcagatgcttggccactgttgcttgtctataaggctgaagcttcaccaaaaccagatcaccaatttggaattgaatatccttacgttttttgtttgcttgttgtgtcatcctgtgtcgggcacgaatcagatttgttttcagctgcctaaggatgtcatctcgcgtaagatcttcctccaaggcgtgaatgcgtgtagtgcctcttgtataggtcggaatgtttggtggtgggcggccataaactgcctcgaatggagtcatgccaattgcggaatgccgactggtattatagtggtactctgcccaagggagaaatttgctccattgcttcgggttgtccgctgtaaatgcccgcaaatattgttccaaataacaattagtgacctcggtttgaccatccgtttgtggatgataggagaagctcattttcagtttagtgcccatcaactcaaaattttttttccaaaataactcgtaaaaattgggtcacgattagacacaatggatcgaggcatgccatgtagcttgataaccatggtagcaaataactcagccaccttcgttgttgtatattgattaaggaggccgccaaagtgagcgtatttcgtaaagcgatccacaaccaccaaaatatttgagacacctgctgacttgggtaattcgacaatgaaatctattgataaatcttcccaaatacgttctggcagctctaatggttgtaataaaccgtaaggtgctgtaggtgaataattaatcatttgacaagtgacacactgctgaacaaatttttgtacatcaacgcgcattccaggccagaaaaaactcgcgcttaggcgcagaaatgtgctgttcggtcccgcatgaccgcccactggagtatcatgaaatcccctaatgagttgctgtttaaaatgtgaattagggcttacatgtaactgctgattgtaatataacaagccatctcgaactgaaaacggtgtatctcttaaacctcctgcagcccactgctcatgtaatttacgaagttctagacaagtggtgttttcgtgacgtaattcctccaaaaaatcaaatgtagcggctgattgagatgctgccaaaaccaagataaactcatcatcttttcgtgataatgcatccgctgcggagtttgttttgctcgttttgtattcaatgatgaaatggaacccgagtaacttgcgaagaaactgctactgctccggagtttgaataacctgagttagcaattctttcaagcttttgtggtctgtgcgtatcacaaactggcggccaagtaagtattgtctccattttgtgacggcttctaccactgctcgtagctctcgtaggtaagccgatgttcccataaacttgggtctcagttttttgctgaaaagcgcaattggatgtccccttgcattaagactacacctatgcccacattagaagcgtctgtttcaatcacaaactactgtgaaaaatcaggaagagccagcactggagtctcaatcatggttgttttcagtttgctaaatgcttcaattgctgctgtagtccatgaaaaattgtctttcttcaggagttctgttaaaggagctgcaattgatgcgtagtgagccacaaatcgtcgatagtaccttgtcaaatcgaggaacacacgaagttgtttgagtgtttttggttgtggccagtcgaccatggcttctgttttggctggatttgccttgactccgtcaactgatactaagtgtcccaagtattcaataatgggttggaagaatgtgcacttgctggcttttgcaaaaaatttgtgttcccgcaagagtgtaaaaaccagccgcaaatgtgagatgtgttcttccctgaatttactatacaccaaaatatcgttaaaaaaacaataacacaatggcgtagtaaaggatggaatacccggttcatggttgcttggaatgtagatggcgcattagtgaggccgaatggcatgactagaaactcgtaatgcccctcatgagttcgaaacgctgttttgtgcacatccctcaggtccatacggatttgatgataacccgcacgtagatctagctttgaaaagatagtagcgccacccaattcatccagtaactcatttattgtgggaattggaaaacgatctttgatcgtaatgttgttgagtgctcgatagtcgacacaaaagcgctaagaaccgtccttctttttgaccagcaacaccggagacgagtaggggctagtactcgttctaatgaaacagcattcctccatttcccgaacaaatacttcgataatatctttctgaaagtaagggtaacgatatggtctcacattcacgggtgaagactataagaaaatccggtagtcagagttgcgataaggaggcaactgttttggttctgcaaaaacattcgtaaattccgtcagtaactcgcgaccttatgggagtgtggtttcgattttttggatgtcgttgtctattttaccatgctcagtaggtagcgctgctagaacaattacatctcgaacctctccttcgcgtaacaaggtatgtaatttagacaacgagagttgttaagtcactggcgtagtcgactcggctagtttcacccttgtaccattccattcgaattccattgtaagagccttgtggtcatgcaaacaagggcctaaggtttgcaaccattgcatccccagcactacatcgagcccccaaattggcaacacaaagagatcaactataaacttgtgtccatgtaaactcaattcaacacccaaacaaacttgagaacaccacaaggagttaccatttcccatgtataccttaaacttctttgtttcagagcattgtaaacccagtcgatttgctagagcttcttgaataaaattgttgttactccttgtatcaataagaacttctagcgattcggagccatgttgagctattatccgaaaactgcgagggtttgtattggataaagcattcaaactgacctcgtccgttatagtctcagcacaatctgaattcccttcagctatcatctcactatctacttcgtcttctttttgagcacaaagaactaaccgatttttgcatttgtggcccgtactgaacttctcgttacatgtaaaacagaggccattctcccttttttctttgagttctgctggagattatctcttgactggtaaactaggtcttggagtcttggtcgagagagttggagtggtcactgttgctcccgaattggttggagatgttggagaagttgtcggagagctgggttgagagattctcggaaaacaattatgacggtacccttccccgcgggcatggcttaggatgtcatcgtgtcgatcttcatacagttgagcttgcgccattgcgtctgctagatcaattggttttgataacaacagttctcgtcgaatttcggtcttcagaccccatacaaagtaaatgaggaagtactgatcaggaactccagaaattctagtcatgagctgttcaaattcctcttgaaatgccgaaacacgttccgtctgtaccaactttgcaattttgcccaacggatcttcataaatggaagtcccgaaccgcaaccgcagtgctgtcaaaaaggattcccagtcggaaaatcctcctcccttttccatccattgataccaagtggatggtgccccctcgagatggaaggcgaccatcgacaacctcattgctggcgtaacatcgtggaggttaaaaaatttattcatcttgtagatccagtcctctactcccactccttcaaatatggctaccttaacccgcataattttcagaatcgaattcacctcgcgtgaatcggtgtgagaattcgaatggtgcggtgctactgattcagctcgctgactggaattgccaatttccccttgagacttggttgcaaacgactgtaattgatccacccgagtatctaaatgagtgacctattcttccaatttcgcagagaatttggtgaattgttgttcagaatgcttctagaaatttgcttccaaggcctagatcattgctgccaattcctcgttcttcatgctgaaaaacaatgaaagcaccagtgttagataatagagtctttttcgagacaagaccagtctcccaaatgtaatcagattacagttttcatttcattaaacttgaaaaactcaaaatacagagtcatgggttatatacccagcttacattccaagaaatcagcaaaaatgtaaaaattggcaaacaacaatactgggttcgcacccctcaacgagattccatcttaacaaactcttgtaaccacttaggcttcacgtgcacacgagtcccacgcgctcgcatacttccctcttctataccttcccgcgccatgctcgaactcggctcactttctggtggcttttcgaatggaggttctacacctagctagtttctcatttgttcttgcatccactctgtgttcaattgtattgggcctgtgacttgggctagcccaacatatactctttcatggtgcagttgtgtcagaggatgtctttttgtgcattgtgttgtgtctgtctaagcagcttcaaccttgtatcgtggtctctaatcttatatgtaccggacatagtgttttctagatttgttagaaggtgtcatagctttgttccagattggtttttatgtattgtctccaaggcacggtttctgatctactaacttaaattcattaggtcaaattttcagtatgttttgcccaactcttttcatcttgcttaatttgtgacttatctgaagacttccatatgtttatagacattaggttcaacttatggccattgggccttttttactggatggcttgttactctgcttctactgttttatgaatgtcttcagtaaccttaattcttttatgttgtttatattgatttttcaggttgttttttctgtcaagctattcaaaattgtagcttttcatctttttgggtttgacatatcacctctatgatttaccttttcttttggtcatagttgtacttgtattgttccatttctttctgttcaaaattttaggattttggtacctcactgattgagctaatgggctcatcacaaggcttgtgataacaaaaggaagtcgtaagtatattttctgtttcatgtagctgtattgtggaggggtgtaaaatattttcgtttgtttcacatgtaattgtcctcgatttgttataggcattttttatatgtttgattcttagcataagtattttgtttgatattttcaggctttcaacctttttgggcatcaatcttctttagtcgaatatatatacttgtatattttaacaagtgcttcaccttggaggggagttaacttgtcatagtatattttcttgatcgacttttcatctttcactacgtgcgatttgttcatgtctttgcttggggtgtttaacgatttttcatggtattatgaaaagtggattgacgatcaaaatcataaatatctttcttttttttactacatttggaacattaaaattatatgaaataaacaattggatcgtgacaagtcattactaccagcttgctgttgaggtaacttttttcaagaatattttactgtgggttagatatgttccataatcatagttcctacaaccaacctattttgtgaaatataagatgctagatttatttaattctcattgtctaattgactctctatccccctataggatggtattttcagcttatggagatagctgccatggtttcacatagtcaacattttttttttttttgacgtggtgaacaaagtcacacatgataaacaatgcagcacaccacaatcggcggtggagcctctcgaaccaggatagctcattgt

SEQ ID NO: 14241 - DNA, 4833 bp, Cannabis sativa
taggcataacacaaaaaactttatttaacatgaataagaattttctgaaaagcatgagcaatttttcacattttttgacaccaaaaaatatcatttttcatcttccacagataataaattaagactgtcaaagcagcaaaagaaacttgttttttgaaataacacattcatttggctttatgattccaacaaataaaatcatataacctatgagcattagcattccatccaagccacattttcaatttggtaaggcaatttgcacacagtcaaaaaaaaaaaaaaattgatagctacaatattcttccaatacctgcaactatcgagtaacatagctcaaccaatcattattataataatggagatatatactatagatttatctaactcataaattatctttctttgcagcgattgtccaaatatattttcccatatccgccacattccaattcaaaacattctgaaatttcagactactacccaaagatttggaagtacatattgagtccaagctagtatttgccctgacccaataacgtacacatttctaaagaagggatctacaaattgattccacttctttcaaaatttttttggcaaaatcaaaatctgagtccaataagagtgtattgccatcagactgaattgataagagttaccctactcgcaaagaataaattgtgagtgctccatttgctaaactatttttttcactatacattgacattccaatgcagtaatcctgttagaacaaattggaatccccaaatacttaaatggcaaactaaatacttatggaaaagcaaaaaatatccaccactcgtaatttcaccattttcattaacatacattatagagatatagtctccatgggaatacttattactcaattcatcttccttagttcgttctcaattattccttttgtcatattattagtttttaaaaatttaaaataatttctgtttcaaagtgttctatgagacatatacgtgttttggtttttgaaagatctatgatataatagttattaattaaataaattgaaaccaattatacaaaatatcatatattcaatttcatgctaaagaataaagcgtagtttccaaaatatgtagatataattcaattcttaaaattaaaaaatgaagataaatttggaatagatgctgctaataattaattgacttttatttatttataattaatcatatatatacacaacaaccatgtacaacaactttgatgttcgattatatattactaatatataattaatttctatatattttctcttaaactttgatattccaagtgaaatcctctcttttcgaaacaaacgaaagaattagggccacgaggagtcacaagcaaaatttgacagattgactcatcatcaaatagtagtatagagagtagtaagtactggagctttgattccaaatgtagaaatattaagatcttttcactattattataatatgtatacttgttattataagaaaataaaataatacaaatatacatatatacataataatgaatgtttaattaacgcgtttatatgagttaatatctatctctctccgctaatatatcacagtacaatttatttgagacaacttggaaattaaaaaacacacatgattggatccccacttgcgctttttgtacataatattagctttatatatattgttctttttttttcaaagacaaagacatacttgcttcttcataaagctagtttttgtggttgtgcttgatgctcacatacatatatttatagacatatatatacgctaaaccttctgagaatagcttaaaaaaaggcttcttaaatacaaattaagagagagaaaaaagtgagtgtgttgtagtgtgcttaaatatatggcattagaaacagagctttttcaacaagacccttttggctatattatgagcagtggtctcaataaggattttcacgccgccatgataggtggtggtagtagtagtggtggtggtagtggtagtggtggtggaccttggaactatggatacttttttcaagaaaacgacattaatatccacccaaatgacctaacaaacgacaacaggtttgtggggcatggtttcaacaataatcttctcatggatttggaatattgtataacttcaccctcttccatggaactccacaacaacaacaacaacaacaacaatcattactcaaccaataaattttcctccacagactcagccgccgattatttcaccggaaactatactagtagtacgaccactcttgatggagggaggccacctagcagccacgtgttttctccggccgccgaaacaactcaagcaaccaccaccgtccggcgaaaacgacgccgtattagaagcgtgaagaataaggaagaggttgaaaatcagcggatgacacacattgcagtggagcgcaaccggagaaaacagatgaacgattacctcgccgttctccgatccatgatgccttcttcttacgtccaaagagtattattcttcttcttcttctcattataatatatttaacatttttttaaaaaaaattgtttttgttatttaattaattaggttttaaccaatctgatgaccctaatcttaattttaattaggttaatgaactccactttaagcatacttagggtttaattttggatctgtataaattaatcgatctcaggatgaaattaattaaaataatgtagggagaccaagcatcgattgtgggaggagccataaatttcgtgaaagagcttgagcaacttctccaattcttagaagcccaaaaacgaagtagtacatcatcaacaacaacaacaaagaaagaatcatcaccatcagattcatcagattccgatcattcctctaataataattccgatctcttctctgatttttttatcttccctcaatactcaacgtgttcatcatcctccaataataataataataataataaggtgaatattaatgatcatcatcaaacaaaatcaacggcagagaaacgatcggccgtggctgacgtggaagtaacaatggtggagagtcatgccaatataaaagtgcttcagaaaagtcaccataatcagcttttgaagatggtagtaggcttgcagcttttgcgtcttgtggttcttcacctcaatgtcacaacagttgataatatggttctttactcattcagcgtcaaggtatttaatttaattaattaataagtcctcaattaattattcagttattaattagtttgatgatttttattaattattacagcttgaagatgattctcagctaagcacagtgaatgagattgcagcttctgtgtttgagatggtgggtagaatccaagaggaaaactgtttattaagttagagagtatatatatatgaggctaaaggcaccttattagtaccaatcaccaaatatttgtgataatatcatgtgacttcggcaatatatataatattttgtctttgttacatgagatattaactgtgggataggattacttttattttatttttctcttgcaaaccttattaggattatatatttgtctgggaatttattatttttttttcgcttttcttgaccggtcatatacttcattaccaaaaattattgtgaagaaacaattgatcatcgtcatcgacggagtccctacaaaagtccatacttaatttatagcttatttaattatatatatatttatatcctgtgctaattattaggatgaataaacacacacagtcagatatatataaatatatatatatatatattgaatttttggattatatcttgttatccaggtacatgaaatagctgagtagtgatatttgcatacaaaatatatgcaacactatataattacatctaattaattacgtcaaaaaaaagttacatctaattaattaaggtaagacccaccgttgaaacaaaaaaaaaaaaacattatcacatgcattatagcaatagtactgctggtgcatacgcgcgcgcgttagcttaaaataagaagaaaaaaaaaaggatttttgcgattataatgcgtttatatatgtttgtaccgcattaacaacctgcaaattataacaagtgtaagcaaagagagttcttgagattgagcacagtagaaagttagaaacacaactttttaatcactctaatgaatatgtccttctatcctctctgaaagccaagtacaggtacttttttattccatagagaggaaacaatgttacttctattctctgatatatatatgtttattttgatggactatttgatatttatttgcataagagcaagaattattgtaaaagtttatactaatatacaatattagaataagcaattcaaatgaagtccagaattcatgaacgtgttaggaagtgaaaaataaatcatgataaattaatatatggataagcctccctaacaagcactacgagaatttaatatataatatatattaaaaagaaaaaagaagaagaaaaaaactttcactgtatttagtgggtcagatttcggagcgtttttattttccttttctttgtgattaataagatagataaattccccccaaagtgcaccaactcatgtagcgtgctttatatggctgtttggctactaagattcaacttactaccaaacacattcatctagatcaaatttgtcttatgtgtagccaggggcctgagactatttttcatttgttggtgcaatgctcttttgcaaggtcttgttcgcatctttcggttataaattggagtcacacgcctatggagtctttttggg

SEQ ID NO: 14242 - DNA, 11811 bp, Cannabis sativa
  modified_base (32)..(66): a, c, t, g, unknown or other
gtttatttcatcgttttataaagttcatattnnnnnnnnnnnnnnnnnnnnnnnnnnnnnnnnnnnagatcctggtaaaataaattccaagaccaagcccttcaacaaatagatcgagaaaaaaattcttcataagagatttactccctaaagaatatttcttgacaacaaagatgttgcaacaagcatgttcaaacaaaattgaaaaggtcctcaccatgttacaagataacaataaaggtgcatataagtttggtgagtacaacgagaactttgagttggtactactatccaaacactaactaggggacatctcagtaagtactcccactagccaacttgttaattagttcctctaatgtttcaccgtgcaaggacccataaaagagcgtgcacccattgattttcagcatggcctccatcacttcagtgatagttgttgcgtggatagccgcgcagggatagccactacatgatttgaaaagcgaacactaagttgtaagcttttgttacacgtaagaccaactgtatctaaaccacttgctaacaaagataacttcttaaagtaattctttgccagttccacatgcatacaccaggcaacaccccaagaaaattcccaaataaggtctatcaaacttggtgaattgtaagggaccaagaaaatgtaagtttgcgtgttcacctacggagcacctacaccatacaatgctttgaactaggccgtaaaacttatgcagagaaattttagcacttagaataagctactaaacttgcctctaagtcgagtgcaggcatactttggcttcacataaagacaagtaaatccaaatacttatatgtcaaggaaataagaagatagataggatgaccatatgtcaatgataaaaggctttaaggctaaataatagtagtgtcgtaaaacaaagggcctatagacaaaaagcaagaacatgaaagccttaaggctggatataaataaaaaatttgttcacattgataaggtaaaggccttccaagaaccgtatagctagaaaagagccagatagacttcttatagggaccatgtactgggttacggctaaggaaaatatcctgatgggttctaagccatagacaaaactctaggcaatcgtacccaagggtacttgcaagaccatgtcagcgtacaggttgaatatcagcgaagtacaagtctcaagtgtaacaactttgacaaatgttaagtcctaagttgaacatttgactataatagaaacaccattaggtttcatacaaagtttctaagggagccacgtatgagactaaggttgtaaatgcctacagggacataacaagaatcttgttgaagtcaaaagaggacagaaagctagccacccacttgaaaccaaggctgggtagggttccccaagccttgaaaggggcgcctagggtcccatgacttagccaagaattcgccagggtcaccaaacccaggcatgaaccagctagctttatagggtgaaaccttagagctggccaactcccatgattaagtcctagggccaactaggtctcaagcaagacctcccaggttggctaagatttgttttgaatccaaatgtgtgtttttgtttcaaaactcgaatatgtgcctcgtatttttcatggctcaaagagccaagaatcacaacaaagccaaaattgaaccttttccatcaaaaagtcacacattatacattccaaaactgtcatgaggatcaatataccaaagagattacaaactaacatgagaatcaaaaggtttctaaaagcttaaaaagcttgaaacttgttaatagcaggcacaaagaagagatatctaagaagagaagatgagacatatatagagagagaagatcaaagatccaaaagcatgccattcaaaaagccaagacttagctagacaaggttgttggacggagactactctaaacaagacgagagctagaaagccactatctgaccagatgtttgaacaaagacttagggggaaaataatatcccaaaattttccacctaacatggcatgcccacgtaagccaagacagagtagatgtggaatatagccttgccaatagcaagatagggtctccatacaaggtatggcaaaattattaagcaacaatcgaaaggggtgaagcgagcaattaaggaattgtaccaacatgtttggccaaccaagcaaagcccataggccggccatggggagcttgtatggccggccaggatcaaggcacaagttggatggccaaaaggtccctttcacatcaagagagctttcattcgaccaagtgaacctatcctctacaaggaaaaggtggacgaagctagcctccacttgccaaaggcaggtctcctcttggtaaatctaacaggaacatgacctgcaggatccttgcaggcacatgagcttccaggtcctgataggagcatggccgaccagacctcaatttgtagaacttgcatggctaggcagaccgtatcctgtagtgtatggccagctaggattgacctggcatgattctttgtatagaatgatacgtggactataagctacatatgcattgggcccttaacagtccaacaaactagatggaaagtatccactttcaaggggcaatttagtcttttgtatttaatcaatttaatatgttaatatcttacggttttagttgtaaattagggtttaggctttcctatataaaggtcttaactctaacctagaaaacctaagtcccatttaagcctctaagtcattagctcttaactctaagtttgaaaccctagccttcttctctctctctctgctacacgccccaaagggccgtctctcttcctctctctcacatgcctctaaggctatacctatctctcattagagatctgcctacttgatccatgttttgtaaccttacagagagctatatcagatcccacctacagtgatctaaatagtattatcaatagctattaatacaactaaaaagggattagtttattacccgctaactaagggggccgagcctttataaaaatccttaccttatttactttattgttcttattgtgtaacacgtggcaaacactatattaatatgaccctgttgttaattgaccattttttgatggcaacagtgggggataaggtgctcagaagagtgttccttaacacttaagacagtgcagccggtgtgctcaggcctcattaggaagggccataccatgtaactgaagttacaaaattaagagcagaaaatcttggttgttatgatgagaacatgaagctagttctagtaccactgtattggaatggcaaacacctaagaaaatacagccaataaataaaaaaggtttggggaccatataattgcataatgcttaaacataactcttaaatgatggccttccgagcggatctcgttcaagggttcgaaaaatgactcttgctaaggtccaagtgaccacttataaagcagaagctcatcttaaaccattactcttcagtaatgtttttggatagggtatactattaagaaatcttttctattttaattagctaaagatcagaacagatcatgtaataactttttataatttaataaatgcatgttacttcattaacaatacatactgatcaattaatgaataaagattaatcatcatacaaattgtgtcaattttatatttttatttgcaaattacagcaactcataaaactacctaacttgcatgcaaaaaggtccgcccagacccaaaagttgaacaaacaaataagaagcgtattaaattgtaagtgatcaagagtcaatagtctatttggtcacttgacacccacacaagcattggtagagaacaaaaaaacatatagagaaattcaagaaagatattgaaaagccaaaagtttttatattaaagacaaagaagcagaatgagtccaggcttaaaaggctacccgaccagctgcttgtcctaagaaaatataaataaaaataaaccaagtttaaaagccacttggtcagccacgtggtcttaaataaaaggcccgtaaactgatagaaaaaaggagtttttaagttcactccatgggagtcccaggctcttcatgctaagcggccaaagtttgtaaattctggacgacagaagaaggatcaaaattcctgtccttcttattagcagcctaacagatttattcgtctcatccttggccctcctcatctcgcaatacatgaacatgtcttctgatgtatattattcaagataagcaaaggtaggcttagaattagcgttctagaattcataaaacacctctgcagcagtagttttatgatactcaacatctttagtgtgagctgcctactcagcagctaaagcttcctcaagagaagttttctccttcaataaggattcctctttttgcttaagggcctcagtcgactctgtaacctttacctcttggctttgaagaagtatttagagtccttccctttcatcagtgaattcctacactctcatggattcttactcctgatctactcaagcttgggaatggatgacatatcttctaattgttactttaataatttataaacttgttctcaacaattagttccttgttcacctcgctaattttattcccttttgctcgacatcacttttggcctcttctaaggccttcctcagatcattggtggtcattttatttttgagagctgttgacctagctcaggaatagacataagctagcttcagattagactacaaaaaggaacaatgaaataagttaaacattttagacaatataatccgtgcaaaaaatttgaagtataagacttatcctggtaatttctttcaagactccaccgaccaagagttccactaggatatccttagcaccaaagagttgttcgtttacctcgtccattagacggtctaggtaaaaacagagcatttccttagcttttttggttttaggtcgcacgacaggaagagtgacagttggcttatgtaggttgtgccattcaacattagtaatatcatcccaatcgagcccttaaaagatttggaactctttggtgggatgacaggcaggaaaaccttagcaggctttttgaccagaggaggaggatctgagatatctacgaccactactccttttgtctcagaagtcgacactaccaaagcttcttcagtattaggatgggtattctttgagcttggaacaatgcttactaaaggactatctcctaacctttgctacttaataggtgacttctggccaaaactatcactgaccttcctcttcagcatgcctttcaacctgtttgacatatatggacataagaaaatacttggtaaatatttaaacaagtgaaaatagaaacaaagctagataaaataattactacgctgaacttcagtacgagcaccctctcaaacaagtaaagatggagcatcatcatccaaagagtctccatcatcttgcacctcgaccactgcctttcctttgccaataactgcctagacgacaggatgagcagctgcctcaatgtcatctctaatttgaataggttgttgtactggtacctgacttcgctttattgggttcttcttcttcttctttggaatctctcactcaagagtaagatccttagctactttatcattttcttgtacctctttggacaaaaaaatgtccttacttgaagaggttttcagtgatagtcaagagagagatgatctaagcagatgctaaaagttgaagaattgtctgtgctcttgcacttaaccccaaagtgaaagggggaggacaataagatggagccaactgaaatgaaagattgtatacttttatctcctttacaatatagtagtcttagaggaagctggcaatgtttgagacgtctttgtgcatcgtaccgctcagccattgatatttgttttgagaaaaatagaagtaacttaacctattctattgtgggtttggctttaaatcaaagaaccaattggtgttgtgggaagaaggttggctccatcctttttgggcgtatatcatgaatagtgcagccacgtacttgatgcactttgggatgaattaggttgggaaaatcttataataatttgtgatcttcctaaagtatggatgcaaaggtatgcccgttactcagtgtgagattcgaaccacgcacagagtccctcttagaggtttgtagcacttacccaggagttggtagaaaatctttgactttgccaagaaggcctttgtcatagaggttctttaatctcttgtacgtaaggtttgatggaggagagacctattgaggaacctttctctccctagtccacataggatgggcctcttcatactcatttttggcatagtcttggtctagaaacaggacatctacaaactcagatttaggctctctagcctcattatatcctctgaacaaaagaaaaacccaaggagcttcttcctcttcttttgatacctcatcttcattgctaagaggattgtctgcatggatctagccctagtcctcaacctctcagacgtaaacatccctgacatttatttcaatatcatccctaggaggttaagcttattccacaccagccatcacaaagagccgagaatagtctgggtccttatctgaagctttcctataggtttgcattgttatttccattattttacaccttagtagaaggattggctcagaagtatgcctcacgacagtgacaacaatttttcctagtatagagtgttttgccaaaggctcgggacaaccttctggcaatgtgtcagggacgtcaatccaaaccttgtacatccaagtaacgggctggtaacacctctagcctttgttcaattcccaaatgaaccatttgtatccttctctgcttatcgggatagggtaatgatgatgttgtatcacgggctcgggggattctgacaagtcacttgtaacctccaactgatcaaagcttgaagtggatgatttttaactcaatgaagatgagtctgcacagagcctaggctaggtctcgtaaagaagatgaagaaggtcactatcaatcaaatggttacctcccaagtattcacgaaggttcatctacaaaaagaaggaagagaaagtggtacgaaatggatacaagtacacattttttaatggggaaaaacacgtctaatatgccgacttggccaatttaaaagggaagaaatttcattccaataatgaaattcccaaatctaggtttaatgaatgacgaagaacctagaaaatctctagaagccctcgatggataatttcaagtagttcctagcaatacagtgaagaaagctagaaatttgaaagcctatatgtcttgggtgtgtattaacaaaacatcaaaagcccgaaaatttctagtcttgaatcatcgatgaaaaattttaagaatcaagattttgcagagcagttcaaaataatggtacatgtatttaaaaaaattgcatgaaaagaagaaagaggacttactcacaacttggaattgtgtgaatgtgcttgaacgaatgctagagatcgagctttggtaagagagttctttgaaggttttagagagaaaatagagattacaagaattgtgtttgagagtaaaaacaccttaagagagtttagagatgttttgacccattctataagcagttaaaaaggttattacgtaattcaaagttaaaattttgggttttccccaaagaaaatgtaatcatcatatatattgggaagtacgttcgatagcgtgtagcatacaataaccgttagtgcaccaattgaggtccaaatatgaagacaacattaaatgccctagatacaaaagagatagtcaaatcattattcagtaacatcagatcaggagcggtacaaagactaaatgtatcacccatccgaccaactttgtggccgaataagtgcacgtgcgagcaagaagttctcatgcaaacttagggtaaaaatattatcccaatttccgtacaatgtgacatgacatccatctgggtgacacgcgcagaggattttgtaacctggaccagcagttcgcttcatggtctaccgtcaagagtgatttatgacttataaacaacttgtttaaagaagaagctagaatatgtctaactaacatccattttttagtcaactcacttgtgccaaccagagtgaatgcaaccaaaatatattcaaggatactttccttgcatattcaagcatgcaatcacaatcacatccttattttgtgagatagactcacaccaataggagaaaagaggaaacctacttagtttccctttttatttctcttgatttaagaaagtaaataagtttcctaatttatttctttttttttttttgggaaaccaaactaatgtaattattccctataaatagtggagtcattttactattcagggaccaaaaaatcattcattccataaagaacttaagctattaaaattattgtaagagctttcgaggaagatcatgaatttcttggttctcttctcacaagtcaatacaagaaaaaggagaataggctattaccacaatcacaggattgaacctctataacaagttcagtgttctactttcttaatcattataattattttttttctaatctctttaatttactcattgtcgttggccaaaagtgaggtcaacaaggagaacgatgaaatactagtcatggaagaaagaaaactaaaaccactacacagagaagaaccgatcatcttatttagtgaagaagacatcgaccatgtcatctatccacacaatgatccctagtcattgaagtacaaattgcaaatatgatagtttcctaaacagtgattgacaatagagcttcttaaaacattctctttgaaactatttggttttgtccagtcattagtaacttgactatttttagataatagtagatagaaacaacactcataaggagtcctattgaaaccaataaataattattgaaaaacttttaatattgaatatgactagagtgctgattataggttgatattatacatgttgaatgcggcttaaagacttatggtaattaggtgcatgggcacctaattacaattcagctatatgtttatgttttatgcttttcttatcgagtctctcgattcacaaatatgtttttcatgtgtaggttaaggcaaggtaaaggttgaacaacagtgagtctgaagctcaataaagattgtacatatatagatagttagacctatagggttcaaatctttgggataatatgggttcaattttttagtcacttggcaacacttttctgttatgctgtcttttgtaggtttataaaaaaaatagattcgggatcctatgacttgtaagcttttaatatttaatatgtttatttagctaactttataattttataaactaaattatataaacatgattttacacaaaatctttggatagcaaaggttagcacaaagaaaaatacagtaatgtgctaagctagtagggcattactattgcggtccatccactcttaaaattttcacatttactggtcaaatgattggttcaccattgcacgagtttcctcctgtttgtggtagatggtgttggtgtggttttggacttcaccaaaacttgtttgagaatttctatctaagagttgtgtctacggtcgatgtgagcttctcctttagatggctggcagttcttgctccagtctttacctaagctagtagggcattacagtgcagtccatccactcttaaaatttgcgcctttgttggtcgaatgctttgttaactgttacatgagttttctcctatttgtggtggagggtgttggtaatgttttggagtttccccaaaacttctctgagattttctatctcagagttgtctcctaggtgaacgcgaggttctcctttaaatagttggctagttccaactccaatctctccagtgtattgcctatttcctatgctagtattgttatactgtggtggtccctccactctttaaatttgcttcattgctggccgaacccttggttcaccattgcacgaatttcctcctatttgtggtggagggtgttagtgtgattttgaacttggccgaaaacttctcggagattttctatctcaaagatgtctcccatgtggtggtgaagttctccttgaaatggttggcctgttctagctccagtctctccagtgtatcgcttgctggctaagctagttgggtgttactcttgtggtccatccactctttaaagtcgtagcttttccagttgaacgattggttcactattgcaagagtttcctgataatgtttgttgcagagggtgttagtgtgattttaaacttgccccaaaacttctttgagattcttttatcttggagttgtgtcccaagtcgacatgaggttctcctcgggatggctggacagttcctgctccagtctctctagtgtatcacctgctagtgttttttgattcttgtaccctaagagtgactctagggatctcagtagcgacgcctattgtactcttgactccactaaaaattaggtctccagctctggttcctacagatgtgttatttttaggtggaagacgagcattggtgttatcggttcagacttcagtaggtgtcttgacgtatcgatcagtggccatagggtaacgtggctaagtggatgcaaccctagccttcttgtttgaaccatttttattggttgaagatggatcaaaaatcgacaaaacaagaatattgtgtaaagagaaatgaagtattaagctcttataatgaaagcacaaaaatattggcctcatttctggccaacgggcagagtcaataaaactacaattaaagtatttggatgataataacaatgaagaacaataaatgacacagaggtttatagagattcggctctagatttagtaatatcctaattcccatttcgttgtatttatctgagaaataccaagatcacaagaacattgtcaagtgtgtttcttgatatatcttctataaggattaaaaataggactttggcaccacaatgactctattgagaagattaaaaaattttccctaaataatgaagttgtgccactaattatagggatcaaggtgtgtaaaatttacatttaattacagaaataagtaattaaagatttgattgaatcaaccccatgatatgcttaattttcctgattcttgaaatcccactctttgaggtatcctaattgaccttttatttagggattgtacagttaaaatgaatctagacattatctgcatgaggtaggttgttggttggatatttatccggtatgcatccctttattgactaccatgtgtcaccttgttctgtaccacgtcatcgaggtaatttttgggataaaaattatcaaatacaaaagagaggtaagttgagattctaattttataatatcttggtgagtattattattatagggcatcaaggactgtagaatattaattctattactaaggaaataaattatagacttaatacaagaaaattatcacttattctagttaataatatgattaatacatctattttgttttaaaggaaagaatccaaatcaatcaatatatataaataaaggaaagcacaaaaaatctttggtggcatcttatcttcttttttaactattttcactattttctaaagctttcacattttgttaaaggaaacacaacataagttacatattattaatactattattatta

SEQ ID NO: 14243 - DNA, 11759 bp, Cannabis sativa
cacccctcaaactcttaaagcatcctttgagcatctgtaggcatgatctgtgaaagaattataggaaaattattaaaatcagcagcaatacataactatcactacaattttaaatgaaaatttatactttattagttccggaaacaaactaatcatacactcgtataaataatattgaaagacgtatatgtaagagtaggacaaagaccatgtttattctctgtatagagagaaagcatacccctgcaaaatttcaacatgtagacagagcaaataacaaatattttcacctttacatcgtcaatcatcgacctcagctttaatttctctctgtagatcttccttgtattccttaaacgtgcctggaaagttccgtacagtaccatcttcgaccacccaaatttcactcttctcttcgtcctcgcacacacgtgatatcagcctagaatcatgactgaccagcacaactccaccagtaaattcatcaagtgcgtcagctagagcatcaatactctgcatatccaagtgatttgtgggttcatccaacagcaaaatgtggggttttgacatggatattgatgtgaagacaacacgggatttctgtcctccagagagagatctacagcagtgaaagttccactctacattatcttgcaacagagagagatctacagcagtgagagaagttaaacataatataacagtactataaaatctcacctgaaaaatcagtaaattaatacagaacagagggttctaaaataaaaaagcatatatgccccctactttgatgcttctattttgatgtatatgtctggtttagcagatgaaaaagttcttatataccttaaaagtgaactacacttaacgctatcaccaaataatacttaaagataatacttcatgatatgcctgcaaagttaagaaacaaaactaattagtgcggcaaaatttatttattgcttgaatagtaaatatatacctctaacatattctacttgcttcacaaaagttcctctaattttgaaatttgctcctttaaggattcactttcattgattaactttttcctctgcaaagaattacatttaagtataaagtccttgcaaacaatgactaagagatttgaagcagttctaggtgttgaaactgaaaaacttgtcacgagaatggttcctgttgtccttccaaaactcattgtgtctcagcaggatgatgatcaagcagttgatgtgttaaatgagttggctaagtgtttgaacactgatatggcaactttgatagttcattggctacataaagtgctagcttttgcttttcatcgtgcagatggccaagagttgctatctgttttgcaattttaccaagcccagactggttccgacaagcaagaactttttgcagctgcattaccggggcttttagatgaacttgtatgttttttagatggaactgatgcagatgaaataagcagaaggtatagctgtatacttcatatatatatacatatatataattagactaaaaaagaagcaaaaagagcccacaagttgattatcaacttggttttgttgctgtagagatacatttcagctgtctgctatttatgttttggtttgtcattgccttgacatctttttgcttattatttttgcattgtgagtcattggactttttcacaagccatagctaactagtggctattgagtttaatgatatgattgtatattgctttgtgtttaccccgtctctacttatgccaagcattactttttcctatctgaatccaggttagcaagagtacctgagattataaaagaaattgctagggttctaattggcggtgaagatcttccaagctttttgaggcaccattttgttgggctccttaagagtattgatataaagatgctccactcaaacgattattcactgcagaaacaagccttacaacgtattaagatgctgattaagatgatgggttctcaaattggtacctatgtgccaaaactgatggttcttcttatgcatgctattaatacagaaccactgcagagtgagggtctcaacttgttacattttttcatcaagcaattggctgaactgtcaccatctagcacaaaatatgtagtttctcaagtctttgctgctctgattcccttcacagagagagacaatgaaaatccaacaaaacatctagagaaagtcggaaaaatattagaagaccttgtgttgaacaacaaagttattttaaagcaatatctttgtgagttccccatattgcctaattttccagctctatcagaagtcaataaagttctacaagaagcccgtgggtcaatgactttgaatgatcaattgcgagatgttgttgatggtctgaatcatgagaacgtaaatgtgaaatatatggtagtttgtgagttgagaaagttattaaatctgagaagagaagaggttacaggtttaataactgctgaaggtggcagaaacatggatactttgagctctttgatcacatctttattgagaggctgtgcagaagaatcacatacagcagttggacaacgtctgaagttggtctgtgctgattgtctcggagcattgggtgcagttgacccagcaaaggtgaagggtttttcatgccaacgttttaaaattgaatgttctgatgatgaccttatatatgagttgattcacaagcatctcgctagagcttttagagctgcacctaacactagtattcaagactcagctgcattagcaatgcaagagctgctaaagattgctggttgtgaggcaccgatggatgagaatgttgttgcttctaggactgaatcactgaaggagaaatctttagagcatgctggagcaggaacaaaaaatattattgatggtagcattcaggttaagaggggtcaaaaattgtgggacaggttttctaattatgtgaaagaaataatagccccttgtctaacctctagatttcaacttcctaattttgccgattctgcactggttggcccaatttatcaaccatctttgtcatttagaaaatggatattcttttggataaaaaagttgatggcacatgcaacaggttctcgcgcaaggatttttaatgcatgtcgaggtatagtgcgtcatgacatgcagacagcggtatacctactgccatatatagttcttaatgttgtttgccatggaactgaggaggcacgacattgtgtaacagaagaaatcctatgtgttcttgatgctgtagtatcagaaaacagtggagttactattcatggagcgaatggtaggcaaactgaagtttgtgtacaagcagtgtttactcttcttgataatcttgggcaatgggtggatgacgttaaacaagatctggccctttccccatctgcacgaccatcctcttcaaagcaacaagcattaaagccaaaagatcaatctcaaacttcaatgatggatcatgaccaacttataacacaatgtaaacatgtatcagaacttttgtcagtaatcccaaaagtaacacttgccagggcttccttaagatgtcaggcctatgcaaggtccttaatgtactttgaatcttatgtaagggggaagtcaggttctttcaaccctgcagctgagagaagtggaatttttgaggatgaagatgtttcttacctaatggaattatacagttgtctagatgaggttgatggtctatctgggttggcatctttacgtaaatctttgatgctacaagaccaaattctaataaacaaaaaggcaggaaactgggcagaggtcttaacttattgtgaacaagctttgcagatggagcctacttctgtacaaagacattctgatgttctgaattgtttactcaatgtgtgccaccttcaagccatggttactcatgttgatggtttaaactcaagaattcctcagtacaagaaaacatggtgcatgcaaggtgtgcaagcagcatggagacttggcaggtgggacttgatggatgaattccttaagggagctaatgaagacagtttaacttgtagcagctctgagagcaatgcgttatttgagttggatgttgccaagattttccaggcaatgataaagaaggaccagttttcagttgctgaaaagattgcacaatctaagctagcattaattgcttctctggcagctgcaggaatggattcctacacacgggcatacccatttgttgtgaaacttcactttcttcgagagttggaggacttccaaactattcttgctaatgaatccttcttggagaagtcatttcaagtaggtgacatgagcttctctaagatgatggagaactgggaaaatcgccttcgatttacacagccgtcactatggacaagggagcctcttttagcttttcgaagaatggttttcggtaccagtggtcttggtgctcaagtaggtaattgttggcttcaatatgcaaagctttgtcgcacagctggtcattatgaaacggccaatcgagccatccttgaagcccaagcttcaggtgctcctaatgtacacatggagaaggctaagcttttgtggaataccaggagatctgatggtgccatagctgagttgcaacaatcactcctgaatatgtctgtggaagttgtaggatctgcagcaatatcatccattagtagtctgtccgtggttccactaaactctgcacctttagtttgtgatactcaatgttcgagtgagagtcgtgatattgcaaaaactcttctcctatatgctagatggattcattacactgggcagaaacagaaagaagaagtaattattttttactctagggtaaaggaattacagcccaagtgggagaaaggattcttctacatggccaagtattgtgatgaagtgcttgctgatgccaggaagcgtcaggaagaaaattctgatttaggtcatgggaagataccatcaagtactgctggttcatcgaattcagctaatgaaaagcgctggtggtcttatgtgcctgatgtgcttttattctatgccaaggggcttcacagggggcataagaatctctttcaggcacttccaaggttgttaaccctatggtttgattttggaagtttttaccaaagaaccaattcatcttctaataaggatatcaaaagcgttcacggaaaggtaattgttattgttaattttttgtattttaaagtggaaattttaccaaaacggggctttatatgttcctttcttcttatgatgacaggtaatgagtataatgagaggttgtttaaaggatttgccaacgtatcagtggttaactgtactgcctcaattggtttctagaatttgtcatcagaatgaggaagttgttcgattggtgaaacacataatcacctcagttcttcgacagtacccacaacaagcactgtgggttatggcagcagtttcaaagtccactgttccttctaggaaggaggcagctgcagaaatcatacaatctgcacggaaaggatttagccagggtaatagtggcaacaatttgtttattcagttcgctagcatggtagatcacttgattaagttgtgctttcatgctggtcaacctaaatcaaggacaattaacatctcaattgagtttagttctctgaagaggatgatgccactaggaattattatgccaattcaacaatctcttacagttaatcttccgacttgtgatgggaatctgagtgattcacttacctctgatatcttttctgtgactgatcttccaacaatagcagggatagcagatgaggctgagattctttcatctcttcaacgacctaagaaagtatgttattttatgaaatgcggttatttgttattattccgaaaatccttccaagttcttttgttcacggttctcataattcacgttttacactagtcagtaccataacgtgataagaaccaagccttgagtctagagaaaccagcactaaaactggaaatagcaccaaaccagcacacacaaacagcaattgcaatagaacagtagaagaatgaaagaagaggtgagctgttattgtaatgaaaatggaaactgagtcacaattctccacaagtatttgagagcctgggactctcaaagatgctaagaaatagtcagttcttgtataacctctcacacagctcaacacgctctttatgagcagctcaccttacacaagaaaattactaaaacacctctccactcactcccacaacaagctagcagaacatacccaacttacccctgtacattctgcctattcccccttctagcataagtaaatcacaccaaaggtctatcatgcctatcgtaacagaactgtgaaacaatctggatactgatcatttttgtgaacttgatgcttgtcctattgatggagaatttaagtctaatacagttactatgtcgggagtaaacaatgaaactaaatatttgttatttttaattactttatttagtattatttaattgggatatgggaaaagctatactatttgaatgtttttagtgaacttttaattttggttgattagattatattgttgattgctttctaagttttcctaattgtgctcatttgtttttcaatatttttatgcaacttggtcaaagaaatcaaatcctttctctaaaatttatacacttcacttcctaaattcctctttctcctctctttcttatcttggtgctacaatgtttttttttcttttttcttttcacacatttatttatctatcatatttcagattattctactgggcagtgacggcatggaacgcccattcctctgcaaaccaaaagatgatctccggaaggacgcccgcatgatggagttcactgcaatgataaatcgtttgttgtcaaaatacccagaaagccgtcgaaggaagctctacattcgcacctttgctgtgatacctttgacagaggattgtggcatggtagagtgggtgcctcatactcgtggacttaggcatatactgcaagacatttatattacctgtgggaaatttgacaagctaaagacaaatcctcagattaaacggatatatgatcagtgccatggtaaaatgcctgaagatgagatgctgaaaaataaaattcttccgatgttccctccagtttttcataaatggtttttgacaactttttctgagccagctgcttggtttagagcaaggattgcttatgcacacactactgctgtgtggtcaatggttgggcacattgtgggacttggtgataggcatggtgaaaacattctttttgattctactaccggtgactgtgttcatgttgatttcagttgtttatttgacaagggcttgcagttggagaagccagagctggttccattcaggctaactcaggtgagaaatactcatttcatgagtgcaatttgaactttttaatgactggttcatggatagaatactgcaaggaaaattccatttctggattacaaaattgtcaaaaagttgtttgacttaagccttggcaggattttccagacttgattttcctctccttatgaggacttcattctttatatgtatcattatacgtttgttataatcttaattctagataaataaccatcacccatgttgagctttttgttatggctcagagttctcatcatcttggaatgtattttgatggactcttttatcaaatttcagaacatgattgatggcttgggaatcactggttatgaaggaatcttcttgagagtgtgtgaaatcacactttcagttctcaggatgcatagggaaactttgatgagtgtgcttgaaaccttcattcatgatcctcttgtggagtggacaaaatctcacaagtccagtggggtggaagttcaaaatccacacgcacaggtttgcatctgagatccccttcattcactttaatgcaatttcttcaaagtaaaaattatatatggtttatacatcattatgttgatacatttttccatagcaccacaacaaagttgatatatttcctggattatagtgacagtaaggttggtaatctgtcggtattgtttggtaattgggtttttacaaagaaaacttttgtgagtaaaaataactcggaaagtagaggaaaacatcttccgaacaaattatgtagaagattttattgcatcttttctatttctctaatatgtttataggagttgtaagtgctataaaattacattaaaattgaactcactattctcgtagaaaaagatatcttttttgtttgaacccaaacaaaagaacaattatttgaaatttgttttatttccttaaattcctaagcatagggataaattattatcctatcagtgcaataaaatatcatggagacatgtgaagaagaaactcctttctacttccgttacttgaaagataatctcaatattaatcaaatgacaaggctagccgagtcaatgactcattgtgcctagcctttgccttcatttactccattctgaaataaatgctaatactttcgtcatttgttgattgctgcagcgtgccatcagtaacattgaagcaaggttgcgaggagttgtggttggagttggtgcagctccatcattgcctcttgctgttgaaggccaggctcgtcggttgattactgaagcaatctcacacaaaaatcttggcaagatgtatatatggtggatgccatggttttgaaactgtgtaaggggactggggacacatcccatgttattgaggcttctacaagtatctccagctattactatggattttctggtttgagcttgcctttttcactgaaaatcaaggtttgcggtagtttatccccaaactaagtatattaataggtttttcaagtaataataatttgcttagtttgggcattaaaataaactaaattaatgggttttgcaaagaaaagtatgttggggagaacatctaataatgaagaagaataaattaggtgacagtcaacataattggtgtcatagatttccttcaacaataaaaagacatgtatattctggttcttttgggtgtaccactaccaggtaattacatgagatgaactgtttttaatagaactcattattaatcattttaattttgtaggtggaaccgtgaaagattgtataaaatattacaataaggtgacagtcttccagatatctcaagttaggagagaataaccaaaaggtttgaacacttgattcttttctttgatattggtcacccaagttcaggctcttatgacaagacatttgttgcaggattccctactttctggatcaacacaaccaatctttcacacttttccctttggcaattaaacaaccggcattctttctatcaattctcatgggactcttcatccgaaccatcatctctttgatcatggttttcactggagaaacacctcttacattgctatgctttcctgatccacagacaactacaacctcagctggtacaacaggtttgccatcattgtttaaactgaatctgcttcgcatctcctctatccactgtaacattatgaagtaagctgagcccagatgcattccatgcaaatccaatttcacctccatagaatcccacaccatggcctcctccaaaacctgtgacccctctaactccttaaccagcagagcctcgtcacctttcaaagtcccatgtagctcatccatggagagtgggatattatttctcaggtcttgtagcattgctgaaatagtcgggcatgcattcaagacagtattatatgtcctgattgagaaaggaatagtagaagttttcattttctgaagccatgagaccatctggggaagatcattatgggctccatacgaagaaagaaccatgttcgaacatattgtgtcaatcaccaacccttcatcctccatttggtgcacaattctgagcatgtcactcaacaatcctattcgtccataggcatacatgagagacctaaactcgaaaatagaaggtttaagaccattgcctctcatctcctccattaagctctccccttcactgggtcgatccatcgtgcataaaccactaaccattgactcaaaggctcggcgcttgacataaacagaggaagagctacaaagaagttgatacagttgagtgtagcaactgtcaaagccatgtgtggagctttgcttagagtgtgactcgaccaagttgcagtagaacatagcaagttctcggtgtcgatccaatttcgaaacagcctccgaaatcagtgcttctgattcgttgtatcggccatgtttatcaagcaatgcagccagtgctgctactagctttgggttaaactcgaaccaagatgcttctttgatccttgaatacagctgcattcaaatgaactcgattatatattatttagaatataattctgaagccggactaagagacaaaaaaaaaatatgaagtacgtactaggagggagtgagaggtgaggtgggggtgagtggtatccggagaaaggagatgagagagagcgttcagagatatggatttaggtgaggctgccacgaattttccgatcaacttgtgggcggcggaggaatccccagctttgactgagagagtggagaggaagcggtggccttgtttcgtcagtgcgcattgaataaacgatggttgcgacgacagtggttgatgttggtgataagcaaaagcgaatggggctgggatgaggggagagcttacatgaaaacatactgtcatttgtgtttggttttctcagtctcagctgaggttcgtcactgcagattgattggcttctcgaccctgccactgccagtctctaccgatatatttgtcgattgttacttttttaatgggcctcttgcatttctattagctgggctcatcaaaagctaaggcccaagccaactacccttgtgcaatgcataccaacttctcctcttcctttcctatctactctacggtttgaacttttacgtttcattgtgaagattttagattacatattctgtttgttgtttggtgtttaaagttgcaaaatctaatagtttattgagaaattatagtaaaatggctaaaaaatatactaaataaatttgtagggaaatgatctttacactttttacataaaattgtcatggttctcatctttttaataatatttaatttatatttttagaagcatatcaattaaatatcataatatatttatatttgttttattaaaattatttttatatttttattaaagttatgttttaatttttttataaattattatggattgttagtatatatattttctattgacttgtaggaattagaatcggaataaacattttttctattgatgtgtttacattattttaaaatccgaatagattattttaaattacaaaaatattctttatcaaagttttgtttaactttttcttttttagttttccttaattaaaagagagtaaaaatgatatttgtgagtggcaatcccaccaacctatttctcaattcaggaattagtgtgagagtgagactacatatttaatagaaaagtaaacaaacaatgagatattattatcattctctaatcgtagaagtaaacacacccaacatccttaaaaataaatcctaatattaaaaaaagaacattttgagaaacattaattaatacattttacaatattgaagcatttgaagtaaatatgaatattcatatctaggtgagt

SEQ ID NO: 14244 - DNA, 11456 bp, Cannabis sativa
ccccccgccacggccgccggagatttggatatcgtcggtgccggaggggaacatggaacttcctactaaattacctttatacccctgggttttcccttcactctctatagtctttatccccaaaacctaaggtcttcttcttcttctccaatgaaacccaaactcaactgctttgctttagagactttttttttttctttttagagagagaaagagaaagagggagagagagagagactagtctatatatatctctatatttgcttcacttcatataatgttttttgtatttgattaaatgcccctaagttattctcaaattcaatattggaccccagttttattaaatatttggttaatgtggatttttgtcacttgaactttgatatataccaaataataccctttgaatttttcaggtcattaaaatttttcctcaaactattaagattgttagattaaaggacttttgtccaattttactaaagaaaatttgacatgaatgaaaatttaggtcgcacaatttggtacatattaaagtttaatgagtatgatttcgtaaatatcaaagtttgggagaacactttagtatatggacaatcgacatagtagtaaaattaaataaaattaaacaaaagttcttaaatctaacaatcttaatagttcagggaaaatttttaacgacttgaaaagtttaaggatatgattttgtacatgtcaaaacttatggagtaaaaatttaaattagcctaaatattttgcaaaagaaaaattttatttgaaccctaaaaatttctaaaaatacctaattttaataatttttattttatgtaaaatttatatttttaattaaactaaattttttaaatttttttctttcaattcatattcttaaaaaatataactattataataaaaatataaaaataatttaaataaaaattaattatattttaaatattataataaaaaattaaaataaaaagttatataaaatttttcttaaaaaaatataaaaaatgtatatacatgattaagaaaaaaaatataaaaataaaatcaaaataattattaaaattaacgagaaaaaaattttaaaaatatattaagagtaatttttaaaaattatttaagttaatttattttttaataatattttatggggtaaaaataaaactccctctttcaaaaaacatccttctcacttttattggacaaaaataccctcattttgtttatttcgcacaattcagaaataatataagggcagaattgtattttttgaatttaggggataagtattgtatttctttattattattattattattattattattatatatatataaggtgcggaatatgtggattcatttcctttttaaaataaggttctaatttctaaatatattcttttcaaaaaaaaaaaaaattctaaatatattattttgtttttttatttaataaaataagtataccaatttaaatttgactagcataatgactttctcaaatgacactttcttctccttcaaaaacaattacattatccatgggtgggtattactacccatataaaaaaaaggaaaattccataaaaaaaattaacaaatgttgaaatttagcttaattaaatatcaattgagtttttaatgttttattaattttgtatcatcttatctaaattttatccttctttggagattttgattcattccttttctcgagggttgttgaatgaggacataatagtcttttcacataaaagtgaaaagtattggagaagaatagattttcatttgagagagtttattcaacaaaagatcctttgttcggttttattccatgtggaagaatctagggtaacccccctagtccctccaccaatttggggagtctcattttattgttttttaattatttaatatatataatcaattatttcatttactttaaaacgacatcgttttggggatttctcaattcatttgaggataataacaataataagttcattatatggattgaagaaaatcttaggggtaatgaattagagttggtaagtgcaccaacttatattataagaaaagcttatctttgcttaattaatgttcatacattttttataatataataatattaatttccatacccccaaaaaaaattaataaatattatataatataggaggaaataaataacattatcactataatacaaactctataaaattagcaatggtacactaatttttatttttattttttatataagaaaaaaaatattataggacatttctttcatctaatcttgggatatgaaaggagggtcaaacatagtcaaaatgaattgatttagacaagttattaatatgattaattaataatattaaaaaaacttgaataaagaaaaaatctatagttggtgtgacactccaacaaaatttcgtttgcctatactaattagaatattgttaacatttggacaaattatattggtgcttttcttctttgtttaaataaatattatatattatattacttattaatttaatttgttaactaacaactaaactttggttatgagatgagagaaaaggaaagaggagaaaaggacatgcaccacaagtgaattaaggtcaacaaagtgaggctcatagttttggacatggtaaaaaagaaagaaaaagtgagtaaaagaatatttcaaagtgagaagaatagcactccttttttcattgcatgccttagataataataatatgtataattaagaattattattattattattagatttttttattaaacacatgagatgcagagtccaatactatcatgaagtgatatcaaatccgactccagcacaaatgaatcaagcttgtatttagaattcttacttaataatatttaaatttccacaaatgttaatttattttttacattaaaaaataatcatatttttttttttaaaaaaaaactattattttatgtacaaaaattaaaaaaataatttatttatattaggtctcatctattttagtgcagcttgagtcacaccttatattgattaatatatttttttattatatttattatattaaaacatataaaatttgatattaaattacactaatattatttaagtagtgttaaaagcctgttattcttcttgttataattttttaagtagtaaaaaagaaaggctcttccttacaattgcattggttttttatttaaagtacaaatacattggttaattcattgaatttttattctttcccttttctttttcattaaaaaacgttaaagtaagtcaaaggataacatgccattatttatcaaaaaaaaaaaaaggaacatggcattgagtttagggtaacactagctacccttcaaaaaattgttgtaataataataatatatttaggtgattggggttcagattttattctagaatgaattttgttaggattggattgattgaatttgaaggatatttaattaattaaaaaaatacatcaaatttgaaacttaataatacatacaaattgaactacaaaaacaatgtattttatatctaaagatgacaaaatacaaatgcctagctagtaatatgattatcctctttgtttatttatttatttctttttagtgtgtttctcctgtattttgaggattgtttttgctgtatgtggtttgctttcactttttaattttctttgtttagtttgattaaactatagtttgctgcaaaaaatgaagaaaaaaaaataatttgtggtatgaatatttaagtttaatttttagttgcaaataaataattaagttcaatttttcaattgcagataaataagtacctgactcttagatgtcaagttattattcacgttttattttcttattactatatttaaattaatttttaaataaaaaataaaaatttgataacatggactaataaaagattactatgtattcgttgacttgacatttaacgcaacggtcgagtacctacagaagttacaaaaatataacttaaatattattaccgtcaaaaatttaatttaagtatatatctacatgctgaaattaaccttaaatatttatgacacaaattactcataaaaaacaaaaggaaaaggagacactagctagtaaacaaaaaaagtttgttaaaagagaaagagaattgaaaaaaaaattaaattaaattaaaagaggcaattgtctttatcaacaaacaaaatggcttcattatccaattaaaaagaaacataaaatatacaaagaagaagaaggagaagaaatgagagttttaaggaaaataccaaaaaaataattaaaaaaaaaaccccctttaaaagagtgaatttttacactacatttaatcatggaaaaagaaaaagaaaaaaagaaaagcataaagatcagtctcatggcaatatctccctatttgtgttttatttctttgtacacttttttaaatgatgatgatgatgatatagttgtagggccaatatgtgttctatatggcctacatctccaaactatttttcatcaaccggcacaatcatgaaagagattcctaaggcataaatgtgaccccaaagctacctctctctctctctctcatgcctcatttttcatgcttcttcatactaaatatcaccttaacatagcatacaatatttccatattataccatgtatcactacacttcttgttctaaaatgatctatttaaacatcatcatcatccttaataatgttcacaagcatgcaatcaagtgtaatcatcttcctaaaatttctcttttacaaaatacccattttggcattttgtcaaaagcaatttacatgcactttttttttcttttcttgtgatgtaatcaacaaatatataataataataataataataatattgtaattgggtatggttccatggtagttgatccatttggttaagtacccattacttgttttgtgttgtttttctttctaataatgtttatttaagcaaatcaatgaagttttcaatggttttggatccctatgtcttaaaggggtaccttttactaatttcagaaactattttcttgttctcaaccattcttgaagatggagaagaggtccacaagaaatgaaattaataatgttccaaaaagacatcatattcttgggccaagtgttccttgcttaaaagatgtccaaaatgcatttatttagaatcccaattaactaaaattaatcaaaaaccaacagcacaagtggatgaatggccagaaagaaagaaagaaagaaagaacaattttctatgtcatgtgcttaagtgggggtactatttttcccaacttcatttttgaccccaaaataaaagatggccaagtgcttataattggactatgctcatgaattctaatgtgttatctaaagaggtctagagacgactgttcaaacatagcaattattaagtagcaataaagagaccaaatcatatcaagctatgaatcaagcaaaccatgaagttatcttatctcaatgacatcattccctgttccatagcccactctcaaaatcaggcttgtacttcattttatcgacgtgtcaccctataattgattagcagttctcaaatttaaagtgtcccttagcattattcaacataggagtgatcaagcaaaagtgaaaggagataaacaatgggagagagagagagagagagataagattggatatccaaataaaactgaagggtgttactgttattatcaaactatagtttattcaagaccttgaaaattaccagtttgtcatgatgctaaactggtactgtcaagattacagtactcaatcatccccacatagaagctctctgatcaaacaacaaaacagaagatgagcatgggagataatttattcagatagatagatatgctctccctctaccttctacaacttcgaagctgcgttcttgtctagaaaccaagtcagctctccagcaggcgaaactagttcaacaggcagtgtgttagaatcatcactaggtgttccaagtgctttatgcacagcatcagctttaccagcaccagtcacaacaagggcgatataagcagaagaatttatcactggaaatgtgaaagtgattctctctgggggaggtttcggtgagttctttatgaaagtaacccacttttctttctcgttgacaagagggtgtcccgggaaaagggaagctacatgtccatctgggcccatgccaagtaacatgagatcaaacttcgggaatccactggcttcggagaagtctatcacaccgctcttaaccaattgcctcaaacaggtttcgtagtcatcagctgcgccctcagctgacaatgcatcgttgatggcgtaaacattaccaggaggtattggtacctgagaaatagaaatcaaaggagattagctggtttgaatgagataggtggccacacttttaatgcaaaacaaacaactaatttttcggtataggataggaaacaatgtatgagactctcataattgcctagttggattaaatggtgtattaaattttacaactaccaaagaagacatgccatgtaaaccttatatctaagcaaaagatttaaaaataaacatttagctggttcaactaagtaagataaacaatggctacccttttgatgtaaataccaaacaactggttttgagtatgtctttggaggacgacacacgaacaagtatagatcaagatagccatgtatttcaagtcaaataatagttaatgatcgaattccgtgtgacaacttccttgaatcttcaataattccacacttggcatacatgaatcagagagttggtgtcgaattcgtttgaatcgaggcctgattaaagtgacaatacacgaacctgttggcgtaaatggagggttgctaaatctgagcaaggcccgaggacagctgggaacgtgtagtgaccgatttctatagctaaatttctcatatgcgaaaacagtttcaaggcatcttcacttaacccaatttttgataatccggtcagaattgagttccatgaacacgatctttcaacttcatggatccaaatacatttagtggttccaccatggatctgttatttgacttgaggtacatagctatcaaagcattaatagcctgaactgattgttctcaatagctatttacttagtaattatatttaatggccacacacgaacaagtacagaacaaaatgaatcacataagccacatatccaaatagagcaatccaaaatgatatgaataagtaaatctgatatccccagttgaataaaactcaaaatggacctgaggaaagtaactatgcccgaagtaatcattttttaacttcaagtatatttcaaatataagtagatttatacatacatacttatagtctacccttcacaagcaacataattcaagaacaaaaagcagcaatcttgaagaattgcataatcatcatcagccatttgaaaccaaagatttcaacaagtaccttagaaaggaaaccatcataagcaagtttatagttactatcttcatgatccttaggcacaactctctcatccacccaaaagacacgccactttgaccaatccactgaatcaagatacggtggttccagcaatttcctgagaaaaatgataacattttcttaatacttacaatcacaattgtctcccgtagttccaaattcaagcttcaccaagcagaataacattgtttcccaaaactcttgtccacaattcagtcactaaaaaattattacttagtcataaaaccaccaagacattaaactaaatgatttcacatactgatcaaatcaaaaaggttgactgagatttgtcttccaaactttgacttcactaaatcatttcttctgaacttttcctcagatcattcaaaaatttctcttaattattgaaattgttaaatttaagaacttttgtttaattttactaataggtgtttgaagtgaccagaagttttgagtttggtacatgtcaaatgtcaaagctcaaacacgatttaatagatgtcatagtttgaagagaataatttggtaaatggacaatcccatggtaggcgtttgttaatgaaattgagtggaattcaatcaaacaatttcaatagtttgatacatgtcaaaagccctaatatgtattcttcttcttcactactagaaagaccataagaaagtcaaactcaaaaaccccatatgctaaccacattcaattacccttaattcgaaaccaaaatgaaaacttgaaatcaaaatcaaaagaaagtattggttttttttattttattttttatttcagctgaccttagataatcgatgagagatccaccagacaaaacaacagtaaaagcacctctttctttggtaaacttatcagagagatcagcagtgtacttagccaaattcacagccaactcatccttagaatcgaaaacatccaccttcttcttcttcccctcagcagcagccatttcagtcgatgaaaccgctttacaactaagcttcttcttgttgatggaggagaccccttctaatctgagagaaagagaaccagtttttggagaagattttaaaaaggtggcgttgtggagaggaagaaaaggggaatcctgggttgggaatgagattctgggagtgttggagaataagagtgagattgaagaagaagatgctgccattagaggagtaaagtttgggtttttaaggatttgtagttagaagtgggctctggtactggaatttggtggatggtggggtcaagaagaaaacaatacaaacattattatgtcatttttgcaaaaattaaggaaattgtgtgaaaatcacaaaaaactaagaaacaaacagtgagagaaataaaacacccaaaaataaagtcaaaatgatgagcaattttagcttaagtacaaataaaatacacatacatagagaatttaagctttgaaaatttaccagagagagagagagatcggaaaataatggaagaaggagcagtggtccggccgccggcaatggctgaaagacagggaatttaggctttttgtattgatattaccaaagtgaaaggcaaaacgacgtcgtgcaatgtgaaaagaaatcactttctttttttggtaaattaggtcattagattaagaataatgcaaacaagataattttgtaaaacatagaaacctaaagtgtgtaataatattcagcaatttataagcttaagaaacaagtttgttttcttcttgtgatacttgatatttttcgaaatatttgcgatcattgggggcgggttgtggccaaaatttttgggttgcagcatgaccgagttctgccagaaatagtaaaggtggtagctctcaaagaagtgctctctcagttgaagcgtgagttcccaagcatgagtatcgtcgaatctgattgtttggtagtagtgctgatagaattattattgttgattaatataatcataggaataattccctaattacaattattaactatgtgcttaggaattttttttcacaatgaatttatgccatgttggaatggaatgataccaatatagtcttaatcccaaagaagaaaaaacctgagcagataagcgagctgcggcctatatctctttgcaatgttattgctaagatcatcaccaaagttcttgccaacagaatgaagagcttgttaactgagattatttccttaaaccaaagtgcttttattcctggacgcttgattactgataatatcatggtgtcctttgaaattctgcattacttgaaaaggaaacaagttggtaaagaagggtatatggctctcaagttggacctcagcaaggcctatgatagagttgactggcactttctgtgtgctatgatgagacaaatgggattcgcagacaagtgggtgagacttatttttgggtgcttatcctcggtacagtataatattgttacttcgggacatactatagggccaattattccaaccaggggcttgagacaaggggaccctatttctccttatctgttcctggtgtgtgctgaaagcttctcagctatcataagaaggtttgaggaaaaaagatggattcatggaattaaagttgctaacggtgctcctatggtgtctcatatgctgtttgctgacgatagccttctcttttgtaagtccacgaatggggaagtaactcgtgtgcttcaactgctacaactatttgcaatggctactggtcagagagtcaattttgacaagtcctcagtttttttcagcacaaacacctcatcgtcaactagacaagtaatctgtcataggatgggaatccaggaggcggctgagcacagcaagtacttgggcttaccaagtacggtgggaagaaataaaaatgttgtctttggttacctaaaggacaaagttcagaagaggattcatacatgggataacaagtttctgtctagagcgggcaaggaggtgcttattaagtcagtggttcaagctctcccggcttacaccatgaatgtttttctaatacctattgggatttgtaatgacatcgagcggtctataagtcaattttggtggagaacctcttcaaacaaaggtattcattggatgagatatgacaagctctcgactcataaagttaatggtggattgggttttcgtgattttcgggactttaatctagctttacttgccaaacaagggtggcgtcttctaactggaggtaatagcctaatgaaacaaatttttaaagcaagatacttttcttcgggttcttatctcacggctacacttgggtcaaacccaagctacatatggcgaagtgtcttagaagcacaaggactagttcgggcgggtgttcgaaagctagttggtgatggctccacaactagtgtgctcttagatccttggttaattgacgatatgaatccctttgtggagtctagacatcccgcacttgctggtgcttttgtgaagtccctcatgaagattgatgagaacgaatgggatgaagaggtaatcatggatgttttgaccgagagagaccaagaattaatctggaaaattcctccctctaatggtaacagcagtgatacatggtattggacgaaagaagataatggtctattcaccgtcaagagcgcctataagcttcagcaagaaattaatggtgttaacgaaatggcggcaaactctggtttttggaaacaactttggcaattgaaattgcctccgaaagtccttaatttcttatggcgcgtctcaaccaattgtcttcccactcgttttcagcttagagttcgtcatgtacctatcaacaccagctgccccttttgtaatgctgcaccagaaacatctttacatgttctggtgcgctgccggtttgctcaggaatgctggg

SEQ ID NO: 14245 - DNA, 8502 bp, Cannabis sativa
aacacgtaaataatcccgccaaataccgttgaaattctttgggtcagccttgacaaacgagccaatataggctcctgcacttcgcacaactttatccatcatgaacccagaacgaagatcgtgaatctgcacccataaatccagtttatgtatatgtatctcccttgggttctcaccacttttcaatctatgaaagacgagaggaaccttattaaaggtccatgggcttccatcaattacactttgtatatccaactcatgatagaattggaaaagatatagattagtttccaattccttgatatacaccccttttccaggttgccaaagagatgccatcaagtgtctcatcgcatcaaaatcaagcgatcttcccgttaagaacttccctaccagacaccacctgtcatcaaaaaccaattcttccccttcggcctcaccctcaagcaatattccttcttcctctccctcaatgtgaacttctgcgtattggtctgcaagcctactggcatagtgactactggaagccatagtacaccgcaatagacaccaagaaccacaaaaacaaactgctaggacactaaccaatcaccaaaacaaaagaccaaacaaaaacagagaactttcacaacatgtcaaaaagacaagacacataaggaaattagtctaattagatgatcaaaaattattggtaagtttattattttccgttaattagtttcttatattatttatttaattaaattagataaaatttgatattctgttattaagtttattaatgtcaatggatctttaatagcgttaacggtgagtttctccaaactagcgacaatattttgattggcattagttggattaatgttaacaaactaaagtacatatagggaaaagtacgtaattgacttataataatgtgattgaattttcaaatttaaatattctttgtcgacataattatatatttcttttttgctaaatgggaaaattgattgaaacaccaaatcctcaaagtctgttaacaacagcaggtgttaactcccaggaaaacaattaaaattaaaaatgtcttgcccaagaagctatagaatcagctatgccattttcatctttgggaatctagaggaaattataatcaagaacatcaagaccatcaaataaaaacatgaacagggcatccaactcccaatagggccttttacgactttcagttggatgacaaagctcattacaatcagaattaaacacaagatttgtcacaccgagttggaatatgattagattcacggctaaaatccatgcacgagtcgcaacttcaagggctgaaactcatgtcgtgaatacttccgtcttaatcgaagacactctcccatgttcgtcaataataataacaacacctgcagtggaagaacccgagacaaaagaggcaataaagaacactctagtcttaaccaaagtacactctactgttagtagaaattgcctggcataacacaggtctagtactggagttcacctctcgaactctttggtttaattccttagtagagaaagaggtaagactaaattatcatagaatttcttattccttgctcaccaaacacactcacacaatatagcagtaaaaacaataaattgatatttgatctctgtctctacggaggaaaggaaaatagcattgaacatccactcaaccaaatcataatccgaaatgaactgatcaatcgaagtagtacgaataccccatttgcttgaaaaccacaatgaactaaacgacgaactcgagaacatgctaaatttatgatcacttgtaggaaggacagcccgctcgctgccactttccacggagccttaacctctcggggatagggacttgccaaattttttaccacaaagaagagatgatggtgaacctatgattgttcaaagcccaataagcagatttagtgctaagttatacattttttgatctcctccataataataaattgacaaattagcatgaaagtttctaacttgtcagaatatgctccacagcctccggaaggaaccaggaggaaattttatcatatgacaccacgacccagtatcaattaaaagctcacacactttaggagtggactcgatagacattggattgaaggccgctcttgttattatcccaattatcccactgcaacaacaggtcatgcaaaacatccgcattgtgacccaacccatcaagtaacatctctccttttgcaagaaaccttccatttcgaagattccccttgccacaaaagaacaattccaaggaatggagacattccaaaagtttttgttgtgaagatatttgcacttaaaaatcttgcacctaataggcttagagacaaaaaccaaattccatccaagcttagttataaaggttttattaaaatttttgcatcttctaaaaccaagaccaccacacgttttcgacttacaaagcatacccaagcaacaaagagcaaagtaatgatgcttgttctcataaccaacccaccaaaacattctagtaaccttgtcaatctcattacaaatagctttgggcatcagaaaggatgacattgagtagacggggatagtttaaaccacactgtgaattaaggtcgcacgccttgcttgggaaagcagatttgaactccaaccatatgaaaacactagttaactttgtcaagaacatatcaaaagttagcaaccttgctatttgaaagaaaaaaaaggtttctaaggaattttccccttcctaccatcttgccaaaacccaaagtatcaatgatttcctcttgcaattgattatttgtttccttagagaaaaaaagattggtcatatgctcattaatcaattagccagaccacttacaatacaaatctaggagagccttcacttttacagcattgttaacattagcctcgcaaaaagttatcgtatcatctacggacataagtggaaaatagatggactacgtcagttcactttgaatcccatcaactctccactagtcccaaccttggaaagcattctagagagaacttcactaacccatatgaacaaataaggagaaatggggtcgccttggcagaaactacgcttcaattgacatgatttcaatggcccgccattcaagagcatcaaatacgatactaaggatatacattgagcgatgagtttcctgaagtgttcagcaaaaccaaaaccaattcaacacactatcaaaaaataaccattcgatcctatcgtatgcttttcacatatcaagctttatacccgtaaaatgtttccttctctaatctctagacatagtgtcaacaatctcttaggctatgattgtgtttttcacaatccatcggcctggggcaaaggccaatcaatgaggagaaatcaaattagagagagcacccctcagttggtttgccaatatactttagacaccactttgtacacaacattgcaaaggctgattggcctaaaactatcaaatttctaggtattttctttcttaagaataataaccacaaaaaagtggttaactcccttaataaactttcctatacaaaagaaatcatggacaaaattaacctcgtcactaccaacaacctcccagtgatccttgttaaatttatcgggcataccatctagtcttggagcattaaggggagacatactccacactactgatctattctcctgagccaaggggattttaacgagattgacattaactcatccaaaatagatgactgaattagattttccaatcccaaaggcatagggggattagaggaagaaaatatttgagaaaatcgatctgtaaagtattttctaatatcagcacgactacgaatcaaaacttgatcatcttccgagatactccaaaaatgattttgcttccttcagaatctggtagaagtatggaaaaaatgggtattgtgatccctattaggactttattagtactattttatatttttaaagcgtttttcaatagttttagttgtgttttatgcaattttatgcttttacttattaatattttgcaagtttagtattgaagaaaaatggatcaaacatgagaaacaagaaggttaattaaataaagtcttgtcgctaaagtatcatgaaattaatctaagaaagaaatctaacagatctagtgcgattggaccttctaatgctaaggaattgaaaaatatggagtagcgcctcaacatgagaattcaatgtcatggcgctaaaaaacaaaatttggcagcaaggtcatatttgacaagtttataggcgcgcctcaacattgggatccaatgttgaggcattaaaactattaattcttctctgctaaaaattttgcttcaagcgtcgcgacactaccttgtagtgtagcggtgttcctaaaagtcctaaaattcctaagcatgcttaaaagacacgagctatgacactcaataagtaatatcgtggctcgcctgttttaagctgtgaaaattaggggttttaacttctctagagctatttaagtgatctttttcggaactttggaagacgcaattagagagcagaagcaacctacagaagtcttttcaacaacgttttttttcgacgattccttttgttcttctatcttcttatgttcttatttaatttgtgttaatcacttacaatgaacaggagtagctagatttttatttagggtaatggagattatttgacatcttattattgttctaatatgatttaattctttccctaattttctatgtgcatctatttcattcgttcttaatttcttttaattggctagccattaattaattgtttataattttcatacaaaatctgagaagtgagtatagattatgctataattaaataagaaaaactttgacataggatgagagcacctatgtagtttggatagcattaagggtttcattacttaatacctcttatatatttaaatttattacgagagtaaaaaatttataaataagttgagatttatatatcctagtccaaatataggttactccagtaagcacgttattccgtagaaattggtatttcaaaattgttatataaatccatataaaatagataattgaagttaataaccctaaactctaaccattgttaattttcatcctaaattagttgtttttattttcactagattataatattcgtcctttaattttttattaccaaatagaattaggaatttaatttattagtacttaactacaattttgagggaatgatactctacttaacattatattacttgaaatcgattgcgtacacttgcatagaaaaatccataacaagtttttagtgctgttgctggggattattttcgttaatattaatatagttgaattctattctaatttagtttcttttaatttaattttactaatgttttactgaatgagtttgacttgcaaggtaaatccaaatgttatatcaagatcagtactttgtgaattttttccaacaatataatgagtcattctattctgcttgggtggggggagatttaaggtactcggatagagatgttatcccaatttctcaagtggatgttttactctattctattataacagacttgatgatgaaataaaaagttaggtagattatgaagcagaggtaactatagagcctttgttaaggagaagccatgatatgatgaatttgttgactgacatgacagattttaattaccaatggcattgggatccctcccttaaggcttggagtcaccagtaccctccttattgtccaaactcaccccaaccatttgagaaagaggagaatacactatcacttgcagaggaaatttaagggtgtataattcatagtgttctaaggaaaataactcaaataacaaaagttatgagagttttttgaataatgtagaagtaccattagttgaatacacagtggaaatttaacctataattgaagagcaagacccatttgaactggttttaattaaaaatttaggtacattggatgctttctcaacaagtgatgattttgatttggtgactaaagcaacaaccatcctcagtgaagaagttattgaagatcaaatcccagtcaaggttgtggatggtcatgagcaaagtaagaaagatgtgtcattggaggctaaatcacttgtagttgttaatttgagttcgttaactctattatattacgaaccactagtggatccttatttttaattaatgtcaactgcaccatattacatcctctacgagctatcgaaggtttctccccaagcatatcatccaaattctagtgttgttggtgctacttttagaaaaaactcatgtcatgccaagctagagggcatttacaatgacaactttcaagctatcgtgcatgatacttattatgggcatcaaccacttgtcgatgtgaaaaataaatcctgaggtgcctgaccatttttcggccccaccacatggtggcgtccgtaccaaccaccacctcctacactgtcatactaatgtggcactcaggtaagttctctttcctagtccttagtgtcactttggggataatgtgccattcaagtttggggtgaacttaatttttaagtttttttagtgtgtttgtttgtctatgttatgttattttgagtcaaactcttgaatattgaatatgagtcaatgttgaattgagtatgtagcatggtttgagaaaaattttgattaatttttttctcaaaatctctgtgcttagtgagattgcattctcaattagcttcaattttttgcgttaatgaacatataatcataattggtaaatttctaacaattgaagtagtttatgcatgataaatgtggattgtggaaagttagttgagaaattttttacatttgcttgcttactatttgaagtgaaatgatagaagacgcatgattaagaaagtaatttaggtaattttttgaccgagtgcctttcaagccgaccttgtttaaatctcaccttagttaccctttttgagcctaaagatatactttttattgttacacttattttgagcgcaattgaacactttattatttttcatttcctatattagtatcatgagcatataaaaagaaaaaaaaaataaggattgaattatattgggtgttattctttgtagagtggtgttggcaattgaaaagttcaagtaaggattgagaaaagaaaaatatataaaagtgaaagaataaaaaagaaacacaagaatgaaaaaaaaaatgctctagtgtcaatttttctcaatctttggaaataaagaggagcttggggtatgttaaattatatggtatgttaaattagatgttaatatcaagattggttttgaatttatatgcttatggtatatgtgagcttaaatgactactttatctacctgtacttaaaccttctattacaagtctaaaaagacactctgattcttgattatgtaattatttatattagtggagaatagtgagcattgtaagcatatggaataaattctgttagtggattgatggttgtattcgacatgtataaattgtctcaaatgttagttgagtaatgattacggttttatgagccgaaaggaagaaatgaggtgaattaaggatgtgatttagttaaaattctagtttcgagcctattattaaaattttcttaaaaaccatgttacttggcttaattgaaagattgggactcatattttgtttgattgacgtgattcagttatgttgtgtcatgtttagttgtttagttctttagtcgagggtgagtaaaggtcacgtttgggggagtttgttaggactttattagtactatttttaggtacattttatttttaaatagttttagtagtgttttatgtaattttacgcttttggttgttaatattttgcaagtttagtattgaagaaaagtggagcaaacttgaaaaaaaaaatgtgcaagaaggttaattaaataaagtcttgtcccttgagcatcctaaaattaatccaagaaagaaatccaacagattcggtgccattggatcttttattgctaaggaatttaaaaaatatggagtagtgcctcaaaatgagaatttaaatgctgctgacagaaaaccccatcaatttcttcaattgctcagataagaaaagcccaattgagagcaatttgcttcccccagcaaatctgacgttaagcccattttcctactccgacagtcgtcgaatcagcgctctcgtcagagagatcaatagcaacgctagcggtgggagttggggtggcatctggacctccgaaggagtggtgatgaggagaaggtgggtggtggattttgatggtggggagctgagggtcggcatgaaaaaaagaagaaagaagaaagaagaagaagaaggaaaaaagtaaaattaatttttttatattaaaaaaattaaaaaagaaaaaaaatctgatttttaatttttttttttaaa

SEQ ID NO: 14246 - DNA, 4857 bp, Cannabis sativa
cgagattgttaagtcttacagccaagagaaccatttaagtaattctctgtattcgcttcacatgattatcttctcaaggttgcaaaacttaattagaaatttgcgtcgggacctcttgctcgtatacaggtctaagaagagcttaagccaccaaaataatgagacaaggacaagtaagaagcgtacctcttgtcgaaaagaaacaatcacatcatctgaatattcttgcttggagaataccttgatagcaacatcctgccatacaaaacaaattattcaaccaccatttactggcttccatctaatttagagaaaaattcctttttttccaacaaattttattacttgtaacacaggtcaattgagagctgtctaattataatgtgaagttactatctaaactgaacatagacttaaatttcaattgaactaaggaaagagacaaggaacatactgatccgtaccacagaccatgatacacagtcccacatgaacctgcaaagggaaagcaaacataaatcacacatatgaactatactaaagaaatcagaagctgaagatcagtgttggcaattacaattaacattactttcattgaaacagtttcatcaacactaccttgtccaatctgctctccaattgttaagtcttcccacaagatttcatagtccaagcagtcggtgtcaatgtccaccttattcacagtactactactggtacttccacagctgctgacactgcttgtgctgttgacattaaatgaggacgaccaggatcctgaagcctcgttatttgcatgttggcggttaaaatcatttgcatggttttctagttttataataggattcttcgaatgacttgaatcattctcttgatcattttgtaaccaaggccaaacaaaacgtggagtcttaacatccgatgacccctctcgatcatttcctttccatggccacgatagccctttcttacccatccatgcctcagccttcgaagagatcatcttgtggattgcagattttccttcgccctcatcaccagaatctctggagccttttcccggagatctttcatcaagattggaaaatacaccaaatgggagtgcagatatttctcctctaggtgtgcttgctccacttgaattagcatcttcccggtgatcagagttaccagcatctaagtatccatgatcagaatgatagctatctccactcccaccttcacgatccatgttgttctccgatgagcgaatcctagacttgactttgttgctcaccttggatgcctgttttctttggttctaacaattaaacatatgccagactacaataattcacaagaaggaggaaaataattctaacactaaccaaatttgttatctttgaagcaatagcagtctgcaaaggctgctcaggatcgagaccaagtttcgttgtcacagtatttctgggccgaagaccgctttctgatgaatgctttccatcaacctgtgaagccactacttctctaaagggttgtgaatcacttgacacacagataactcctatcaaagcaccatcatcatcatagaatggtgtatttgttacaacagctaaaatcctttccccagccttatttttgagaggaaactgtccagtccagttctcccccacagtgacacgtttgactatattattggctgaagaaaagtcacggggatcaactaaaagctcaatggcatcttggcctaaggcctctgccgcagaaaaaccataaagattttcagcagacctgttcctgaaatagtaccaaaaaaaatccaaatggaccaaattggaaagcaaataaatatccaaaccacgagtaacagatttaccaaattgctttctttagtaaaaaagatacattgcctaactattaaagttcaagaatttatcaaggcactaattgaaacatcataaccacaataaccaaccatagtcaaatctacagtttctttcaacattggaaacaaagttgcaacccaaccaaaatatcaatacaaagaaaataagagaaaagaaatcactaataatcaaacaaaacaaacaattctcaataatcccaaaaactagcacagcccaaatgaacatctcagtatacgtgtgtgtgtgtatatatatacagagagagagagagagagagagattgaattacccaccagtagattattcgaccactaagatcaaaaatatgaacagactgccccatcgactgtaatatattcagatactgcttactagtaaagttaacagctgaagggccaactccttcccctcctccggcggcggaggcagtggtggcatttgaaagatcacgactacgactctccctctgaagaggagaggaatggcggaaggaaggagagccatcaagagcggcagctcttcttcgtggaccaccaaaccttgagcgttgaggggaaatggagtgagacctttggtggggtcggtggtggtgctgatcccgcttagtggaatcttcagaaccagattgcatgagcttagacatctcttctttgagatgggcatggcccgcttcgagttcttggatcttctttaaaagctcctctgctggtggggtttccattagaacaacaacaagaagaagaaacaaccaacaacagcaacaactcgggggatcgcaaatgataaaacatgaagcaaaacaactataaaggctcaatctttaatggggtttctctctttttctcaaatggggttctctcttgtaagacaaagaagaagaagaagttgaagataatgatgaaaaatgaacgaaacccagttgacaattcgcagaaatataataagtcttaagagtaagtatgggttgaaaattgatgagacatagatggatatgagtatgatttacgaatcctctccctccctctctctctctctctcctttcttctctacttggtattaacttctgacttattatatcaactctctctctctctatcttatatcaaaactcccatacaaacaactgtgatttgagaggtcaagatagaagctttcttttctttctctgttcttttttatccttaagagcttctctcactctaatgagatttttctttttgtggttaggtttattctctgctttgttcgggttttggagtttgtttttgtgtgtctgcttccaaatccatcgtcatcatctcaatctaaccattgagaccagaaaattattataaattataggctaactattctacttacccacgcgcctacggtggcgcgtgtaagattatagcctgacattgtatttaacggccgccattgtgtccaataagatggagagtgtagtacacgtagcaatgttgagtggttgttatatcatctcaaactctttactgtcttttccttttctgctaaaaggtccttctattcttcctatttccactcctaattttactccttccagtctttttagtttatatatttttggttcatacaaaacattgtgttttaatttgtttaatttcccaattgctatctatgttgagttgaattttacatgtgtttgtggaaatttgtatataaagtatgtttaatttgaggattagattacttgatttgatatcacacaaaatttcaattggactgacttggggtacatcccatgttattatatgagcaaaaccccttttgcccataactatctcttatggccaaaaagatcatgttttgtaggtttaattaaggttcacatcttaaaaagaaagaagaaaaatgaaaagcaattcttaatcactaattaaagagatgtgcttagtgtaattaaatctatcaaaaaaattactttttttttgagttaaaagaagtaaattagaattatattagttacaatatatatttatgataaaaaattagattaattttagtgtaatagttaagctcaattgtaaatatattagaggtaaaaattcaaatctcactaataatattttttttttacttaccctgctcgttttaaatcatgacctgccactgattagcactataaataaaggaagagtctttgttaatattaactaacttttcctaattttaaataactcataaaatttacctacctctttgagtattgaactaattttatttttcattctttgcatttatattcctttttaccttctcttcactcttgctcatatgctctcttttatctttctactaaccttaattgttttgaattttacaaaaataaagtttggcatttggaaggaataacaacaaactaatctatctctctctttcttaatgtatataaatatatatacaaaattatgttatatatgaaactttggtttctctcactagaactttttgtttgcgtgcacagcatgataaggattaaggggcgtgcaagcacacaaatttgatagtgaaagagacaagagcagaaccaaacacaaatatatttttgttgtcttcccacaaccaagggataatattatcaaaaataatccaaactaagtgatacttccattaaggccattaatgctaaaactttaccataataaattataaaaggcttcttcatactttgatttgaatagcaacaaaatctttctttcatatatgatatatatctatgtatgtaccaaaaccaaaacttagtttattaagatgatatgacctgtcaagttgacctgcaaaactcaatcccctactaagttcattggttcttcttgtcacttatttaagcccacacatgcagataatatcttcttcataaactatgtttttattttttatttcttcctttttcaatttaaatataagaataattaataccatttactccatcatttctaattgagaatg

SEQ ID NO: 14247 - DNA, 16731 bp, Cannabis sativa
  modified_base (1587)..(1587): a, c, t, g, unknown or other
  modified_base (4485)..(4486): a, c, t, g, unknown or other
  modified_base (4681)..(4691): a, c, t, g, unknown or other
  modified_base (5344)..(5386): a, c, t, g, unknown or other
  modified_base (6607)..(6608): a, c, t, g, unknown or other
  modified_base (10699)..(10710): a, c, t, g, unknown or other
tacttggagtttttgtattctggcaaagacaacatatctcgcatatatgatgtttgcaaagccttttatcgtacggagaaacaagatcagtattttatgagttactttacggaatttaaaaaaacatatgaagagcttatagtgttattgtcattttagtcctaatgtgaaggcttaacggcactaacgacaacaaatggctattatgagttttcttgcaaaactctcatatgaatttaactctgcaaagtcacaaattctctctggttctgatgtctcctctttacaagatgtgtttactcgtgttctttgcaaaaaaaaaactaactcttcagctcatcttaatagcgctttggtgagtcgtaacaattttgcaccatgaaaaaattctactccaagtggatacaaaggaagtatttcacaaggacctaataatcgaacaccgaatttcgggagcatcatgtgcaactattgtaagaaactaggccacaccaagtttgagtgtaggaagttacagttcaaaaatcaacaaaaacaatctgctaatattgctagcactagtaattcatatgacaaatcggtccttatttctgctaatgaatttgccaagttctcaaggtatcaggaatcacttaagtctttgtctccttttgtcactgtgatagctaattcaagtaactctaatgcatgcctttttttcacatcctcaaaatgggtcattgattctggtgccacaaatcatatgacaggtaattccagtctcttttccacttttcaatctcatagtcttacttctactgttactttagctgatggatcaccatcttctgtgcttggatctggcactgttggtctcacacatttgttcactttgtcatcagtcttacatttacgtaatttgtcttttaatttgtttcctgttagtcaactcactcgtaatctaaattgtttaatctcattctttcctgatcattgtttgtttcaggatcttacaacgaagaagaatattggtaaaggacatgaatctggcagcctgtatgttcttgatccacttccaccagcctctattgcttgtctgagtgttgctttcgcttttgaggctcattgtcgtttgggccatccatcccttcatctgcttaagaaactctgtccagtatactaatgtatcttcattagattgtgagtcatgtcagtttgcaaaacatcatcgtattagtttgagtcttcgagttaataaacatgctagtgttccttttaagttagttcattttgatgtttggcgttctcctattttgtctcaacctgaattcaggtgttttgtcacttttgtagatgattattctcgtgtaacttggttatatttactgaaaaaatgttctgagttgttttctatattttgtgctttttgtgctaagatttaaaagcagtttaatatgtctgttcgtactttgcgaagtgataatgccaaagagtacacatctgcacaatttcaattttacatgacttctaataacatgcttcatgaaacttcttgtgttaatactgcacctaaaaatggtgtagcggaacgtaaaaacagacatcttnttgaaactgcatgtgccctcttgtttcaaatgaaaattcccaaacctttttaagccgatgcagtttccacagcatgttttcttactaatctcatgtcatcctctatacttgatggttagatcttattaaaaattcattttcctagtaagtcattgtttccagttgctcatcgggtatttggcagtatttattttgctcgcgatgtccgtccacatgtcaccaaattagaccctaaggccttaaagtgagtctctcttagttattctcgtctacagaaagggaatatgtgttattgtcctaatctcaaaaaatatcttgtttctattgatgttacatttgtggaaaatacaccttatttttcattttcacctactcctactcgtcgggggaggatgatgatttgatggaatattctattacatcatctgtgcctgatacatgttctgacgagtctcttgtttcttcacctgcctcggtcataactcccacaatgcttactcctccaccacctccattttctaggcctcctacagtgtacatcatgcgtccacctcccgtttcatgtcctgcatatgcatcttcgtcatcaaatccggaactcaaaaatgatctttccattgcactacgtaaaggtaaacgtcaatgtacttttttttatttctccttttgttttttataatcatctctcctctttttttgcttattgcttctcttgattctatcactattcctaaaactgttcgtgaagcaatgtcttgtcctgattggcttgttgcaatgataacagagatgaatgctttagttgcaaatgatacttgagactggttaatttacctttaggaaaacgagtcatagggtgcaaatgggtgtttacggttaaatttaatcaagatggaataattaatcgcttaaaggcatgtcttgttgccaagggttatgctcaaacctatggagtggactattgtaatactttttctcctgttactaaactcacatctatttaattgttcattaccatggcagatactcatcattggccttagcatcaacttgatatttaaaatatttttcttcatggagatattaaggaagaagtgtatatggagcaacctcctgggtttgttgctcaaggggagttagggcaaatttgtcgtttttgcaaatctttatatggatcgcaacaaagtccttgtacttagtttggtaaatttaatcaaactgttgagaaatttgatctattaaaaagtaagtcagatcattctgtgttcaataaaagatcaattgctgatatcattttgttagtggtgtaagttgatgacatcgttatcattgaaaatgatattgaatgcatctcaccccttaagtctttcattcataccaaatttcacgcgaaagatttaagagtgctcaagtatttcttgggtattgaattactcgaagtaaacaagatattgttttgtcccaaaggaagtatgtacttgatttgtaaactgacacaaaaaaaattaggagcaaaatcttgtaatgctccaatgaatccgactgtacatcttacacgtgatggggaaccatttgaagatcctgagaaatatcgcagattggttggaaagttgaattatctactcgtgactcgcctagatattgcattcccagttagtgtcattggtcagtttatgtcttctccaacaattcatcattgggcagcattagagcaaattctatgttacttgaaaggagcatcaggacaaggtatagtttacgaagatcatggacatacccaaattgagtgtttctctgatgcaaattgggtaggctccaagataaatagacgatccactttaggacattgtgtatttgttgggggcaatctgatctcttgaaagaataagaagcaaaatgttatatctagatccaatgctgaatcagaatatagagctatggctagggatacacacggggctgggaattggcggggagtgctcccccgtccccattcccattaagcattttcatccccacccccgcttatttcccatcagggatagggcaaagaatcccctaatgggagcgaggacgaggcagggaatcccctaataaaaaaataaagtttataataaaaatttaaatatataaaatattaaatttcataaaaattaaaatattacatattaattattatacaataaactaattattatccaaaacacaacttaaaattcataaaaaaaaatactaatatactaaaaaaatacaaacataaattataaaatataaaatattattagaaatataaaataaaatactaaacgggtccccgtcggagcagggagtgtcattcccgtccccgccctgtttaacattcaagaacaaaaaataattctcgtccccgtcccgttccctttttagacggggaatcctcgccctattaagggcggccctgcagggccccatcccaatgaaaatgtgcatccctagctatggcacagtctatgtgtaaggtaatatggatttatcaacttttgactgaattcaagtttaagacttctattctagaaaaattgtggtgtgataatcaagctgctctcatattgcctcaaatctcatgttccacgagcaaactaagcacattgagattgattgtcattttgttcgtgagaaaattcaacaaggtctgatctccacaagatatatgaagaccggagaataattatgagatatttttacaaaagctttaaatggggtgagggttgattatctttgtaattgggcatgattaacatctatgctccaacttgatgggggtgttagaataatagttgcaagaattagggtaaattatatttagtagtttcctatttgtatctagtagtttctcatttaggtggtgtttggttgganntaataaaatggaatgaaatagaaagaaaacaattttcattccattcctttgtttagttacatttaaaaccattggaataattccaatggaatgacctttctatcattttggtggaatgactattccattttaaaataaaaggaaagaccattccaatgcaagatttgaaaattttaataatttttttatcaattnnnnnnnnnnntttaaattttattccatttcattcctaatcctattctcattctcattcctaaccaaacgccaccttaatctccttattttgtatataaatatatgctattctatggaatataacatacaattcaattcaccataatctacagataacaataaataaataaataaataatgacaagtagattctggttaggctactagagccataattggatcccaacctcgcgactttctgaatagagcttatgagctcagacctcattgtttgcccagaaacagatcactcaaattcgtattcaacttctttggaattgtgcggagttggttgttactaggacagattgattgaaagaaatgatagaatagttctagataatggatgttattttgagacagagaagatcaaatgtgaaaatgttgtcacttctcttttgttgacataaaattaagaatgtttggtcattagtgagttttcaataatgcgagaggttgctgaggtcttgttataaacatgtagggttttggaaatgcatttgtttttgttctggtaataaatatgttggtttcatttcttctcaaaataaattttagtcatccagttcaatgctttggtgtcgagtaaaagggtcgtctttagtttattattattattattannnnnnnnnnnnnnnnnnnnnnnnnnnnnnnnnnnnnnnnnnntattattattattttgtttaaaagaggaggtgaagcaatggagtttgggttatatacctagactgcagccagatgtgcttgtatttgttgtacagctcaaacaaaagtccgtctttgcaatagccaatattactcaaaattatcaagagtctttgatgtggatcctgtacacttcctgggagatcagtcaatgacttgtcttctgattcatgagaatgtccatcgtgaaaatgtgaaacgtctttccttgttttattttgtgaaagctcattcccaattcgctccagatgacctaattaatgtaaggaagacaagtaaaaatgctggatacattgaatacttccaagtattacttaggttggaatcttatcaatatcataccagcgaaatccagataacagttcaaaaatgctagtctaacagattcctgaatatcttgaaattgagaaaacatatcttccgattttgcggcttcattcctaagagactgaaccatcctgaaaaataagaaacaataacttaatggctacaaataaatagcacaaaaatagagacaatttcatttcaccaatcaaaactttatccaggcatgctgaatatctgtcaaaagagcacaaaacagaaggataaaatccatatatgtttccatttagtctggtcaaggaaggaaaatcagtttattcttgaacttaaagtcaattttcttcgttccaggttaagggcatgaaaccttcatatttccaagtgatttaactttcagagggttctcccattccttttccaacccaactcccgtgaaattaatatgataaccttctgcttaggatgtgcgttgaacttgcattcccatggtatgaaatgtacagtaggacacccacaaaattcaagtttgtctatctatcaataactccatcaaaggtaacaataatctgataagcctccagtcaagttagtatacgctaggaggccacgagacatttaaagatagggctgttattttctattccagctataattgttttgttttttatctagttggcaattattttatctagctggctattttgtcttagagggttgtgttttattaattctttttagatcttagctggcaattaaattattctgtccaatacatataaatagggggctgattcattgtgtaaagcaggtgggaaatagaagagattagactctaggagagagcagccctctcgaaannttgtaattggagatactagcatctcgaaagttagattattcttttatttcatcattaataaagagattttctttgagggattttataattctttgtaccaatttggatagatactttattctctaagaacatcatatcataatctcaagggacttacaaactgatctgatccatcactgaggccataagagaacggaaagctagaggcagaaaggatattgtgtaaggagatttgttcctctcaataattgatactggaacccatatttcttcttttgaaatttcctcagttgatgcacgcatccatgagcaaagcttcaaaatgtaaatctttgttatctctgatcgaagtgtctgcagagcagtaactgtggcataagaaactcaaacaatttagattactgtctgtaaatgaataacttgcatgcttgcagctacttggtgatagcttatataccagcaactaggggagctgattccttcacttcaaaagcctggcaggctttagtaatttcctttatagcatcactcataaatgaacggagaatatttgactctcccagatcacgaaatgtgctatgtacctgggcagcagcataaatttatcatcaaccacatggatgcaggtaattcagtttgacatagaagaatgcttaactcaaatctgaagcaggtataacaatagccgtaaaatatgtacagggaaagagaactagagaagatgaacagtgaaaacagggacgcaacattgtttttcgtttgaaaaatatagacccaatagaaatatataatgtcaaagcttacatacattactagcataattattttgaaactaccactgtcagaaactagtaaatctcctacccttttttttctttttttttttcaaaataaataaataaaataaaatcagttctatactatattctcttatgcaagaataaaaatgcgtcagatttcataacaataacacatcaagaaatggaaccttatcagtgaaccaatatcttgactgtcttgtctggctacacaaatcttatacataagtatttaagatcaacttaaagttcccttaaatgccaactcaagccaaataaataaatgtgaaaacttacacgtaccttataattttctctaattttgaagtaaacagcgttatatgctggataaaatataataatagaaaacacacattctttcaaagaaaaaaaaaaaaacacacagaaaaaggaaaaggaaaaaaaaaagcaatagtaatatattaacaagataagaaattagatggtcactttgattacttgcacacaaatagtagattggaagtagatttgactataaagatcaaaatggcattaatagattgagttagaaaccaataacgacaaccagagtactttgtttatttaatggacgacagaatgacacagccagcatacttactttcgcctcataagcagatatagtactgcgaatcattccagcaacttcatcgagagaatgcgatgagtactttccatccccaaatttatcctcgattttatttgcagaagtattagcaattgattccaaggaaacctgagacaactgacataatgagataaaaaaaaaaagaacaaaaaaatgaaggaaaaaccaactattaaaaagattcacctacaagttggaaggaacaatataaagacgattgttgaaagatttcattaacatgcccatttaagtgattatatgaatagatttagcacagttcttttttttttagttacattcttttctgtttatgcaaaatactcaatttttaatttagtaatggaaacaaatatagagatttatttctgtcctttgaatgtctacaatttactgcacaaaatttgtaacctaaatttcaattaaatccatcaactgtttctgttcacatggtctgagagacaactaaactctttctctttgatgctatttggccttaattgctaatacccctgttcctctcattattgtccataccattgcccctcaaatttgattacttgtagcctgtctaggaactgtgttgactaaagtatataattaatgtgaaagcttcaatatgaataactcaaaataccttagcaaattttccactgaaaacagaaagtgctattttccagaaggctggtatatgatgaataagtacagcagttaatcttcggatatatctccctctaaatttatcaacttcttcgcatgtcaagtctactggctgatagtccaatggaaggtgattgtccaatgaattgttgaaatctgtctggcaaaggtagaacaaaagaacatgtgatttatttttaatacaaaatgactattaaaacagaacaccacaagtataaattccttgtcaagcagcaatagccatgtcctgaccacaaccactggaaaattatataaactaagtaactcctatacaagtaatataagattatcacaagattatcatgttgatgttagaattattattgtagactaaaataattatagacatagccataaccactggaaaattatataaaactcctatacaagtaatataagattatcacgttaatgttaaaattattattgtagactaataaaatcatagacataattccataaacacaatcattaataacgtgaatatccataatgggatggttaataactactaaatatattagaggaacataagagcacccatataactataattacccattaaattatagtctaccattaactaaaccacattaacccaatcggcccataacccctcagggtttatcaaggtgtgatatatataaagtgcaagagggtttaattaatagtaatgtaggtagtataaggggatagctccacatttgcttctctcttagatttaccactaatcttgtgtttgtgttgttcacattagagattcttagtgtcaaatggctaacatggacaatatttctttaggaggtatgttttctcaatcattaatgctctaaataaatgcttggatcttttttttttttttgataaggaaaaataaatgcttggatcttggattgttttttatgatcattattgttgttattgttcgattgtttgactgttgtgattataatacttatatatgttttgtatttaacaattagtatttagagctaaagttattaattttagagcttaatttctttgaactaaacccatttttcaaatctgattcttttttttttttttgtaattttcgaattaatgtgtttataaaggataatatgagatttatagttttttggatgggtttatctctgttttgggatgattgttattgttaaacactgagttttcttgaagttcatcaacggaggaaaacccattttgggttcataatattttggctattattttgtatttttgagttaaattaaatggatattggaaattgatagaaaattgaaaaatgaacaaaaccccccaaatggtgtcagatttggtggtcggagatggcctatccgaccgggtcccgaagcgggtcgcgccgattcgagttgcaaacctgcggggtgaattttgggtgacagggacgacaaaaacaacatgtcgtctatgctccaaggccagctccttagcaacaccaaacgacatgtcattttcaaacccttgctacgcgtcgttctccccgaacatgtcaattcccaaaaacgacatgtcgtacaaacacaaaaaaaaaatctgagaaaaagattaaggcacgtgggggcgcattcatggctcttttttaggccatttttcaccattttatttcatttttaattttctaccatttctatgtattttctcttatgcacaatattaattttatgaattttattcataattttggtaaactaattttattgtggcataatttcatgtttatttgtgaatttatttcaacaattagtgcttatattttttacttgtcgtaagattaagtatggaaaattgtttggtaatgagaaatatttaaatattaatttatttaaattttgtatctttttcaaaatttgcattattaagatccatacaaataattaattatcctatcgataataatnnnnnnnnnnnnatgcttaatatggtaaagaaaatttattaaatattataaatcacaatttatctatcttcaaaatttgtatatgacgtgttatgaggctacatgtaaagctatatggttgcggaacttcatttcagcattgggtgttaaagactctatctagaggccgttgaaattgtattgtgacaattctgcaacagtagctttctctaagaatgctagaagtacttcccgctccaaacacattgacataaagtactattttgttaaagagaaagttgtcgagtctttcatttccaatgagtacacacctaccactggcatgttggtgaacccactaacgaaaggcttacccatatgtgtatttttagagcatgttgctcgaatgggattgttaggagcctaaattgttgagctcagtgggagttttgttattatgtattaaacatgctagtattttgtatggaatgcttataacttgtgttcttgaacatgcataatgatgttgtagtcacttcttgttgcaactgtcatatttatatgtgtgtgttgtttactgaagtgacgggtacaaaaggaaatgaatgcacatgtctcaatttgttgtaccacatgcatatttggtttgattattaatgattgttattgtattgaaagtcttcaaagccaagtcatatgtaatatgtatcctattgatatgatattgtgtatgatttagttgatagctttatgagttggacaatggtatggtggttgataatagtatccaagtgggagaatgttagaattattattgaggactaatataatcatagacataatttcataaacacaaccattaactatgtgtctaataatgtgaataaccataatgggatggttaatagctactaaatatattagaggcacgtgagaacacccttatgactataattgacccattaaattatagtctaacattaattaaaccataagggttaggagggtgtgatatatataaagtgtaagatggtttaattaatggtaatgtgggtaggagaaggggataacttcacatttgcttctctcttagatttaccactaatcttgtgtttgtgatggtcacattagagactcttaatgtcaaatggctcacatggacaatatccctttaggaggtatgttttctcaataattaatgctctaaataaatgtttggattttggattttttttcatgagcattattgtttattgtttgattgttgtgaatataattctcatatatgttttgtagtttaaaagttaatggctagacttacagattggtttggttcttgttgaatctgcttccattttgcatcagatagggctttctctcgtatctcattgtgcaaattttccattctactttcatgatccaaggtgcacttctctagcaaaccacgaattctttggttctgcaacgaaacatactacaatttaagtaatctaacaatttactgtattgccttaaagaaaactaaaggacacaaaatcatctaatgtatgccgacattgtgttccctggtgaccatgtagctgatgttaatttacaaatttggaatgtataaacagatctactagaaaataaatttaaattcaaattcaaaaggttcatgattaattgtgtgcaccagctaaccaacttcatctacataacctagcaacattgatgaagaattactaaagaaattcaatttagtgcaaagtataaaagttagtttgcaatgcaatttagcaacgtgaaatgataggaaactttgccttgcctgtatatttaagtggtgccaaacaggatctgaatcaggttccagctctatcaacagcctcacagtgttttcgagctacatgaagcaaaaagagagcaggaatagcaaacgaagaaggtaagacagcaacataatggaaacctgggatacatattgcaactgcaaggctaaaaagaaaaggtgttgactatatttttttgaacaaagatttggttattatttgtttatttatttatttttgaatgcgagaattgaaagagtcttccatgcaggactctaaggtcttttgtattgtccaaaacatgccagacagtaacaccccattagagcctcaaaccaagtaaagttgtttaggaaatgcactgaatcctaaaaggaataaaaaataattctcattcatatcactgaactgcagatccaatgtctagcttttatacaaaaaatcctagaataaagggaaaacgtttgtgccgtcatgtttcgataaaacctagtccttacctcccatctgtaaacttcttttaacataaatcaagaaacctagcccaaatctgaagcatatacacaattatacaatttttcttcttgtaaaccaagaaaaacatgtcactacaaaaccattcaggaagctaaatcaaatttaaataataataataaaactaactacataatcataatattctggcccattgtattgttctctcgtatttgaaggatgttcaatgcaacctactatccccagagcagttgattacaagttttataaaaccaaaaagaaagacgagtaaacatttgtcatacttatatgagatgaaactctagtcagcactcagcacataaccccataagggataaaggtaccaattaaattactcttgctcaagtgtcaagaaaagaaaaacaaaaaatcagcaggtgtattataggcttacatttgttaaatctatttgtggatcttccatagacttatacagcatgcctttgaattcatgcatcactttctcaacctcttcaagaacacgtttcagtattcccacctgcataaaataacagtctctctaatttcctctctagaaagttttctggagtttttttattatagtaacaattttcagacagttaactacaaacaaatagaaatatattgtcctacatgagatggcagagcaatggatttcgccttcttgtattccctaactgctaagtcatattctcccttactaatgctcccacgtattgtacttggcagattgaataatgtccggaacctctgcaacattccttgaactgacctgattttctcagcttgagcctacagcagtcattcatgaaatatatgtttataaacaagctgagaagaacttccaaaccaaacaagaaataggtatcacaaacctgcctctcaaacaaaggctgaaaagcacgattagccaaggaactcactccttcaatacaactaaacaaatgtgaagtccctgatccttcagggtcttcttcaatccgtcttagctttgattcaatatctatttcaatggagatattacccacatcattaattaagaaacaacccagaaagtctgcagaaaatctaatgttttttttgtcacatcggaaaattagagaaaattaatcttcctactttcttttttcaatttttccctctcttctcattttctcctattctttcttataaatccaatcgattataacattccaagaaattgtgcaccacaatcaacctccttactgcctacgtcactttgggactaaagctcaatttagtaaaacttgtagaaaagctagaagctacttatttagaaaataaatagtctccaaaatttggcttatgttttttctctccctaaaatttgattatacaagtctctaaaacaataaataataacaattgaggatgaggatgcacaattaaattattggcaccgacaaaattgatttttagttctttttcccacatatatcggctttctaagggaacaaattcatcaatattcttatagccatgaatgtatctaattgactagaaaacccacatatataactctaatttatcttctttcaaatataaaacgctaatttcttacgatttcacaattaggagcagcttctttgaaaccagagtttaaaacaaagtccttgacactagcccatctatgaaaggtcttatcttatgtgatataccaagacttcttaccatcaattgtggttttgcatgagacaaaacaatcaaagttgtctttaaccaactgtttcctttgctgagtacgccccttaagatcactctttaaagccacagcaccaccctctaggtcagctgcactagtatcttgatgtatccgagatagaaacagttttgcatcaaatttctcagaaaaatacaacaacttttctgcagccattaacataaagggagatgttagccacagacaattaaacaaatattcaatttacacgatgcactaacaaatttgtctacaaactttagggctcatatgtctacaatctaatatgtcatggaaactagtatcaaaaagaagtgcttaatgtttcagtatgtctaaaagtatttgagggacaagattgcaagcaattagttcaaaatctgatacataaatgcattaccacgaaggacgtgatctagatgctctctttcatgcttagatggagaactttctgatgtctcagttatcagcctgagtgacttgttgtctattatactacaagaacaatatgagcacaagtaagtacgaaaaaatttttaaagaaaaattagaacaatgaactgaaaacatattaattgtgcttccatagccagctatggagcatgatgtaaaatagtcttatcatgataagaaagaataaaatctggaatttaattatggcttaccccaacccaagtggatcaacacattccatgccacgagggaaagattgtaaagtagtaagtccctttcgccccactgctgatactttcttctcgaatttttgagctacgggtgctgttcttgtctctcgcatacctcgaaccctgcgagtaagctgtaagagaagcatcataacattagatctaaatatccccaccaaaccttttatacaacaaaataaaatgtcatatcagtattgggaagcatcatatgctattaatacagaaacccattcacataaataaaagaatcaacacgcaacaaaaatcaacaaatgcaccataaccaaaaacacatacattttttactaatgacttataataaggattcttctaatgctaatagtccagtacaagaaagtgatatttctggtactggttcaactagcttacgctcttctgacattctttcatccaaacgagatatgaaaatccgctactttcttaaattggtattctacatagatgatatttacactccctcacaattttatactcaatcactagctcaagttcatttattttcttcattcaaagaaatacagattctcaccagtgacaattctaactaaacaaatagaacaaaaaacaaaattatatttgaaataattaaatatttattcaattagcaaagagtacctcagtctcgtcaacgcgcttccaacgatcgggctcatctccatcccagccgccatcgtcgtccttcccagaagctctgccagccacaggtcgagacctggagcccagagcaccaggtcggagactatctctgtcagtggattcatcatcgccgctggaaatgctgagcatttcgacctcggaatcttcatcgtcgtccaccatacgtctcgcctttgctcctcctcctcccccgccaccggccttgggtatctgagggacggaggctttcttcgggtgaggctgaggtggtggttgaacgtaattggcgacgggcttactgttgttgccggagaatggtctccggtaaacgagatctcgctgagattgctctttcagcgccatttggagaagctcatcctcgtccagctcctcaccgtcgctcgacattctctctcgtatacgtcgttaatggtggtctgagttgctggaaagcccttcttccgtagattgactctgacagtctgactcttgactactttcttttttttttttagaaaacaaacttgttattataaattaaagggaaatttgatacgtacaatactttataattttttctttaaatgcataattattaaaattggtcatatatgatcactttactaatttctcaaaactaccc

SEQ ID NO: 14248 - DNA, 9143 bp, Cannabis sativa
ataaatagatatgtatttgttatatgtatttgttatgtatttgttaatttatttgttaattataaatattataaataaattaaaataataataaaatttaaatatacactttatattataattttataattaatactattaaaaaaatataaaattaaaattatatattaatttatatttaaagtactatcatataaaaatttaagtatttataacatttaaattataatagttataataatgttttttattatatgattatttggaaaaaaaaaaaaattgctccaaattatataaatgtaattgaagtagtaaaaaatacatatagtttggtaattagttcactaattgtaaaaataatatagaaaagtaaagtacaaatttgaatcaaaatataaaaacagatcgatccgtttaaaagaaactacgcagcacgagtaaagtatcaacacgaaaataccaaacgcattataggccgtgtcgaatttattatcctttaaaaatattagcaagacacgacatgactcatatatttttattacacaagatggcataacctatgttttaaaatacacgatatagtatggatcgagcaaacacgatacgtacatcaatttactagttgtaatgacggcctcctggcccttccaaacgctttattttcgaaaagaaagaaaacaaagcaaattcttgttaaaaagaaaaaaggaaaagcaagctcttaaaatccaattaatgaaaaaaaggatatcattatgtatgaaaaacgaaaggtttcatgctacgtgatcagacatataagtttgagggcataaataatatttataacatattaatttaaatactattttttttgctaagattttaaattacgtacatacataataggaagggaaggattaatgctagttaattggaaagaatactgaattaatacatataataaatatataaatgataaaagaccactctaaagatatttactttatatatttacaatatctcaacagcaaaagttaataattacaacttatttatatactaattaattatactctataatcttcatctggatcaacaaaatatcacacaaaggaaaaagaacagttaaatactttgaaaatacatgtttttaaagcattttaccaatttcttcctttgtcttgttaactatgataatttgtgaaaaaccaaacaagactaaaaattaacccctgtaaacttatacatctctatatataagttctttccaaattttttgttgcatcaaaatttactcatgaaaactctctctttcccttcaccctgcagcaactcatcactcccgaaacacgtgttcctctcctgaccgttgatcaatatgtttgatccaacgcctaggagctttccttgatgaccctgacccaccattagaacttcctatgtgagcgatatccaaacctttccctacgggaagaagcactgaccttacgacacgtgtccccctctcgaccgcccactgccatcgaaacgccgaaacgtttcgttgccatacattcttgcatgcaaaaacggctcccctgctactcactttcgccactctcaaaactctaccgaaatccctccgcttcgagtccacgaccagaaaatcaacccctattaaacctgccatggcggctccagcctccccgaccaccacttccggcatcggccaagctccagagccgccggcgccgccgatccgcatggccttgatgtagtcctgccgagacctctcgtccgggactatgcacacgtgtcttccgcccgtgtggcgggcggcgacggcgagacccacgctcgtcgccatgggaccaccttgggaccagacttcgacgatgagctttgcgttccaaccgcctgccatggcggaaagaagctcggccactgcggattctgtgaatttctcacactgacaaaaataaataaattataaatcataaccataaaattttaagatatatatttatgttatatttgtatagattacgtactgatttgactgtttcgatataagcttgtgaagctgtttcaggagaccaaatgagcttcatgatcgttaattttcaactttgcttccttgatttgaactgttctactttgatcgataatctctctctaaaaaggtagagagagagagagtggaagtatatatgggacaaataagaaaggtgtggcaggttcgctgtatttatatacaattgcttatgtgtgactgtgagagaggtattaataaagagaaagagaaagagaagagagtttttgtcatacttttcgtttttgaagtagagttgacatttgcactcttccacaagtagaatgtgtgcaactactattaatgaccatttaataatatttttttattattttctttaaaaagataattgataagagcaacggtagtgcctatactacaattttctttttataattattaattaattaataaaattgatgcttatactaacaattaattatctaaattataattaatacactgtatttgtttttaaataagtcccaagctgccaaaaaaaagaagtctcaatatttcaagttctcttctccaaataataaatttagctgaatatatatacttataaatacagatccactaattaatacattttttttttgttctttaattacatttgaaatttgataattaatgctgttatatctttcgaaaccccgtaataatgaaatattttttgcgaaaagaaaatttcgatttcggtcaactttacgcacctcaacaatgttttaattttttctgacaaacaaaaatacaattaatgcttttaatgtttttttcttgatgaactactatttttactagctcggaaagaaaatatatattgtgcttaattaacaagaaattaaggattatatatttccttttccattttatgggagtactaattaataaagaagctaaaagaattacaaaattaaaaaaaaaaaaaaagaaacttatggattgtacgtaagtatactttttttttttttgacataaaataattaaagtactatatatatatattatatatttgaattgtttttttttttgcttaactatatatttgcatatagttgtaatgtaacatgtaaaataatactatatatgcttattaatcgtgtgataataaatctcacagtttgagtactgtacgtataattagtagcgataagcggtgtcacatactttcatttaatactatatacgatcaattgatgcattaattattatatggtaacattttttatattgaattgcatctcataataatattacttcaaatgtggttacaaactttattggtcaatcttatttttgaaacttccgaggagttccattggtaataaatataccacactatacatactccaattattctttatataattaattatatatgtacgaacacaaataaatgattaaaattaaaaaattgttacgcttataatagtccaataatagtagtgttgtagactattataaatagcaacgaagttaaggaaagttactactcaattttttttaaagaaaaagatgacaacctagggccggttagtagtcatgatttattatgattagggtaaataaaataacaattttaaaccaagttgcaataagaaattggaagaaaatacgcaaatatatgtttaattatatatatttttctgaattgtttttcttcttctaatttataatattaagtcaacgattagttgcatagtagtgatgccgtacgtgatagcaattcattagatataattatcttttgcatcttaaattaaagcatatatatataaatttggagcaatgctcatgatcttacaagattatttatataagcaacgaatatagaatttaacaaataaacaaacaaacaaaaagtattatatatctatcaaataagaataagatgaaaaaaattaatggctacatatttatggttgagtgattatgcttataatatctaatttataattaggactaatttacttaacatttgaaaaattgaggtaattatatatgttgtaaaataaacaatattgaaatagccgaattaatcaaataattcatatatacatacaaaaaaaaaagctatttatatatatgcagatgtatattaattactatattataccgaaataaattatacccgttatttttcttactttatacacaatttttttttttttggtattgtttcgagctatatatagtttatacacaagtttatttcttcggctgaagccactaagactagtttagtagtggggagagatagaaaaaagagagaagttatagattcgaactcagaacttttaaactattaaactaatatataattataaaataccattaacttacactaaaaaaaatatttcttctgctgtccatcccaatattcccacgtatataatatgagctgcgaagtgtctggaaatagtacaagtgatctgttatataggtaaaaatatgtatgtgatcagttaccattacgagtaaaaatgaaactgaattttgcaatgcaaatataccaatagcacgtttaattaaccttacctccaagtaataatactgtttatactttttacacgtcaactacgtactgtgttaatgtgtttgtttttatgtacgtgcgttcagaaagaaactgtggaaatataattaatattaaaaattcattaatggggcgtaaaattcaatagcacaattggtcctgagtatcaactactcatcaactgtatggtattagtctcttctccactattaaggcttatagtaaattctgacttccattaattcagccttttttgttttcttttttccctgtttttggttttggagcaacgctcattaattaatttcatttcttttagagaaatgctaaaggacacaagtggtgtctagcacccttttatgtgtcgatattactattgatccaactaagtatcgagtcccatataatttaatataatagctttaaggaagtatcgctagtcaatcgcaacgcgacatgtcgagaaggtgctaggcaccactggtgcctaatagtaatgctctttcttttattatccaatatttttgagaaatgctaaaggacaccagtggtacccagtatcctcttatatgtcaatatcgctattggtccaattaagtatcgggtcctatataatttaatataatagttttaggaagtatcgctagccaattgcaacgcgacatgtcgagaaggtgctaggcaccactagtgcctgatagcaacgctcaatatttttatatcttttctgaggaatattcccaaatatgatctaattaattattatgcttcagaatatcaaaatttaaaatgactataaataatcgatgagtcgtaatggttagaaattcgaatactgatcatgactctacgtttataaataaataatggtagaataatttgtagtataattattttttaattataaattaatataagtttaattttttgtagtaataataattaagttatattttttaaactctgaaggtacatcgtcattaaatgtaaagttattatccacgtgtcattttattattggtatatttaaactaaattcttttaaaaaaaaaaataaacatttaatgactttgatcaattagaaattgtcacgtgacaatttatgacaatttacttaacacttaacaattagataaattataacttaaatattattggcacaaaaaattaaacttaagtaatatttatttataattaaaaatcattaaatttagattgttatgctgcaaattatttataatagtgttcaaaactagtttgtttttctactagtaaagattggatctagctagcaggtatttaaatatatatataatataaaaagtatataattaacataatagttctatatatcaagttgtaaaaagtatatatatctagatgccatatatgaatcaatatatatagtagtgatatataaatagaaatatagatgattattatatataagtatactattattatttcatatatatagggatatgattttgtggtgtgattgtactttcatggaatgttccgtgatgtacggtagccgttagatgagtgaattatttgatctaagggctgaggttgatctaagggtaattagggttaaaaaacagtaactgacactcatctaatgtaccctgaaacatgtattacagaatacattttgtgattccataaaaatacaacacgggataaaattgtgtccctatatatataataaccaaatataaaggtataaaagaagttgcataaagtttcagccgtactactagaatagttcaagtagtacgattttgtatatataaaagtctgcccctacgtttttatatgttttctatttaggatatgtatgatcgatcaacaagctcattacagtttctaattataaaatcaattattttagtgcttgtcaaataagtggctgttctgtataataaaatgagacaagttgcaaaaacatgaacaaataatgactacgacttcttcacaagtcaaatactcattatatatgtatatacatacatacatacatacatatatatatacttctacttgcctaatttttattgaaaaaacgatatagcgctatggcatcttttttttttttggaatgatacctttcttaaatttttaattaatacaaataaataagaataaagggtactgatatttgattattatacatatgaatatgtacatggaataagtcaattatatatatagaagactagaaccactagttttatgcatatgtacggtaatatattggtcatgactgcggggtttctcaattaatatttaccaaaaattaaggctatatgatcctgattcacgtgaagcaaagcattatatatataactcaattcaacgtacgtgaattgtgttttgaaagtcaaaagtatatatattatccaactttttgttctaatttccattaattaaatataaaaggtagaaatggtaatgatcagttaaagttaattccgtatagatgtttattttgaccctttcttttataaggaccctgatatgctgtctctaatgaacatgcggaggttaaaatcaatttgtaagagtatatatagctagagataatattgtacaagtaaaacttttttacatggctataattatctatatggttaaatgtgatactaattaattaaattaacttcgtccacttcttaggtgattattattatttggtaatttggtgatatatacatatgtgcgcagcattaaaaaaaaagcatgataaacatgtaacacggcgaccaattacaacagcaataaattagttaaaaaagaaaaacttctgttaaattcttttttttttttataagggacttttttaaattctaaattcaaagatctattagtaaaattacacacaaagtcctcaagaaagcaaaatagaatagtacttattatttactttaattgagaaaaaaaataaaaaatgatgaaaagagacctaattaattaattggagatttcactaatgtattacctcatatgcttgggaaaaagccaaaaaggtaatcaaaatgtaatccttttctttaatacattgaactcatcatcttatttaaattacgattttgtttctattattatacttactcgactccaaaagggtgtgacatcaaacagaaaaaatctatatattgataacttaaagtgaccatatattatatatatacatattgtttagaatgctaagcaagtaacatctttatcaattatatatatgtacgacagcatattaagtatttgttccaaaaataatacgtatgatacctcttataaagatcatggcggtattaattaaatagagtagatcaatgtattagatcatatgatatctaattaattgaaatcaaataaacaatcctcatctttgaaagcaactatatattattgtgtcctgttaatatatatatgatggaggtaataatattattattagagctaggcatttgtataaaaataaacaggccctatttcttattatttattttttgaaaatttactcaaatactttaaattgtaattttttttatatatttctattttttttttacatttttacgaattaatgacttttgaaagaaaaataatattattttcatatctgacatcgtaaaaataatgtgtaaaaaacgttcttttctaacataatggaatgaaaaaagttcgtaaaacaacactatggaatgaaaaaagttcgtaaaactacttaaaaataatcaaaactccctagaaatgtaaattttttgttatttttgagtattcctgaaatgattttcagatgctaagagaagttggagaatgttctagttcagttttggaagtggagaatactaagggagggggaggacctgccttaagagatgaatggaattcttagttggaatgtcagaggatcaaagcttcacaaacaagaagaggtcaacagatcgatccatacaatgaatgtgggcttagttagtctccaccaagaacatagggtctgtatatgttaatatgtttactggatgttattttaccatgaataatacatggcacaaggggagaagaataatgattggttaaaattcgagcatattttcagtcaatatcgggaagtgatctagtcaactaatgcatatggaggttatttctatggctgggaaagaaaggttttaagtaacttttgtgtatgctttcaatgaggaaagtcgagttgctctatgaaaggacctgaagaaaatagcagaattagtaagataaccatgggttctacttgaggatttcaataatattctcagtgttgaagaaagcataggcggtaacaagatgcattagtgttcatgagtttttaaagaattcatggatagctgcctaatggaagacatcaagttctcgggattgttttttacatggaacaacaaataggcctgagacgagggtaaagggaattttgattttatatacttaaaaaattaaaaaaatttattattaaaccaaaaactatactttttttttttcaaaaccccaaaaatacccccctcataattc

SEQ ID NO: 14249 - DNA, 6184 bp, Cannabis sativa
cccctattttgattgattcttgtcgtcttctcaggtgaagtcgccagaatcaatggtggttctctttctggttgaattttcgtttcggttgggttggattgctgtgtggttgtgcaatggttgcccaaaatacatgaatcttaggttgaaagtatgtgtaagtggtattatggatccttttttaatttgaactgcatatttgtttatttgaccaactaaaaatatttttgctcaaaaaaaatatctttctaatattattactttttggtaggtaaaagtgaagaaaatcttattttttacattgccgagactaggttattggtagatattggaatttttaataattattatttttacaagaatatagtcaaggtgtcactacatgagagatcagtggtggaaaaagaaaagaaattatgagttgatttttggttagtagagtcaaataaggaccaaaattaattagtgtataatcgacctctaccaaaattaattaggttcacaaagtgactaaacttattagacctgacctctatataaaccaactccttaccacaccaaataattctcataggctctagctttcaagttatatatcataatatacatatatcaattatatattgcagtaataaattcagagattattatgggccagtttgatgagtactcaaacatatttatgtgtgtggctctaatgggaatgataagccttttggttcgtttatacaagtcattagtggccaatccacggaggcttcgttctctgatgacgaagcaaggcctcaccggaccaccaccctcttttcttcttggaaatattatggagataaagaattctaagtccgccgcgtctcgcctttctgccgccctctcggccggagaatctcctctccaacacaactgtgctaacattctctttcctttctttgagaaatggagaaagcaatacggtattattatacatatttccactccttttatcttataataatgaattaatagtatcaaagcaatatatattatgctatagctatgataatttttagctcctataaagttaatttgagatatttgcatgcctctaaatctattaaattgtatcctggattcttttgtcgttaaaaactccaactaactagttacagtaattgctacaaaggtattagtattctccaacaacattagtatctttcgattaattaataatatttatatgtcacgtctcacgtatccaatatttaaatacatcaataacatggtattataaaaagtgggatagacaccactgatatcttttagcatttatctttaaatatgaaactgataaattttattccatggctaattaaatatagatgtagctgatgtattattgttatacacttccatgtgcaatttaaattaaatttaaaaaaattgggcgggttgatcagattttaagtttacgagtttcgagttcgtgagttttgaatccaaaaaaatggattcggattcagacccgtaataaggttggttgacaggtcacgggtaatcgggttaacatgttgactcggtcaactcagtccttctatataatttttctttatgggaaaaatttacataaataaatattttgggaacattttcctttttaaaacaaaatagaaattataaataaataaatagaagatgaatgaatcttgttgggcagttaaatgactacattgtatgattgctattgttagttcttttttttttttgatgaattaacgtatacttagtaaatctcctagaaattattattaagttatgaaattcataatcctactttatttaaatattcaaatttttaaacttattttgtagtaataatataaaaaaaattaatttttgtatgtatattgtgtttttcttttaaaaaaatattttatgtagtttttctttttgcttataaattttaattttttttcaaataaacaaaagtttattttatataatttttctttaaatttagtgagaagttgttaaaagaaaattttaatgttaatgaaagaatttttatattaccgtaaacttgaataaaatatttatttataaataaattaatgaaaatattcttatacaatatatatgtaaaaaaaaattgatttggttggcagactgtttgggtgtacaacccgaaactcgatgaccataaaaaatcaactcgcaaattcgtccgaaagtatgctggattggacctgacccgtccgaacagaacgattttttttttaattttacaggatgattggattgggtctgggcgggttggccggtcctgggtcaaacccaatcaatgttctttaacgtgtgagtaacaattttaaatagggtttttttatttttacacttcaaactaattttttttgcattttcacgaaattttacatagaaattcctattgcaaatagcgttgcaatctaaattgtaacggaaaatcgtatagaaatccctattgcaactagctctgcaactactttagaaactcaaaccgtaaattaaaaaaaaattaaaaaaatagtatagagagtaattctcattttaaatattactaattgaattttataaaatatgtgaattatatttcattccttgcattgtttttttttttttttttggataaagtgaattcaaaagatgagccacaatattatactgtaattattcaggtgaagtatttatattttcacttgggaacacacaaatattatacgtgaatgaggcagatatggtgagggagatcaccacatgcacatccttggacttagggaagccattgtatcaagccaaggagcgaggtgctctgctcggtcagggaattctcacttcaaacggtgccgtttgggcccaccagagaaaagtccttgctcctcaactgtacatggacaaagtcaaagtacgtaataattaattaattaaaaatagattatttatatataactaataatagttataattaattaacgacgtcagggaatggtgagtttgattacggaatgtgccacgtgtcttgtggacacgtggaagaatatagttggaggaagtagtgcggaaataaagattgattggtacatgagaaggttctctggagatgttatatcgaaagcctgctttggaagcaattatggtaaaggagaagagatttttcaaaagcttcgatccatccaagagtccttgtccaagaaaatgttcttaactggtgttcctggcatgaggtatatacatatataaaatataaaatataaaatataaatatattatagctatataggtctccgtctttggcctgtaaacaacaattttatatatctattttaacattattatagtttcacaaaccaaggcaacaatttattgttcaaggggataaaaggtaaattagaaaaaatgggttcttacaccatgtattaaaatttttaatttttttttcttttttattgtgtggcagaatttttttaaaaaatactatatattttttattctgtgtattaagtttttactgctgttttacggttgtaaaaaaaaggtgtggcagtaaaattgtaaattttatttgaaatacaatatttttgtaaattaataaataagttgattattgagaatataaaattacaaatatttttaagtaagggtgtcacttttagatattgttagagaaaactttttatttttaacatttaaaagaataagtcatcaaactattttacacttaaaagaaatgttagatatttttctcaaaaaaaaaaaataaaagaaatgttagatatatatctatcattattattattttattatttttgtaatgtgatacacataattatttgtgattaaatataatcttaaaaaaattattatttgtgattaaatatatttaatcacaataaattataatttttacaattcatatatttataaattttttcatcacaacataaaaaaaattataatttataattagttatatttttgcatttcagttacaaattttattatgattaaaaaaaaaaaaattagagtgagggttggcatattataaatttataatataaacttctaactttttgctgaaactatatatttttactttactcgatgactctaaatagatatgatctattttcggccttattagttagcactgatttattttttccttttaaaaatgtgtagaaaagttttttaattaactaattgatccatatactttgatgagtgttttaccttattaataattgattaaatttaaatacacaatttttttttttttgttgggagtgttaaaatgttgagctttcattatcgaaataattttaaaaaaatgaataaaaatatatttgaacttaatatttaattgtggatgatgacagatttgtaccaacaaagagtaacagagaagtgtggggtttagaggcagaggtgggaagactgataattgaagtagtgaaggagagaaagaaagttgggttatttgggtacgagaaagatttgcttcaaatggttatggaaggagcagagaatagtaataagcaggttattggggaaggagaagaggccagagagcgtttcatagtagataattgtaagaacatttacttggctggctacgaaaccactgctgtttctgccacgtggtgtctcatgctcttggctgccaatcaagattggcaacatcgtgttcgacaagagcttcttcaccatctctcccaaactcatactcacactcccaattatcacatgcttcgcaacctcaaacaggtactatattaattaattaagactcaaaataaataaactattttataattaatctcatatttacaaaaatatttagttttttgtttttttaaaaaaaatgatggggatacattcaaattacacaaactttttatacacaatgtacactttattatttaagtaattttttaacaaaaaaaatatatatatctaagcatgcatgttattgtgggcattgttccacatggaataaataaatggtagagaattgagtcatatataagaacatggctactccacttatttccaattggttttgagatagaaccccataattctcaacacatgtatatatatataaatgaatttgtaattattattatcatatcttgaatatgtcgctttcaactaagtatcgggtcgcatataattttacctaatagatgtgctaacacaaatatatatatatgataagatatagtaaatatagtggaagtgtgcaagctataaatacatttttgtaatcataaaatatgtatttgatcatgacttgaaattggaaccaaacagaacctaaaacaaggaattaatattacgtacctcaacttttgtattgtaatataaatagcaccaaaaattatttaatttgtaacattataatatgctataatatatgtatctatatacattttctatacatattttgtttcttaattagcttttatattattttattaattaaattattgtaatcatgtgtagctaacaatggtgattaacgaagcactgaggctttatccaccagtgacggtggtgtcaagagaggctttcaaggacatgaagttcggagacattaacgtacccaagggcatgaacgtgtggatcatggtgctccccctacacaccgaccctgaaatatggggccccgattcctacaagttcaacccgaatagattcgccaacggcatcactggcgcgtgcaagctaccgcatctctacatgccctttgggatgggcccccgggtgtgcctaggccagaacttggccatggtcgagctcaagttgcttcttgcttttctcctgtccaacttctcctttgccctctctcccgcgtaccgccacgcgccgactcttagattggtagtagagccggagcacggcgttgatctcttggtcaccaagttgtaggattaatttatgcatggtatgttgtaacttaatagtttgtggaataaaattaagatatgttgactcaagtggctataatttgaagatagaggtggcaattcatcaatatgataacacgacacgaatttaatatgaattagtagagatgagggttatgaaaaatagacacactaaaattagattgaacttaaataacatgattattatgattattatttaggttggattggatgtgttgggt

SEQ ID NO: 14250 - DNA, 13228 bp, Cannabis sativa
  modified_base (5868)..(5877): a, c, t, g, unknown or other
  modified_base (8439)..(8440): a, c, t, g, unknown or other
ataaatataaatataaaatattttttaaaacaaaataaaaaattagaaatttaaatattatttattttaagtattttttcttttaaaaaaaaattgtatatcttgtaagagataataaaaaaaaattatatattttttaatcaaaacagcatttttctaaggttttaccagctttagtttttagctctagtttttctataaatttttcaataagttgttttttaactgcttaccaaacatctttatgttacagtttttttgaaaagtagcttttagtttttctaaaagctgtgttaaacgggtccttaatcagtattttttttcaatattatataaaatgtgtcagtaattttcggtatcttttagatagtccaaatttatattaggtagacacaagtatatattacatgacatatattacgagttccatatcgaattcaatattcaattataaaaaaaaaaaaaaaaacaaaaaaaaaatccaattacaattgaattggatatatattgaacgttaaattttaattaaattagatcgattattagatgttattctaaaaatttaattaaaactcgattccatctaattaaatttatatgtatatattaaaaaaattatttatatcaatttatatataataaaaatattaaaaaaattataattataatatttgtttttatgtatttgttttcatgttattttgttctatattttaaatttttagttgtattaaacttataaagatgatatttttgtaaagtattaaatttaaataaatggtgatatttagtttttaggtattttttatttatattttttaaattaatattaaaaataaagtgtgtgttttagacatgcgcatctaattaaacaaacgatcaaatccactattaatcggattagattaaattttgaggtcttattaaattagatcggatgataattttttaattaaatctaattatttattggatttgattggattagccaatgaaatttattagggacatgacactttataataatatattaagttttattagtattttttataggaattattttatttatacatttcaaaatattttttttttacatttatacagaaatatactgagcaatctaaattgtaatccaaatgcacatcgtaacgcattaactatatattaaagcaacaaagaaagcaactcaaactgtaaaaataaaaaaataaaaaataaaaaataaaaaaaaaaatagtacatgaaataattcctcaatagtcaatataatatatctttgtaaatgattaattatgctgtaaatatggtaggtttaatatttaattttaacaataataatttataaaaaaaaaatatgaaaatattggacacattgaagtgtaccaattattttattgaagtttggacctatttatataaatagagcatagatataataataaagcattgtgtgaggaaataatattaatgttatggaagtaaaggtgaaggagaggagtctagtgaagccccttgagaatggcctttgtcggccaattagtattccattatccaacttagacttattatatgaagaagtgagaaagggcagcaagagcacaggcctctatttctataataaccctaatcaagaagttccaacatctactcacaacttctttgactcatctctcctcaaaaattctcttgctgaggttctcaatctattttatcctgttgcaggccgtctcggccatgaccacaaccatcgtcttcagattaactgtaatgacgacggtgtgttgtttgttgtggccgagaccagctctcacatccacgagcttggagattttacttcctcgtcagatctctccaagctcagtcctccggcctcagactattactctaccgaaatttcttcaatccctttgctggccttacaggtgtgtaaacctagctacttcatattgattatgatattgaaatgtgattcatgcatcaatagttttaccttaaaataatgtcatacaccacttgatccatcatatagtgtattatgttattttataaaagtatctaaaaatttgtcaaactgacactataaaagtgtttgtaaagaatatatataaagtataatattaaataattattcatcttaattaatttgataataaaaattattataatagtatatctttcactggctcttactttatatttttaatataatattgatccattaatttgttactttgtaatttgatgaattatgtacatttattttttttgaaagaaaatctgtacataataattagtacacttgatttatctagatcgcacaaatatgataatcttgcttatattaataaagatatatatgattttttgttcgaaaaaataattatatttatatataattttaaattacaccgtactataatatataaagcattttttttaacaatgtactagtaagcattatttgaagcaaaaaaaagattttataaatattcaaaaataatataaatactaatttacagtttttttaaaatatttttacatagatttttaacttttttctaacaaaatacgaataattatttttttatggtttttcacgctgctgctacattaaaaaaaattgtaaaaaattcacaaaaatgtaaaataaaaaagtacaatttgagctactttgtataaaacaaccaaattaacataaattgataaaatatcagtcacattgagttgtgtctttaattattagcattgatattcatgaatttatggctatatatatactaaacaggttacttactttggatgtggtggagtctgtctaagtgttggaggagcacatgttgtaatggatggaaattcagctttcaatttcgtaaatgcatggtctcaaattactcgacccaaacccaccattacaactccaccaattttcgataggactttactctctcctagaactccaccacaaatattgtttgaccacactaatgatggatatcgactccttaatcaacccaatcaagacaacaatcatggtcttaataataataaccaaaacttcaaagtgattgtagtcaaaatcactaaggatcaactcaacgctttgaaactcaaagctaataataatttcagcacattttcgattttggctggccttatatggaaatgcacgtgcatggcacgtgaacttcctaaagatgaagagactaaattaggcttttcttctaatggaaggtcgaaacttaaaccaccacttccacttggttattttggcaatgtcgtttttagaaatacgacaatggctttggctggtgatattcaatccaaacccttttggtatgcatctaatcttattcatcaaactttgaaagtgaatttgggtaatgattatctgagatctgtaattgactttttgaaagttcatcccaatacaagacgtaggtttgaatttggatctccaaaccttgatattaatagttggtctaaattttcgatttatgatgctgattttgggtggggtccacctttcttggcacattgtggagctatatctaatgaggggagatcatggatatttgataacagtaatggagacatatcagtatatatatctcttcactctgatcatgtggaaaagtttaatagttattttaagtgtgtggtgaatcaaatttgtgactaaaaatgttattaattagtctgtttcggctaattattattattcacctaattagaatttgtattgtgagtttgtcttaatgttttgttttcttattattctgcattttctttttatttctctaagtgtgggtgtgttactaaatatattgtattgcatttgtttctagttgatatgttgtttgaaatatttataataaaggcatgcgtgcaaaattctgcaaggcaatactctacaaaggatgtaccattgcatttttatttatttcagcatcgatttaattttttagttcaattatatttttatgatcttgtatattgtaactaattagtaaaatttaatatgtgaaaaataatgaatggattaatagtgcataatattagataataagatagaaaaaatccccaatcacattcgaaacttgacaccaacaatgaaaaaaatcagttattaaaaaaaacagaggagaaaagcttctcaatgagagagcattgttgtatttgtagagttagatttacaagcagttaaaacaagaattaaactaactaatcttgattaacaaacaaaacagaaaaactaacccttaaggactaaaacagaacttataactgtcaactaacaaaaggaataaaatttgagaaaaaatagagttattttactagttgaaaaaaaaaaaaaaaaaaaaaagattattttgggaaaatagataatttggtactggttctgtactggtagctagggttcagcggtggggaaatcgaacgttgccgatttttgaccgttttcttcttcttttttttttctttgttctttttgaaattcttgaccttctttaaaaatagtgacagcagagtaaatcaagtccacaagctattgagtagtcaaaagcccatttatactgggcctaggcctgttctacttctcctgtgtatgaaaaagtgtcaaaaagcccatttttactgtgtattaaaaagaggaaattacactctataccatttttttattgttcacttttatttttaccttctcttttaaattctatcatttttacctctttttttaaacattgtactaattttgcccctgtaacttcaagatactctctatgtgactctcttatgtcaggatgggtacaatacatataaaaagaggcatgtttcaaataaatataaaattagaaacatgtttgattaattgattaataaaaggggtatttttcaacttacccttaaagaaattggtattaagatagagccgggtgtagacctggctatcgacccatctgttgcgggtcaagatcggtgcttcccctacccgaatatggaggtcttttgccacctctagtgtaaggataaaggcttacttttgattttaaaaccaacttcatcaataataatgtactccataaatttgaaatttaaaaattagttgattttgagtgtgtgtgcatacacatggcaatattgcatggtactaattgttaataattatgtcttaaattaagtaatcaaaaccatctattaatgaaagtgcgaaagcagtagcagacaaccattttgaaataacaagtaaagcaccaattttgattaatttaattaaacctctcaaaatcattccgagattgggcttgctttttgtgcttcataattatattattagcttatttctatcggctttatatgaaacaatgattaataattataattagttgagctaatcctaaaggggaatgtattttattttcaaaaagaaaaggggaatgtatttaacgagagaatatcgataatatatatttatattcctcatacatgataagtaattgagtatagaaggtttatggaaatttgacctgcagagacgggtatacactttgaatggaatgagaattactcgccttaatagataatagagtaagagtgggatgcaattttatatacccgaagcgagtttagagtcaagatataatttaagttttattgtctaattttataaagtatatctttttttcttgtaagtcacaatgtttaatgttgcgactcataaattagtttaatatatttttaaaatagactatatttttttagatggaataatctctttactttaccttttagtgtttctattttctaacttataatattattattttattttgaattacattatactattatattattattattatnnnnnnnnnnattattattattattttaattttaatggacaggtatttcccctactcggaacataaatgagaaataaattaatcctttcccttgaaggttttatttcatattttatgtatgtataaactattattctcttactagtagttgtatggtttaacttttttaaagatattctctttcccatataaccataatttaaaatattgttattagacacgtgctcttatggcatattgcaattatagttagtaatttttaatgataattattaaactaaaaaaatgtagaatataataattaattatagtaataactaatataataatatatgatatcgtttatgaattgattatgcaaagtaaatagtgaattaatttggatatataattttttataaaaaatttataatgtgaatgaaatgttgaattttctaaaatatatatatttctaacaattgccagttgtaataatgccttttgtctctttgacaatacagtttagagaaaacactcttaagaaaaattaatattccattccatctgaacacatcatatatatgatatagtaaaattaagaacctaaatattctttcttgcattccttgctcctttttaacgccacattatatctataaatatataaatataatataccatttctttgaattttctagatcataattaaatatctgaaacatgggtacccacctcatttacttttaattaaagtaattttcttttcatcatcttaattaattaattatattacttgcttaattaattaaagtgcatatataatccctgctcaaacctaccatatataaataaccttttttctgatctctatctattactatttatttatatgtatgaataagaggagaagatatatatatgatgagaaattttgtaaatattggatggttgattttattattagtaataatctcatgtacatgtagttataatattactccatcttcaagctgtgtgactctaaaaacaccaaccaaatcatcatcatcaaattattattattataataataataataagaaggctattttgaaagaagaagaagaaaaggcacagagaggcaaaggaggagtctatggtggaggaaatgctgcaaatcgacctcgtccatacaaaaattcagcttcatcttcaatattactattatcaccaacaactatgcatcttttactatcattattgatcctactactctttatactctgatatataaatatatatatatatatatatattatgcttgtatttttgtgtgcatgtattaattaattgttttacaagtgtttggagcttttgagcttgtaaaatttgtaattgtacatgtttgtcagggttttcctttttcttactaattagtgttttgtgtattgtctatatttctttgatttcattaaaattgataataaattaataatgtttgctgcaaaaaattttattatgtatgaaaattgatatatgacactcatttgagagcaaatattgttatcaatactcttaaaggatcttattccacttcgaatgtaatggactctttaattatttgttattagattttgtaaattttttttagacggctgttaaaaaaacttaattaatatgacttatttatcaatattactagaaaaaattatttgtaattgaccaggttgttgaattttattatctatcaaaggttttttcttattttttttttattttaaaaaaagatatatgacagtctcgtagagaaaataaaaaatctagaagaaaaaaaaaattgggaaggaaaggaagaattcatgagagaaaaaagaagaaaaggagtggaaaagcttttggtggcccaagcccaaagaaaatttactaccctccaaaatgagtgattactatcaatttttcaaatcttgaaatcttatcctactaaaatgaaaactaattttataataatatttttttatgcaaaaaaaaaaaaataataataatcacgtgtcgtggactacgtgtcgattgtaagagctttatatactaacttattttaattgggttattaataatcaccttaacggttctcatcacatcgatgacactacctccaataaaaactaaatctagtaagtttaaagctaatttggcccaacacaaccaactgtgctatgaaaaaaaacagatgtaattgtactatgaaaaaaaaattgttgtagcaaaagtgtgaaaaaaagttgaactgagtatttggttaattataaatttcaaaattctataaattgttaagatctattataatgataatgataatgttataatctagtttattataatcacaaatatgtaaaaatttattttatataatattttattttttatatattttaaatttttttcaaatattcatttatatgcatttgataaaaataatttatagaatttttttattatgtttataaaatgtaaaaaaaaattagaaactcgttgatattgtttgttaatattaaaataaaatattaattatattttttaaaaaaaataaaaaatttaataattatttattttattnnaattagtttattttaattttttttcttttttttaatatataatatttaaataaatatggttttcagtacaaaaaaatttattagtcttttaatcaaattagttttttctaaaagttgagttgaaacagctctaacttttagctgtaatttctctaaaaaaactttcaaaaagttattttttgattgctttctaaacatatttttattacaatattttcaaaaaataacttttaacttttccaaaaattatgccaaacaaacccttagaactcttgatccaaaaaagatgcgaataaaaacaatttataccaatacaccacatgctattttataataatatttaacaaagggatttcttgcttttattttactaataaagtagtaaagtactatggaagaaagtgattttctttatctacactttctctttattctattattttctttcctcacccaccaaacatggcgtgcgagtgtaattacatcatctcatacgcaaaccattttcttatctattgtccctaatcagtcataatatataaaaaagaattcttaaagaggtgatatatatatatagatccacagtaaaatcatatttttgtttaacaatcactgtaaaaaaaaaaaaactgttaatttactcttgatcgaaatgatcataacaacaagatcttaaccaatattttcagtaacgctccttaaaaatcaaagccaaagaatcataaaagcagagtaggtaatgccattaattttaaaatcagatccaattcctgtagtttgtgttgtattatcaccactataaagtataaaatataaattgtaacacgaaagtttagagtttataggtatacaacaacatttaaaattatcatatgacaggaagtctaattcacaaaaagaaggaacaaaaaataaaaagtgtagagaagaagaagggagaacaaaaaataacaagagacaatttaccagaaaacaaagtccctatcatatttcgtataacaacttctcaaatgctttcaagtgatcaggttgaagaccaattgcaattgacaagcttccatcgtttgttgggctaggtaaagtaaaagctaagccctcacaaaaaatcccacctggtcccatgaaaattggtcgaccccaaccgaaatcagcatcatggataggcaatctgacccaactagtaattccaagatttgggcacttaaaagtatgagctccccggacaagagctgaaagattaggctgaacttctaagaaatcaagcgcggaccttaagtactcgttgtccatccttaccaaagcatcgtgaattcgactagcagcataccaagttggctttgacataagatcaccagccacagcgagcggtgtggatgtgaaaatcacattgccaaagtaaccaggtgggagtggtggttgcagcctagaccttccatcagtagcaatgtacagttttgtatcttgatcgtcgggcaatcctctagccttgcatacacatctccacacatgtcctgataacatctcgtacgagctgtagttgactgtgttcccatcttccttgctcttccctttcaacatggctacttgttctttagtcaatttgtacataccaactgcatgtgtggtgttttcgggtgtggatcgaggagagtttgtggtggtggtggttttcatggctggtgggggtttgtactcaatgtgatcaaatgtagctttaggtgggtcacgagcacgaagtagtgtcctatctataaagggtggaattgtaaggtcaagaccacgagccatatcagaccaagtattcacaaaatggagacctgaaaaaccatctgcagcatggtgttgcataccaacaccaagtgatacacccccacatctaaagtatgtaacctgcaaataatacaattttacaatcctcaaaatctaacatggaattcattcagataagaatagcattcaaattggcctataaactataaatataagccaataaagagtggtccacacacagggcatgaaaaaatctaccaggtatatatttttcaagaggacccaacgaaataaatagttaatcattacagtaataaattaactcaaattaatttcattagtaaatgacttttcatattaaaaaagtaggtagaaatttgtaagagtactttttttcaaaaagcctttcttaaagaacagagcaaaactatatagtatcttcaaatacaatcaatcatcataatacgctatattgataattacttcccaataaatttcaagtttttaaattcatagattttgttttcaatgataacatgaatcaacctaatccacaataatttcaataatttatttgtttttttttcttcagaaaaagtcaaattaaataaataaataaaacatgcatacctgtaacaccaagagtggatacgaagcaatgccaccggagtaatcaacaggaggaatgagtctccggagctcaggcgtcggagcaaaatcgccaaaatcatcgatgacgaagtttgactcagcctcaacgaagagaacaccatcggcattacaatcaatctcgatacgaccatcatcgtctcggcgcaatcgaccagccatgggataaaaaggaacgagcgccttacttagggcttgtttcataacaccggcgtcaaagaaattggcggcgccggtaggtctataaaagtaaacgctaggcgtatgaatactcggaatcaccaagtccaaattcgagttccatagaatcctctgaggtgtctccgtcgccggcttcaccatcgtcgattccttaacctcgatcacaagcttttccatcttcttcttcttcttcttccttcactgaaccaaaaacgacaatcaaaatcaaaaaaacgacataaataaaggccagcaattcgttgtcgtttttaaaaataatacgtaattataattgttaaggagaggcgtatgttaatatgatcaaccgtggaagttacctgaaaaatacaaagatggaggcgtacgttagcagagagagagagagaaagaccagcgctccgaaagagagaaaaatgaatctggatgaagctctggtccaagttggtgcaaatgcaaagaagttgtttaagaagccaaaatttaaaataaataaataaataaaataaagagaatcgataagagaaaatgcgcaaaagactcaagtactgtcactcacctaccgcgccaactatagttggcctgtaattatccgccacgtggacgaatcaaattgaccggtgtattggttaaaaaaatgatttcttaacggagagagagttggtgagacggtgacccgtcacagtctaaacgtgctgacttcggaattggatggtaatgtgagaatatttgagatagttaatctaccataacttaggaaaaatataattaagggctttttgtaaataaagtattaatttatgttttgtatgtaataatttgtataattaaattaatattatgatttttgtttgctgttgtctaattaattaattctttaaatttgttctaaaagagtgtattttcttttaggttgattatgattttttttttttaattttaaatcattaaaattcttttaaaatattaaaaatattagatttaaatatttttgtctaattattaaaggatgtttaacatgacgattatttctagtttaaaatttagtatcaaattgtgttttacgaatttttgaatttaaataatttcggaaaaaaaaaaactaatgacctacaaaatttaaaatttggataaagaaatcctaattagtttttgttcaatataatggattaattatggtatctctattgtctattgatgtagaatttgggttataattttaggagaatattattacaaatttgtgatgcaatacacgtttaatggtagttgatgaattgggcccgccacaaccgtcagattatgttgttcttttttggtatgtttttatgaaattgaggaaatgctgtgattaatgagaagtgagaacatgtactttttttttttttttttgctgaatttgattgacactgtagtttggggttggtggacttccatttctaaccccactccccattccacgtggcaacaatatagtgctcctctgctctccaccatcactctccacgtggcaactgtttatctggattagagtggaagtgaacgaatctgttccacttacttcttcataacatgacgtcacgatgatgttcatcacaataaaacattttttcttctttttgctgcccataatatggttagatgagctttcgatcggaacattactggttttgtggaatcttccttaatatctatttctatccgtaatgagcacgagatctaactttctctatctatataacgctttatttaaaaataaaaaataaataactaataaagttttcaagaaagagaatagataaatttgtagacgaagtagtataatttaattagggtatctgtgatcaaattttttaatttttgaatctttacacaatcaaattttaaattaaaataattagagcgaaattttttcaatttatagaatggttttgctatgtattttttctgtccaatttactattaaagtgtcaagtagattaacactttatataaataaatacgtgatgaaatttcattaattcacttaatattactaattaaaaaaaatttaaaatattttctttctcttttttctatttttattccttttcctttatttttttttcttttttatccaagcaaaactttttttttccaccaccaccatca

SEQ ID NO: 14251 - DNA, 3955 bp, Cannabis sativa
  modified_base (364)..(365): a, c, t, g, unknown or other
  modified_base (3898)..(3906): a, c, t, g, unknown or other
tttgaggctgaccgtgtttttagtggtgttgagttacctactgtaattgcttcctttgttttggaagatttgatttaatgaaatttcattattattcaaaaaaaaattggaataaattaacagaggaatatgatagaataaatagaaaataattaaaatcaatatttgtaatatgttatttactaaaattatttagaaatagaataataataatttatcttatttatttatcaaaacacataatcagaatacttaaattgactaaattatcatttatagttaaactatactatacggtagttattttgtaagacatattttaaaaaataaaattctcattgtatatttaatattaaaaaataanntaaaataaaaataaataaaaatcattactccttagtgacattcttaaaaaaaatagtgagaaagtattctctttctttttatctcatattaaataatgttgtctcttttttaattttagtaaaataaataaatacaagaaaataactatcttaccattaatttttttttatttattagtattcacgtgatatgcatacataatttatacacaaacttgacacatatttatatggcaagtattgtcaaccaatcattttttatttaaaacgatcacatgtattaaagtgacttattatataagtgtttgttatcactaaaaaaaatagctacatttagtgacaacattttggtcacaatataaatttttcatgactaactatgacttttaatcacaacaaaaaaattatttgtgactaaaatatagtatttaaatataacttgtcattaatttagttttagtgacaacaagcattgtgattaaaaatatatttagtcacaataaattattattgttgtgactaatatttttagctacgaatattttagtcacaataagtgatgtggtgaattctgtgcaggatttctttcgaacgggcggtttgtggctgagttaaatcgtacttttattgtgatgattcccaagcgttcgaatgcagctatgtttgatgactacaggccgatcagtctgtgcaatactacttataagattatatctaagctcctctcgaataggattcgcaaggtgttgcaaaatctgatttcgcctaatcaatccgcgttcgtcaaagggagatggatagccgaaaattccattatagcccatgaggtgattaactattttcgtcatctgaagggcaacaaagcttatgttggaattaaatgcgacatgtccaaggcttatgatcgcctggaatgggatttcattgaagcagtctgcgtgcgaatggttttgatgtgagatttgttaacatgatcatgtggtgcattcgctcggttaagttccaagtgttgctcaatggggggcttaccaaatctttcgctccaagaagagggattcggcaaggcgatcctttgtctccctatatcttcatcttgtgctcggaagtgctttctagattattgtttgccagagaagagtccgggagtttggagggggtgaaagtctcgcgccatggtccagctatctctcatttgatgtatgcggatgacacccttttgtttgctaacgctgaccttcagtccatgacctgtttgtgggagtgtgttaataagtattgttcttggtctggccaatgtttaaatctctagaagactaagatcaccttctctgataacagttgccaactccttcgctcggagattgttaattccttcggtttcaaagagatgaatgaagatgagcagttcttgggcaatcctctttttattcatggtaattgtgtgagtaaattcaagaatgtcgtggataaggttgcaagtcggcttgaaggttggaaagctaagctcttgtcgcaatcggctagatcggttctgattcaaaacgttcttcagacggtccctatgtattccatggcggtgtttaaacttccagtggccattcataacgagcttgacggcatctctagacgtttctggtggactagagacactgggaagagtcgttacttgtctctagtttcttgggatagtatttgcaaacccaaggcttgtgggggtctcggattcagaaagtctggccacaataatatttgtcttctggccaaattggcgtggatgcttgctaaggaaggtgatgccctatggataaaggttttaaaagggaagtacttccctcagacgtcctttcttgcagctggtaagaaacaaaattcctcccttgtggctaggggaatatgggatgctaaacagttaattaaggatcatgccgcttggagggttagttttaactcttctagaaatctgtgggattgtgattgggtggtctttgatggtttgaggattggtcagggagatttaaaccccctagaatcgaagagtttgtttatctctgatcttgttgatcgggctaatggggcttgggacttgaattcgctgtcgttgtccttctctccaaagactgtggtgaatttccaattgatttatccttctgatctcgcctcccaggactccctggtgtggactgcatctccaagtggtgagttctctctgaaatcggcctattgggctctcaaggtgtttgttctccactgaagatcctatatataagcagctgtgggagagttgcttccatcctagagttaaacttttcctttggaaactttaccgagatgcattgcctactggttttaggttggcggctatttttggcaatgagttgggcccgtgctgtttgtgtgattccccggatgctaattctactgcccatctttttggggattgtgatgtggtcaagaaactctggtttctctctaagtggggaattagaattgaggcctttgatttgagcgatggaaggaaagtgcttcattggatgttcaacgctccgttcatcaaggatttagaggctcgggcggttactgagtttagattatttgctgctgtgttgttctgtaaagcttggttctttcgcaaccaagctttccataatggtgggtctatgccagtggagttgatgtccaaacttgtgggcagggaattcgactcccagtggagtcttctttcgagcaatacggatgcctttccttcgcaccaggttactatatgcagttaacagcacaggagtggagacaagcatacatacgacaaattatcttttcctatgaagagtactggctccacgtggcacttttcacgaaattgtatttttatttttagataaaaaattcgtactataatagtaaataaaatatcaaaacaaactataataatcaaattataaaacaaggtgagagaaaaataatttcactcctctaaaagtctatttaatttttatcaaatgaaataaagcagcgataaatttactacattgaacaattagtgatgtaatctccttcttcttctttttttttatatatggatgagatcctttaacttaagtctaatcttataaagaggttaattaaggaatttttctaaaaatactaaatttttggtaaaagtttataattttactgttacacggaattttttacaaaaattttatttttttataaattaactgtaaaacaacaaaataaaacaattaaaacaacacttgaacaactaaaaataatcgtagaacaactgtaaaaacttaatatattacacagtattttttaaaagaaaaacatagtattttttttaaaaaaatcagtcttacattaaaaaagtaaaaaagttagaaattctaatatatggtataaaaacctcttaattaatgggttgccatatttatggaattttttttcattttgataaatttagaattatttttcaacaatatatatctttatatattaaaagtgtctatctaacggcatttcttggtttaacnnnnnnnnnttaaaaataaaagaatattctattgaatttaacgattaggtttgatctc

SEQ ID NO: 14252 - DNA, 4623 bp, Cannabis sativa
acattaaactttggtagtatattaaacaaagttgtcaacataacataatacattttatttttgacataaaaaatatgacaaaattacttgaaagagtgatacccgtgggagtgattacctatattataggtgcccttgaaagagtaccgatagcaataaaatacatacattgtgggaaaagaaaaagaagcattcttggacgttcaaaaaactctagttgaaaaaataaacaatgactctattcctaattcctccaattcctttttaatctaatttctactttctttgcacttcactacggtcacaaggcacagtgaaggaaaaatgcaccaactataaacaaagctttgtacaaatatgtaacttatatttacaccagaaaagtagcctcacctgtaccgaagtagaagaagacaaggcctctttcctgccaatggaataacacacatgcagatatcagttccgtacaattaatcacgaaccagattcatgtgcccaaaaagcatctggatcagggcagaatagcgaataatcttcaatttctaagtttgcaatgtgccaatcgacaaaacgagcttgtattgtcttacacaacaagagaattgttggcaaaagccaccatttagcatcctccctgagggaaggttcaattaaaattatttaatgttaatgataagaataaaatagaaaatcgaaatctctgtgattgattggaagataagagattaaaggctcaccttctagtgttccatgtatttgctccatcaggaagttggatagaggaaaatccataatgacaaccaccataaatgaatgcaactgcctacatgggtcaaacactaaattaatcacaaacttaaaaccaacaaaatctcaacactagcgcaattccagtctatgccaaaacttataaaattcttaaacttaatgccaaaacttttacttctacattatcctaggtacattacaaacttcatcgtcttagccactctgcaataaggaaaaaaataaagatatcgtagaataggaaaaatgccagggaaattgagctgtggtttcagaagtgtgattccatcatgaaactttcaggatataactcattacactaaaaaattgcacacaattgaccaagtaaaaataatttcttaatcacacttgtcctcgagaaagcagcattagctttgcccgctaatgccctcaaaactatttcaggtcatatgcaattttatacctaccaaacatgagataaaaggaaaaatatgaaatgtctatggagggccataattccgtatattgcttctcactgaacactttgttcaacaattttattttctttactagatgtttctcatgtgcagtaaatgagcaaaaagaattcaacaaaattttgtttttcactaggaaaatatgcttcatgtgtgcagtaaatgagcaaaaagaattctagctgttgtcacaacttcttgtaacttacaatattggatagagacgtggcattccacaatgcatagacacgagcaagcgatgctcttctaggttccttactgaacaatgcattcaaccccgccggaaatggagaaagtagtgacaaaggaagaacaagtaagatagaaaggaatgctccaagagaaatccaatagaattgaagcaatgtaagaagggtgacaaaaagatctgtcaaaagcatgacagtgatcagcagctgcagggtttcctgaaagaccaatcaagtaaaaattagaaggaaaacttttaactggccaacatatattagcgcggcacaatcatttccctgagttacctgacgacccacaggtcttgtattgtgcaatattagagaaagtggaaagaggaagtctcttctgaaatccaatgatctcacagtagcatcgtttataaggcctccatttattcctccagtaatctttttaatagccaatgcatgacctatatatggcaagctttgttgtgactgcttagaagttgtagatcccgcatcactccttgcatacggaacaataaattagaaagatttagtcaaaacttatttaaactaatcaatatagtttttaataaaataaactaataaaattattagaaagataagacaaggaaaggcttttacttatttctctgtttgcataattataatataaacatgattttttaattaaaagttcttcagtgtttggatactcaacagaaaacagatctcttattagtaaatttggaattattgcagctaatttctctatgtagtgtcattaaaaaaattaaagacaaaaatactttagtagttgattttgttatagttaactacctatactttagtataagaattataattaattttatataggtagttaaatgcaacaaaatcaattgtatataatgaaactacatattcactttagctggctgtaaatacccctaaaattattctatttacaaaatagtttttcaaagtctaagaccctaacttctccaaaaaggacttttgagttaaaaagagacttttgccgtcagtttgtgctttatacatagttttctttcattgcttttcaccaaaaataaaagtaaatgttcattttatgtcttttccccatgtaatagatttcacatcatcagatcatacacatataagctaaaatacgcagattaccaacttcccaccaactaaatcataaaatggaaggacaaatgaatcgatgcccatcctgtttatggttgactgcacattatgtttgttttgagaattccaagttttacttcttaattaatatagctttaaaaattatatgataatattatataagataataagttgaatgagccaatttaccttggagtttcacaattacttctatcaaatacttcagactggtccatattgtgaagaggatagtcaccaactacaaccaatatcccgagctgataataaccagatgccgttgcttgaaaccatccaacctcaattctaaccccatggaactcaagttgagggttcgcatggctatttatccaattaataaccagaattaggtgagaacgaatagatccatgcctcactgttctcaactgaccatttagaccagccaccaaacgattccacacggttgctggaacatgctgaaaaaaattgtttcatattttatcatcagatataatagcccaatcatatccaacaaattcactcaaaggaataataaagacctgcccgatgagattggtcaataatgcatcactatggacattgtaaggtgccatatagcttccatccccgccaaaaattatgcacatggggaatcttttctgtataattggtaccatgtcgacacgcttctcatcacctccaagaaaaaaatcaatatatgctaccatcaggtctggtgttgctccaacctacattatttaccactccatgattaaaattaaacagtaatgaataaattcaccagtctatatctgtactaaaaattggatttagagttgactaaaagcagctgctaaaatgcccacaagggactcgaacctcagaccttgtgggagtgaaccacatgcctgaccatttgaactaccattcttgggtataaaggaatgtttctgaatacaacagaaccagcatggtttgactgagcaaaacacattctatgagtgtcaaatgcattctttgtgttcaagttgtcttatgcccatgaatggaaggcctaggcacttaaacaaggaaggatttcagaggccacagacgcctccaaaatatgaatgcaaatctagaaaatggtgattgaagtcttgtgaaaaaaataaatggaaagctaaattgcaataagtcaatttgttataagagccaagtagatgatgcaaaaaagaaaaaaaggaaaagaaaaaaaaaaaaaagccaaccttcattcctttgtacaacgctcgggatctacaagagcggagacatgaatggtcatattcagatttaacaaattcctgaagacgatgtactttacatcgccggcgccactgtttccaggaccaggcacaaggatatgcaagaactgaaagaatgctgtgaactgatccttcccaccaatcataagcagcaacagaattgaactcgtcaataaatctgttaaaagcatcttcatacctgttgcccaaaaaggattgtagcataaatgtaggacaaaaaaaaaacaaatcaaaaggatattaacacgattatgattccaatcttactggccacagagcatggcatggcatgccatttaactaaaatttgctactaaagtgtgtcttatacaacaagcagttcataatgattgttattgtagaaaaaaatattattttacacagaaagaccaaaaataaatcttctacttaaaatctttggattggaatataaaaacataagagttcaaatcaaaccattaaaactaacatcttatatgttgccattggccattttaggatttatttgcttacactatttcaatgattgcattaggaggagagtagggaagatgccatggttctctaaaagtattaggacccataaagtacatcctgtgaacatggctttgagcttcttcggacttggttcctcgaacctatgcagtaaatagtaatgattgt

SEQ ID NO: 14253 - DNA, 14622 bp, Cannabis sativa
  modified_base (8255)..(8267): a, c, t, g, unknown or other
  modified_base (10819)..(10828): a, c, t, g, unknown or other
gaaataattttgtagtcaaattttttctcatagtcatgtacgttataattatttaagacatcttgcaaaattttaaaaaattttaaaaaatttaacacatcgaaaatagcattcaaacaatttgttgcatgcatgactattttattttatacgcatgtgaaatagactctttgaacacttctttccatattttaaattatttctaatttctcaaaattttataagatattttaaataactataacatatacgaatatgaaaataaattgaactataaaatttgcctagatggaaaaatagatagagagtgcattaatgaatcagtgcatcccttttaagaggagcattgtaaactcctatttttagcgtgttaatttttttttcgaatttttttaaaatttacaaaatattttaaatagtcacaaggtagatgatcatgagaaaaaatttaatcaaaaaattattcgggatactaaaaggtgtatcaatatatccttttaaaattataaaattttcctataataataataataataataataagagattttttcatttttacactttaaaatattttttttttttttggtatttttacggaattccacccacacagaaattcttatagcaactaacagagcaacttaaatcgcaactaaaatccatatagcaacctaagtaaaaaccactagagcaatcaaaccgtaaattaaaaaacaataaaaaaaataatgtgggataatttccataattataataataataataataataataataatgaagataaattaagaagaagaaaaataaaagttagaattctggagaaatctggaggtagtgtcccgaaacttctttcctctttctctattcttctctctgtatattatctaatcaaagatcacacctttagggttttactattactatcttcattcaatcttctcaattcctcttcgtcttcgatttcttccttctttctcaacaactctctcattgtttcaactcaatctcatttctaattctagggatttcaatatggttggtggtggattcatgggtatggagaccaacactgtcagaactgccaaaatgaagagaaaggaagctgatgatctcaccaatgatttctccgacttctctctctcttctcccgccactaagattcgccgtttggtactttaccgccttttcttgttaaacttcgttcttcccccaaattgatttgattgatcgtttgctaaattgattttgattttgattttgattttattttttttaggatgcggagttgccgcctataatggaggaagaagaatctgttaatgttttccctttccatccttcttcttccatggctggagcaccaggtttaggtcgtggtcgtggttctggtggtcctgtaattcgagaattggatgccgttgatgatgattatgatgataaagctattgttctctttaagcctttcaattcatcaatttttcgtaactcgccttcttcaactttatccctttcagttgattccaatatcatatctggcttcaaaggtaaatgctttaaatgagtttttgttgcttagataaatctagggttttgactgtaattagcaactgaatctgatcattatttgcagatcaattaatcagagcaacaaaccagaagattttcagtggaaatgagtgtcaagccattgttccttggtcaccaccaactcagctgatcccttctaactcagttggagctgaggaggattcttctcatgaaccagttcatcttcaggaatcaatggaagctgaggaggatgaagaggataaggattccatggaggttgaggaagaaaccaatcagattagtgaggctggtggtgaggcatttagtgggataagaggagtagctaatgagggcattcatcaatggcaccatcaacagcattgtatgttgcctcagccacctcacaacatgtccactccaatcacttggtttcagtgagaaaatgacagttgaaacaagcttggtttttttggctttgggggattggataatgttggatatcattaacttccatttttgtgtaggataattgggagaaggaggagaggtgatgaatcatgaaacagttgagaattgaatatattttctttttctaagtttttggatggcttttgtcagtgaagaaagtagagaagagttatagtgtttactgtttagtcattcaaaactagaatcttgttaatagctaatagcaaatgtaagaatcttcctcttttccctcaaaggattgattttcttttttcagtcatgtatgatctgatgatggtattgaaaaaggcttgcacttgtataattgaaatggtttgaatggatttataatcttatttgaattctattctatacatttccaaatccaacatcttaatttaaaattcacactttcatgttgattttttttaataattaaaatattttttataattagatttgagttatagtaagacttagattagattcaaaatataaattagaggcatgtaaaaaaaaatgaacatgtcttataaaataaataaaattatcattgcattgagttatgttctgatgtcattacaagcaaaaattcaaataactgctttttatatatagcacacttgataaaaaaaaaataacattataaataatgggccaaaaaggaaaggtgaaaccagtgagaggagcactatatataatctcagtacaagcataagaattgggatatggtgatggtgatggtgatggtaatggtacaatattataaatatacttgtgcttgctaactcctaaccaagttacatcaaagtgttgaagaaagaaagaaagaaagaagctccatttgaggtctgagcagagttgtgtaagctttctttgtgatttaatctcttcttcttccttcaaaggttgaggcaaaaaagttaaagaacctatggagagttcctatttcaacaataagcaaggctttctcttcaatgaatcaaaaaaggctggaccatgaaaacttcctactggtttggctttggcttggctcggttagtcaccgttgacatatttcttttctgcatagtatttcttttcgcttgcggtcttcttggcattgcgtttctgcacccgaatataaaaagtggaaaaaccctttttagcaaaatctcaacttgaaagcatagacaagaatataagaggtgttatgattctattaccttgtaagcttcatgatttgccattatcctctgagctactgatgtagttgtaatagattttggactttcgagcaattgaaaaattcccatgctcttgggaacagcgtatcgatcaatttcatcctgtttcagaattttactttgttcaatacctatagccattttaaagtagattattatgttaattattgcaggtgaaaaaactcgaaactacttactgtcaacgaaacattgttctcggaaattgtcccatgtacaaccaaagagatattgaaagtagttatctgcaagaaaacattaggcatcagattcaagacttgtaacacatttcttaaactaagattcccgcctaatcctacaaatatttcgggaccagaaaactattgcaattgctatagtggtgctcaagagagactcgaatcacagatgcacatgagaaagaataagagaatttcaacaactaacagttgctctttatgtttacagatgcaaatattattgacaaagacaatcaaatgctcgagatacaaccgaccaaccaaagtattactcactcaccacatcttttgaaacttctctgggtgcaccgatgatgacttcatcaacatagcgacaagctagaacgctgagactgcgttcgtgtaaatgcatgattggatggtggttctttctgttttcactgcatgcaatatcattaaaaccatgtcatttgaaagactaaataatctttatatttgtaggaatagcggacaaagcttcatgatttcgggaaagagcatacctcacagtctggtcatcatgaataccgaccaacaaaaagtctccaagttgcctggcactctttaggatctgaatgaaaaataaacagtcaataacaagttttgaagagttgttttctccatgatctgtaattatgttgacttaatacaagagtgtaggcccttagtctcacattacaaaggataatcatatttagtgatgtgggttattttagagtttatgagattagtgaacaatcactaaagtagtaagccatttagaactaagtaacgaccgagatggggttttgaattgaatttgatttcttcatatcaaactagcaatatgttgacttttgcatactgcaaccaaatggatgacaagaaaagaaaagaataaaatataaaaaaccatacctcaacatgtcctgcatgaaaaaggtcaaatgctccatcaatgtacacaacacgagcattcggtccaggtccctaaaagcaaataagataaatgtcatcaaacaacttgatcttatggaataatcaaacatatgatcaaattgttttggaatatctaaaactaacatatgaccacacttataatgagtatggcaagttttatctatacaataaaagcataaaaacactattacattactaaactgaatgaacataccttcccattagagaattgaacaattcgacgagatgttggtagaaactgagataaatgggtggccttgaactgttgttctttatgcgaatctcctttcaaatgggtactgttatgatcttcagtttcttgcttatccctcgaacaagaaagtatccttcctacacgaattttatagaaagattttaagatgcaaaatttaactaagtataaagcattcacactgtgcatgcgcctccataatgaagaacgaagaacgaaggagcttcttaaatcaacttgaaataatggttctaagaggggtaaagagaatcatagtacctacaatatctgtgctggagacgccttcggtacgtttaatctgcttgtaacgaccagctttctttgccaaggcataagcatcagttccatctggaagcaagcaaggatcatccccatgtatgatatagtcaatcttatgctcattaaagagtctattcatgaactgctcggtaattgcataaggagcgttggctatgacttcgtccacccattttaatccgctaacaagaaccaacctagaaagaacttcaaaattagttccaagaaagactaaagaacacttagcagcaaagtcaacaagcaataacagcaaaattttcatattattgtaataaaagcaaccgagtaagacaactttgagcacactttcaaggcatattacaaaatatataacttaagcttgttttgtaaaaatggggaactgaaatggacaattcaaattatgttaacaataaagtcaaagtcaagtcaatggacaaaataaaactaacaaatgtatgaacaactacctctcttccatggatagaacagggggacccttattggcaataatctcctcatcactgacaacaccgacaactaactcatcacccaaagctttggcttgccttaaagcattggcatgaccataatgcatgagatcaaaacaaccatccatataaacccgaatgcgcttcttttcacgtttcttcttatagaaaactcccatatcagaccacaagtatggcaaatgaggaaccccaattccgccgaaatagcttgttgataatcccaacaaagcagctgtgagcattagaccaccaaagagatgtgggaagttgtaaaccccatccaatatccaattgttgctctcatagtccatggttccacaagagccttgggagtgaagagggagacacagaattctgaagagaaaagaaaaacaagttataatttgcaataaacaaaatgaatcatcatagcttttgttcaaacacaatttcacttttgcatagcaagattttatcttaattagtaccaacaacaacaataacaattgatcaaattgaactaattcgatctaaagatgaaagaacatcatataaagaaaacgataaaaaaggagacaacaacaaacgatatttcagatctgaaaagatgggtagaacagaattcattggccaaacattacccatatcataaaaacaagaatagtaaaagacaacaacttcgtaaaacacaatgaaggggcattaattaaacgaacatggtaagcaatttccaacattttcaatcaaaaaaacccaaatgaaagctctgaattctatgaatctgaaacaaccccataaataaatctacctcaaagtttacttctttttccctgaaaactagaaccaagcaaaaaaagttgctaatcccagaaaccaaaaatcagaacaatgaaaaagatggtacctttctagattattaacataataacatgaaataatgtgaatctgaaaaaagcagtaaaatgggaaaaggaaagataagggaaaagggggaatagtaagaaagaaagttcgtatctttcttacctattaagctttgttctcgtttgcgtctcctccttcactctttttttctctgtggcaggccttaattttggaagaagcctttcttaacttgacatataccaccaccaccaccatctccttttcttgccctctttatatatatattgctataaattaattttatatatttattaaaattaaatgaaagtcatttaattaaagttaatttgaatttttgtccccaaatattaacatgtatcaaattatgttcccgaatttttaaggtcttaaaaatcttccatgaattattgaaattgttggatctgagaacgtttatctaattttagtaaagaaagtctaatgtagatgaaaattaaagaagcataatagtacttaaacaatcactgaattagtaaaattaaataaaattagataaaaattcttaaattcaataatctcaatagttcatgaaaaacttttaactgtacaaaaagttcaaaagacatgatttaatatatgtcagagtttaggagacaaaaatcataattaatttttaattaataaataatagagaatttcatttatatctcacaaattataaatatataccacctctattgtgtggtgtacacttatagggattgtctttaccaacatcttttcttatttgggtcaaagctaaacccactctaatattaaaaaaaaaacaataaacataaaataattttaaaatttagttttactatttttttaaaattttctttattatattatgttagtttcaatacttattttaaatttattttaataattttttatttgaattatgtataattttcttttttaataaaaattcatataatttttattttatttgataaatatattcctttagaaaaaaaattaacaaaaaataataaactattaaaatgaagtatctttaaaaaaaaattataaaggatatttatagtatctaacacttttatgagatatgatatcattattagtgcaatttaatattaaattttatttattttaatttaataaatattatagaaaattattagtcaattataaagcatcacctcgtaatactgctagacatattagcgtcttagtaccccataaaaatgctcgtctttataaattttgttgatgcaaataaaactctcaattaataaaacaataaataataaaaatatgtgctcaaatataattgtttgactggttggttagtgatgatgccgcgtgtagatgcctaaactaaagtgtccatttttattttggtgtgtgaaaaagatttgagctttaaatttagatgggtcctcctactcctacctatgctatgctatgctatgctattcttactaaaaccatgaaagttgtcaactttcaaactttttgggaataaaaatcaaaaagatattttttatttttttatagtaatggaatgggcataattttataaattgggagtgtcccaaaaagaaagaaaagatgaatagttaataaaaaatagcttaaaaattttagtgggtaattatatactatatggtaaatcctttaaacaaattttatggtatatttgatatggaggaacatttgtagtttaattttattttcatgtatatattatagttattttagattatttttaaaaattataaataatttaaattataaaaaataataggggtttttttatttttacactttaaaataattaattttttttttttacatnnnnnnnnnnnnntacatagaaactcctattgcaaatagcgctgcaacttaaattgcaacaaaaaatcgtatagaaactcttattgcaactagcgttacaaccactttagaacccaaaccgtaaatttaaaaaaaaaaagttaaaaaaaatagtatttagggtaatttctcaaaataatatttaaatattttgagtgataaatctatttaaattttattttcggtatcataaattattcagaatttaatgaaatttatatgtagtttttattaatacagatttttataggatgaaacaatggcttttcttattatttgacaacacaacatcatgcccttttactttaggtaccaaagtctacacctttattcaatatttataatagtaattaaaattgtataattaatatataatttttgttagatattttcttagaaagtcttggaagaaactcttttaattctcacaagtggatgattattgtggcattgtgctatgacactcaacaacacttccaaacttgtggtaacgtctcatcttagcccttcaataaataataataaatattatatatttatttgtagtatataagatatttttgaaattataaaaaatgatattattatgttttgtcaatgttatatttataaatatatcatgaaaatgacctattcaacatcatatatgtgtgtgtcaattgcttaagagaaaaacaaaatataagtttattgagatgagaatagtttatgaaaatagtatagatggtaataaaatataatatacatatatgtaaggattaataaatttaaatttgtaaaaaaaattaataacattccaatgcattattattattattttgatgaagaagatattaaaagtgaaatgctaaaggatactcgtggtgtttgtattttaatgaagtgcaatattattattggtacaatttaatatcagatctcacttatttaattttaataaatatttataaaaaattactaatcagttataaagcgatatttcatgatgtgtgcttcatagtgatgctcgacataaaacaaataaaaagcgagctgtagcgacaagagatactacctttctcgctgaataaaggaataaaaaagttacatttcgtaactaccctatgaacgattagcattaaaaagtttaggaatccaacgaacagtgaaacgagaattggcatccaacaaaccaaatgaaaaatagattagtctattctattcccctaactaattatgtctcaattcaaattgttgacaaaagttgtgttaaatatctaataatagggaataaatgatgacatttgaattgataaaaaggtaggtgtccccaaccccatggaatgataaaaaattaccatgttaaattaaatttattggaattttcataaataaataattaaaaacaaaaacccaactcatgcatgagatgagatgatggtatgctaataatgctaatgcagccaagattataccacttttacagctgacaaagctcataaaaggcaaatatatatatttatatgtagtataggttggtaacaaagagaaatacaatataatactagaattagaatattccactactacataaattcataaaaaatataaggattatttcataaatacataaaaataacaaaaaaaattataaaaatataattttactgaattttaaacatttttacgtttttttttttatttacagaaaatacagtctttatatgttgtactcttattaatttgttgttcattttttgttatatgtatgttttttgttgttgttttgatgttatttagatgttatttttatgtagttttcgtgttgtttctatgaaaaccgtaaaaatgtaaaaaaaaattctgtaaacgtaaaaatgtaatttttttttataaaaaatggttatgtaattattcatacaaaaattggtaagttagtcattgaacataatattttttattataaaaaattaattaattttattttcgagatcttgcaccaaaaaatttaattgtattttttttattatatagtgatatttaaaatatagtatattagacattacatgataaacacaaatttaaatgtgagttgaattgggccatatgaaaaaaaaaaattagacccttattataaagataaatgatatttttaaaaattattaaaaaatatgtatattttttaaaaagtattttttttatagttaaataccattttagatcttgtgttttgcaaaagttactgattggaccctctgttttgttaaatgacaaaatagatcatgtattttctaaaatggtataaataggatcatcagcttaattttcaacaacttttttattttaatataactaacttaaagacaattcataacacgaacagatacaaaaaatgtaaacagttttgtcataacacatttagatcggattattattaaattttattttgacaaaatatcaatttagggtcctatttatattattttggaaaatacatggtccatttatgtaacaaaacagaaagtccaattaataacttttgcaaannnnnnnnnncaaaataatatttaccctttttttatttgagcctctaaaataagtgggccgtagacagaggcctaacccgcttatacctaaagccggccctgtgtggtctacacattacaacaccaaattaagaaaactaaaaaacaaaaacccaaataaaacaatacatgatatgacgaggttcaatcaatttttcgaaaaacaatacatatctttgtgtgagctactaactctttctagctcacacaaagtttctcttattatttgtgtataacatgactcttatgaattaagagtctatgttatagttataaacacacaaagaactaaattaactaacataactgtcaataacaaacaagtatggaaaagagttgtggatctgaagccccactaatgatagcacctttgcttctaacatctaaaatataatccaaagctttttgtgtaatagtctcaccaggtatcaacactggaatccctggtgggaatggacatataagctctccacaaacttccccaatgcacttttcaatgcttacttttctcttctttctaaaaaaggcctctcttggaatcaaacttgttgtaaaatcagcaaaaggtgcacacacaccatggctcataggtgatgatgatgatgatgatgatgatgatgatgacactatcttctttaggccaaatactaatctctcaacatgttcttcacaagttccaagattaaatgcataagtaattgatttggttccaacaagctcagagataatgagattatctctgtacaatatttcatctgcctcataaccagacatgtttagttgtttaaaaccaatggtgagcctaaatggatccatagatgggaattttgggaatgtttgatgattcaatatggaaatttcgggtatttttcttatcgaatttttggcctcgaaagctatttgcattgctttgtcaaataaggctttcgggttttgagtaagttggtgtctagctgcatctaatgatgccatgagaagataatttggactagtggtttgaagcactctaaggcatctagagatagtttctttatctacaagatttccagacatgtgtagcattgatgattgtgtcatagagcaaagaactttgtgtgttgattgaaccgccaaatcagctccttgttgaagagctgatttgggcatttgtggatgaaacccgagatgagccccgtgtgcttcatccacaattagaggaataccatgagaatggcacagttgagaaatctcacttatgttactgcatattccatgataagtaggagaagttacaaagactgcagccggttttcgaccttccatttccagttcctgaattgccttctccacctgtaaaaaaagctttattttcattaaggtcggtcctgagaatatatgggcttaaggagatttaaattttaaggccctcacttttgaaaatatatgaaaaaaatataagaaaagagtgtcatgtaactcgaactattgtgtaatgtgtcatacaccccaactaaccaagttaataatattttttgtttacaatatacttaattttacttaaataaaaatctaataaagtctttcattttttattttaggcccccgaaaagtgtgagtcctaagcacaagcttagcttgtctatgcctagggccgacgctgctcctcattatgctaatacccttaccaataacattattgttgttgctcatattgtgtatgaaaaactaacacaaagaacataattaattcatcaaagcaaagactcacctgtgatggagtgaccccacctgcaatattccattcaacatcatattcaggtatgatgtacttaggtactgcaccagataagaccataccagatatagctgataaatgacaattccggggaaggattagatactctcccggcgaacatgtagccataatggcaccatggattccacaagtggttccaccaacaagaaaccatgtttccaatgctccaaaaagcttggctgcttccttttgtgcctctaaaataggaccatgtggagaagtaaggttgtcaagctcaggaattgcagccaaatcgtgtataaatggttcgagaccaatgagttgagttaatgcaaatggggcgccacgacctctgttgtgaccgggaaagtgaaaagttgcagcattttgttgagcttttttcttcacagcaccaacaagtggaggaagattgttatctatttctattctaactttgttgtgtttttctatatcacttgttttgtgttgcttcttgcttgactcctcagtttttccaccctgcaacaagttatgcaaggacaacaaatttaacaaactatggagcaatttcatgcaaaaaaaaaaaaaaaggatatcgacaaatcgataccaaacatgggctttcagcttgaaaatataaatcgggaaagaaatgtatatgtatttcagttatttacaatatatatttataattaaaagtgatatattttaacgtagtgctagttttggtacaatacttaaactatctttcacaagagtactttttatattttttaatatttaaagtttacgtttgaacatttaccaataaaacttgtatttagtatcttaattattgaagttaacttttgttattttttttattttaaattatatttaatgttataaaaatataaagttatattaatttttaagatgttatatcatgtaaaaaataaagtaccttccttcccttacaaagagaaaaaagtagttgctcctcaaattaaatcatgttatataaattttattgagctctattcttcatagtactaaaagattgttattgattctaactttgttttattttcttttatgatcaaccaacaactgtaaggagaaaaaaattaaacaaattgaatcaattaacaatgaaataatttgaaacaaacacacctagaataaatataagagggctaagcctgtgtctagagcccacctaacttaaagactcaaggaaaaaaaagatttgtcccattaaaattacacatttttttattgattttgaaaaatatcatattttttctctaaataaaggttcaaaaatattttttttcttataacacactaaatttgaaggttgttaagaaatactaggttcaaccaagcaccaatgtagtacttgtctaatccttgttgggaacaatggtttggtcttctttattgatgaacaaagcttagaatgagagaaattaattaaagagtaaacaatctctttaagaaccattcttgaactctaaactctctgattttgcaacctgaacttggtgatagaaattcacttgtctaatccctaatgtttgtaaccgaaataactaataagttgagttggccaagtttagttaagttggtttagattttggttgacctatcaaagtaacaatataatattataatgtgtacattaaagtgggcaatcttaagttatagggcaaaaattaaaatgggccattttttgaggaaattatattgtatatctattttactttatttattttattttttacctcattttttatattttttaaaatataccacttttataaatgatgtctctattagaccccttaggttaatgtaaattatatgctagagttaagtagagagtgaaggtatcttgtacaacccactctaaaaagtgggtatattttaataaaatataatatgagaatatttttaattaatgatacaaaaaagagagatattttcatcatattcccttcttttataatgaagtttttttttttttt

SEQ ID NO: 14254 - DNA, 8398 bp, Cannabis sativa
  modified_base (32)..(35): a, c, t, g, unknown or other
ttaacgaccttaaaagtttagggggcatgatnnnntacatgtcaaagttcaagggcaaaaattctaattagctaaaaataaaatatatattatattaagaataaatacaaaaatttttttctaattttattaaataaagtctgatgtggacgaaaatttagaatgtgcaatttggtacatgttaaagttcaagaatcatgatttagtagatattaaagtttggaagcatcatttggtacatgaacaatcgccacaatatcaaaattaaatgaaattggacaaaaattcttaaatataaaaattttaatagttcggagaaaattttaatagcttgagaattttaaaagtcataatttaatacatgtcaaaatttaaaagataaaaatttcaatcagccacacaaatatttgaacataagaacgtaaaaaaattacaaaatagtgctttatctaattatttaaaaaacaaaaaataaaataagtttccatgaggcggaggagtgagtacaagcatattgagctgggctttatctatatgggcctcctaacaaatctagcgatggcccaatacgtttaggcccattaacatttaacaacaacgaatataatatgtggcggaaaaataactaccactaacagcttcagcctcagcttcagagctttatccatggcgagcttaagcttcaactcttccacactaagaaccccatcttcgtttcaatctcaaaaacccatttccaactacacaaaacccattaaaatcccattcacattcccctctaaaagtcccggaagctggccaaaactgcgtcgtttcgggggttcgagaagctcggtttcgataaaggaagaagtggaaattgaagacgaaaaagaagaagaagatgatgatgatgatgatgatccaactgttgagctttgctatctcgatcctgaaacgaatcccaacagtcttactgaatgggagcttgatttttgctcaagacccattcttgatataagagggaaaaagctttgggagcttgtggtttgcgatgaatctttgtctttgcaattcactaagtattttcctaacaatgttattaatagtattactttgaaggacgccattgaaggaatcagtgaagatttgggtattcctttacctgataaaatacgttactttaggtaacaatcaaatgtgtttgtgttgttagggtttttgtttgttaaagttatgatttttaatggttttttttttttttttctttttgggtttatttgattacaggtcacaaatgcagacaattataacaaaggcttgtaatgagcttggtataaaacctgttcctagtaaaagggtatgcatttatagctttgttttgtttgaatttatgttatgttattatgttgtttggaagatatggtaatattgcaattaaaggaaaatatatcatatcaagtgataaaattttggtgtaaaatgaacacaatgagataagtttctaaatgaaccattttaagaagctttttgttacactatgaaatagtgtaggggcttattagtaatttgaaaagggtgtgaaggattataaatatgtaattgtgtagctactgttggatatggattgaaaaaatagaactttgattcaattgggagattgacattgcctccaagagtgcatttggagatttgtactatctcgaagaggacctattacttttacttttagtttacttaagataagtaaaaatttccagtgttagtgtttgaataactattataataacgattctttttattaaaaagttcttttcaaagtgtagatattatttaaaaaaaaaaaattgtgtgtactatgtaaattattttaattgtaaaataacttctcaaaggtctttttgaaaaaagttttaaaattaaaaatgactttgtattgtatccaaacacctttagaaagaattttttcaatagcttatagaagctaaagacaaaccggatgtgttgaaataagtagaaatgtagaaaaagaggtattgaaattagtgtcacaacctatcaagttagctaacttggagtgagattagctaaaggcatagtgaactttgtatggtttctttatattgtttaacattcttatggttgtttgtttcagtgtgtatctctgctgttatggttggatgaaagatttgagactgtatatacgcgtcatcccggctaccagaaaggagctaagccgcttcttgcattagataatcctttcccaatggagcttcccgataatcttttcggggatagatgggcttttgtccaattacccttgtcaggttagaaaatttactccttttttctctctgtgattgaaatcaattctatgttggcatgttttctttgtactgagcttccttttctttgactattgtctgttggtaatactaatatctgtctcatgttttcagctgttcgggaggagattttatcgttagaatcaaaacttgtattcggttcaagcttagatttggatttgttggggattgaaattgatgacaacacaatgataccggggctggctgtttcttcttcacgagctaaaccgcttgcaggtgcatactctgttctctgtaaattgctggcattttcttgatacaaatttgagttagaaacaattttttaactgaggaatagctcaaatggtcaggcacgaagttttctcctatgagctcttaggttcgagtcccttttaggcacttagataggttacacaccattcggaaacaaaaccaaacaaattactatcgaaatctttactcattttctcacatgccctgcccatgtactattttgtgtggtttgattatgtctttctctgcttctgcagcatggatgaacggtcttgaagtgtgctcgatagaagtagatgtggcccgagcttcgttgattctttcagtgggaatttcaacaaggtatgtgtatgcaacttacaagaaaaacccggtgaccacgaatgaagctgaagcttgggaagcagccaagaaagcttcaggaggtttgcatttccttgccattcaagaagacttggattcagatgactgtgttgggttttggcttctactggacttgcctcctccacctgtataatatcaataatctaagattacttggaaaacaagaaaagttcaaccacaatcacaatatatttgtcttctcatgtgtattattctttatattcttccttcctggtacaccaagaatgggatggactcatatctaaatgcactaaatgcagcttatcctattggacaaattttgagaaattaaaacttaaaaattaccaagaaaatgtaaaaaaaaaaaataccgcacatgggttactcggcatgctcgtaaacaatatgattctactgcaaagttgtgaacacccctattgagaccacccataagaccctctttgatagccaacaattcaaacattaaaggggtgagttcctactgtattaccatggcagctacataagtgaccttgctagtaaaattaatttttgctaattatatatttaattataattaattaattttaaaaaataaattttaacctatataacacgtaaaaaaacatataactattgctcacctataatatataaatatatattatttctttttttgaaaaaatataaatatatattattaattttaacattattattaaaaagtatattaaaagtagatatggaagactcatattttatagcagtgacaataagataagttaatgtaaaggaagaagatcattaaagttgagattaagcaattaataataactaaaaaatcttaattttacatataataaatttatcaatgtagagacactatacttaaagatatcatacaatttacaatattattattgggcttatactatgctgataaaaataaatattaaatttatgtcacttacaaatttaaaactttaaagtacttatgtcactatttacttttacagaaaatgcaaaattagttttctctatcagaatttttgtattttagatagagaactactaaaaagcaccatcactattggtgtaattaagtatcgagtccctaacttaaaaaaataaattttaaaaaatatcactaatcaatcgtgaaaagtgacacccctttttcagtttcatctctccatgcgacaaagaggtttgtacttgccataattaaaggcaagaataagggtacataatcatggcattcagaactcaaaaccataaaatagatataaggaaaaaaaaaaaaagcacaaggtgtatgaaagcattaatttcttaagaggaaaaaaagtgtgtcaatgttcctaaatcaagccattatcttggccgatctcacgtagagactatccaccaccttgccaatgttggctaaagtttccaacgtggccgggtatatggcatcagtcttgccatcttcaaaaattactaggcacccagcaccttggtccaaagtccctgcaaattttttgtccaaaatcatttgagataacttcttctctacgtgatcgattggaagttcgatcaactcagcgatatgcccaatctcaactcgtgagaatggctctatcagcctgcacaaattttgctccaagagggtgtcgtaaagcgatgaaaggtgtcgatgaacaataggatcttctgataactgacccttgaaatccccaagggcagtctcaaaaagcttcaaagagcgttttgagtaggcgtcggccactgctttcatggcatccaactcaggcccaacatactgcaaacctgcttttgatgatattactcctgtaacatcgtcagcctggttcaccatgattttacatagaagcatatacttaaggctatacacagccctactatcttctaaagcattaaatgcttcgaaagcttcaaagaagtaactgtacgctgttttgtagtctttttcctctgcgtgcaggattccactctgcaaatcaatagttccctgctgagctgggggaacatatatggcattagccgctgttctagctgctgtgagggcagcttttgccttaggaagattcctaagggagaaatggagcttactctctaataggtctatgtcaacaagcaaaagcttgtcatccagtcttctgacttcctttaccaaacccgaaagaaggtttagggcctctgagtactccttgctctccatcaaaagagctgcaagcctggcctccactcgctgtcgaagaaaagttcgtttctcatcacgagtccactgtaccatttctttgcatagagaaatctgaagcaccgctgtgcctggtatcttggccactgtatcaatgattccacgaacaattttcgcagttttggccttgggaatcaagttaaagaaaggcctcagttgagttagaaggttcctgaggtcctcagcacggttttcttgcctgagaagatccgaaagatttgtgattgcctgttcctttatccgcagagcatcagaagatgatgatgggttttcaagaattttatagagaatagagatggcttcagatggagccttggcttctaaagcctgagcaatcgaatcggtagtggctggtagatatgatgaagccattgctactgctttaaagtcactcgacctgcaatgataaagagacaacatacaaaattattgaaattaacaaaactataatgattagcaacacagactacatgccaagtactaatcatttcaaagctctttcaccagtggtgcagatttgattacttcctataacacaaaactactatggagcagagaataatatcataaatacaattaaaattcaacaaaccccaacttcccagatagctattcaaggtccacaatttctggttttcctaagatatatgagagtattagaagggttttggagagagaattgtatggttaagtgagcaatagttgttgggagagcactttctcctcatcatctatatcgatgtaccattcactattttcctataattgatactgttcttactaagtttacaggaaattcatatcattcatatcacaataataaattatttacctgaatcaaaagattgatatatttctatgtcctctaatactgaactcctcaaatttatagtgtttctgtcataataaaattaaatctcaataatacatcaaatataaatttgacaagatcttttaaaatgagaaaaataataatctttacatagaaatgaaatacatatttagatgatataaggtagaaaatcaaagatgagagctgttcagacagtgtaataactagagcaaccacccaaagaagtttaaggtgtttattttattgtctaaattagtgtgctgagaaaaatggaaagggaaaatgtaacaacatacctgtatcgtggatcatctagacgaacggagaataaggagaagccaacggcagcggcgccggcgacggcgactcacgattcttcagatcgtgtttgttggttttgagagagaagatcgtatttgctgaggaaggagaaaagaggcatcaaagaatgttgccctaaaattattcatgggcttggcttgggctcaaaatctatgggcttaattaattttgggataatttcaaaaaaaaaatactagaataaaaaaaatgaggaaattatactttatactctttttatactgtcttcttttatttttattctttttttaaagtctattatttttacctctatttttaaatattgtaccaattttgcccctatcacttcaagatactctctatgtgactttcttatatcagggtattttgagtacaatacatataaaaataggtatgtttcaattaaatataaaattagaggtaaatttgatcaattgataaataaaagtggtatttttcaacttaccaaaaaataaaacaaaaatacggtctgtacggttttcaatttttttttacggttttttagattttatttacttaaaatatagtcgtttgatgtatttttatattgtacttttattattttgttactactttttattatttgtatattatttttatgttatttttttatgtttttataatactataaaaatatgtataaaaaaaattgaacgtataaaatgttaacctttttaaaatttatattttatgtaattatactattaatttttacattttacatcctatttttgatccaattattaaaaataacttggctaagttttactaacctcttttaatgttttttatttttttattgtttggtatgtttcaatggcttaagaaactatttagttactaatatagtaattagttactgatatataattttttaaatgttagttaagatttgttggggttagtttatagttgtgattttatatgtaatatttattacttttgttgttgtaaataatcaaacatcgctattctctcactttctctcaactcccgttagagtttttctctttttattttgggaaataatagtaaatgtccttaaattataggactatgttagtaggtgtcttcattgcaaaatttgtagcaaaatgatcctttaaaattatttattatttatattgtcttttgccatataaaaaaaataatattttcttttagaattaaaagcaaattacttaaagattatggtatatctatattagttttgttaaaaaaaaaatatttgaaagttatgttgattttttttaattttttatgagttattgtgggtagttggtatataaattttgttgtacagtatatctctattttattgtatagtattattattcttagatgatatttattttttattttgttatgtataatagtagtactatataattttgttagcataatacaaacattttaatgtacgtatataattttattggcatgctacatatatttaattgttatttttatatattttaattgtatgatatatgtttattttaggtaatattcaattagtagtcgagtttccgaaagacttttgtcaacgtaattttgtgccaaaaatggcaatcatttgtcggtgacatcatgtcgcgacaaaagccatattttttttttgtgccaacagagcatcggtgaagattcatctttttcagacgtaaaaatacgtcagccaaaagtgcactgaccaccgacaaattatggtcaaaaagttgacttttgctagcacatgtacaaaatgcatcagtaaaagtcgatttttttgtggtgacaagtagttatttcaatcttaagtttggctattttacgatttaatattggatgtcacatattttatcctaataattgatattaaaagggaaatttgaatttctatacttacaataccttaaaattttatccctaaatgcatagttattaaaattagtcatatatgaccacattactaat

SEQ ID NO: 14255 - DNA, 3561 bp, Cannabis sativa
acatgagttaaaaatgaaagtaaaattaaaataagtattaaaactaacattaaataatgtgagaaaaaaatttaaaagaaatatcaagagtaatttttaaaaattatttaaatttatatatatttttaataatgaggtgtatttataacttgatgggtgcaaataaaatctctcgtttttgatagaatctattccactacggttgtggtccttgtggatcacctaatttcatatttgtcaacgttacacaatccaatatttctacacgcgttttacgtataggatatgtttttataatttataaatacagtattaatttttgtagttactgaatttaatatgcatctatatatgtatcgacaaaatctatgacgttttcatttattattgagaatatatgacatattatatcattctaaataatcatcttcagaaaataattcaaagctagcttaattaatcaactatatatataaataaatgaaaaaaagacaaacaaaaagatcagatagttgaaatctaaataagcatacaatatatattatatatgtgtaacatgtcatattaattagttaagttttgtaatatataaatatattattagagcagtagttgttcacaaaaataataattatatatccattatgtaattttataattcataagtatttttttttaattactatgtaacatgttggatagcattattagtaaaactttgacgttgaatgggtctgctgttaattgactaaatctaaaagtgacatgtaattaagtacgataaaagggacttgccaattttcagtaaatacgacatatattcatcaaccatgatatatattataagaaagaaatatatattatatcgatatatattataagaaggaaatatattatatttgctagccataattactctaccaacgccatatatatacatactgtgtataataatagtaatgatacgcatgtatacgtgtgacctatcatgtacaataataataacaaaaatatattaatacatgtggcaatgtcaatggatgatccatgtattttatggaaaatatgttggcttgaatttgttgaaataggaaaattattttattatgtttttttatggttaataggtgtaatctagataattatgtgagtagtgatttggttagttcttattctctaggagatagtgggatgtggtgcatgtttacatgttaggtaattagcggtcttattttttagtgtaagtggagagttagaagctatatataaaggacttggttgtacgaattgggtgtgcaagaaataaagttttattagttctacttttgttctccatatatatataagcatatatatatgaaaaaaaagaaaaaaacgagtgagatttaaaaaaaaaaaaaaaaagagtgggagtgtaagataaagtacatatatagtaaaagctatatttttcaaattcacttctacttttgttttgcagcagcaatatggctgacaattttgttcaaccggcaattcctcgctttgacgaccactatgatcattggagcatgttgatggaaaattttttgagatccaagaagtactggcaagttgtctctgaaggagttactgaaccatcaatcggcgcagtagtgacagatggacaaagagtggagctagaagcacaacggttgaaagatctgaagtggccacttctatggatacactcttttaacttcaattttgacaaccacttgaggctagctcaagtggccataggtgggtgtgtgagtgttggaggtcctaggttcgagtcccagataaaatatgttgtaatatataaaggtttaaataaaaaataaataaataacttcaatttttacaaaattcgtaacgttccaacaaaacaaaaggagtagaaaattcccatggcttcggcgtacgcgaaaaatgtcccctatggcttttggatttttagaaaaattgtagccactttttttagtttttgttttttatttaaaaaccgaagttgttgttcccacttttttattttcatttgaaatttaataattctgattttaattatatatatgttttattttattaatagatttaaattaaatataaataaatattaacctttataaataaaaattaaattgacaattttttttttaagaaatcaaattgatagttaaataataacattcacaacattacattactctaagtaatttttattatacttgtaacattcacaaattactctaagtcgagttatctaaaaaagaaaaaaactcttaagtcttctattatcgtaaatgtgcaaaattatttttttttaactattcttgctgtaatggtaatatatttttttttctcattgtagaccaaatgctccaaactgtaaaaataacatgtaaatattattatattaaatagtttgttaatataacattaagataattaataaaaatttacttttccgctatttatgaaatatttgtgtgtattttaataaataattaaaactacatcctaacaacctaaaatttatctcatataatagagaataatacaacatcaatatctttgggaggttggtggttcttcaaagagtctaaatgtacaattttttctgccataacaatctccaacattttgttctgactaaatacatatatcagagagttaaaatattttcaagtgaactaattttaaactatttctagctattttcatggcaatttatctcaggtttgtttatttttttggctctgaattatatattcttatcattttgtttttttgttaaaatattaattatcataacaattaacagacggtctacaaattatatattcttatcattttggctctgaataataatgtcaataatttcaaaaatatacaaaatattaataataataataataataataacaattaacagacggtctacaaatttgcttgcatgaattcatggtcatcaaaggtcatatttttttgttaattaataatagaaaattagaaaaatgtggcatatttgatttcaaaatttgcagggacgtttaatctctatatatatgaattttctacaactgaatttatataaattatagtaatatcaaattactgtaacattaaaaaactgataaatttctcatgtagatatgtatacaactataattatatatatacacatattcgttgaatgccgcaaactgattttttttcttaaaatatatacacatatgtatttacaagaataattaaatattgtgagaaactaaaaaatatattataaagttgacagatgatatgataagaaagttctcataattagttagctagccgccttaaacaaaaaagatttcaaacaaataatagagatcagatttgcaacgcactatctttaaattttggattattactcaataaaatattttagtgttggccttggccaatatatgtacatacaccaaaatttatgacttcttttttattaaaaaaaaataaaaaataaaatacagtactctaagattctgtcaacctatattatacattaatatatatata

SEQ ID NO: 14256 - DNA, 5227 bp, Cannabis sativa
  modified_base (2805)..(2812): a, c, t, g, unknown or other
  modified_base (5177)..(5186): a, c, t, g, unknown or other
aataatgttgtatcattaaatacattttaaaataactcgtccctattaaatataagtttgatagataatgttctaactcgtgggctgctcagtcttatgcgagacaatataattactatcaaactggtattgacgagatatatatttgcctcaggataaaatcatttacatacacaagaagaggatactctcctgcacgagtaaattaaatgtagcaacacacaactgcctcacattatacatagcgacaagatcatcgtgcattgcaaataccaataaaggaatacaatgaggtgaattattttccaaccttagcgattttttcctattgagatgggcagaaaggagaactcatatctgacgaggcacaaccttcaaagtcagcaataaccgtctagaggatcagaataaagaacgattgggtagttattagatattatcccatgtgtgattaaatgaaatgtggggattgtccacgtttcatgaacatatatgaatgaaccaatcccaaaaagaataactgccaacctatattcctataaataggggtagaatccatagaaaaaggaacaaaaaatttgagagaaaaaatattattattcaaatactgatattatactttgtaacccaacttatcctccaattctagtacctctgggagctctatcaatgatgtttcaagtcattgcactactcccctttgtctgctggatacaagtcagcccctcgtaggattgccaaccacctatttactaggcaccactgcctcaccttccaccaaggtcactaagaagaaagaaaatgtaggcacaaaagactctttcaaaaggctagcggttacggttgaaggtgttactcgtaccattgtcaagcgagctcagtccagccccactctaataataaacaaagcatctctatatgcagatacttctcataatcaggcttgccttgtaccatgaagattgttagttcgaatgcatgttgtcctgggagtgatcatgcatgtcgaaacctctcccaccttactaatatttgtaaccctaaaattttgtttattattgaatctagacatactttgggtactttagacaagtttaaggctaggcttagatttcttaatggtttggaagtaggtggaatagatcagggagggggtcttttgttgttatggaagttggatgtaattgtcactcttgtcaatcaatctaccaatcattttgactattatattttctcttcctcctttaacaccccctattttcatttgacttgtttttatggtgctcccaatcatgtcaatagacctcatacgtgacttttacttaaccatattggtcaaaataatccattggatccttggatgattgttggtgatttcaacacttttatcagtaaggatgacaaatatagggaacacttggataaaggcccttcaaatgatttttgcaaaatcattcaagacttcaatctgagtcctttggattatgagggggataagtttacttggtctaacaatcaccccaatgagggaaacatccaagaaagaatcgattggtgcatagtcaatgaatcttagaaggatctttttcctcaagccacacttaaacatggggaattctttggctctaatcatagagcactcatcgttaatatttttctccaatcttccactccttttttaagccagcaaaaagactttctttttgaaaatgtctagctttagaatcccaactagggtttacacatcactgacttttggcaatctccctctaagactacaaatcccatcacatacttaatggatattcatgaaagatgtgcgctgaagcttcaggagtggaaccataagtctgccttctaatttgaaaggcgaattaatcagctatcaaaataggtggaaatggcccaaaccagtcaaaattgcgatgctgggagaattaatcgcattaatgtcctccaacaacaactggacagtcttttgtattaagaagaaatatattggaagcaaagatctcggattaactggctgagtcatggtgtaacaccctactagtttaggcatgttattgttattttaaaataactgtgcagctcgttgctaatcaacgagtttattacaaatcgtttataattaaaacttttacttaattactctctaaatgaaaataaatatcttttacataatcgggatcccataattaaaatatttacaattgggttacaaaatattcaatacaaaagttgtcacctagcgaccatttaaaatatagcgtgttgtcccaaagatcgtatgctccaggtctaaccattccgacatgtacaatcttcatccgctcactctcacggctgctcaaccttagccttaccctttcctacacatgcaaacaatatctgtgagtcgataaactcagtaagaaaagcataatcataacatagatataaataggattaagattaggtgcccatacccctaaccgtaatccctccctgtgtcctacacagtattgagttaagaacgttcaaacgacagcactattgaccataatatcggtctatactcgatacactagtcatactctagtcgtatcgatgtgatactgtcaagtagtacattactatcgaccataatatcagcctatacttagtacgctagtcgtaccgatgtgatactgtcgagtagtacataaggcaacatacatttatcgatatctaatataatactaaatacactaataccgctattgtaatataatctattaggcttaactagcatgtacgctaagcatgtaaacacatatgcatatnnnnnnnntaatcttacctcgtttccgaattcaggtgtgccggccaacctgagtggaacagctgctcgatgatttagaggcccctaaatcatattattttcacaactaatgagtgatacggtaaatcacttttcggtgacttaaactcgaaactaaaagtttttctatcaataaataacatggaaataccctaaatattgcaaaaacgagaaaaactagggttctctaaaataccccaatcggtagactggttccccaaccagaatttcggttcagaagggtttcttggggaccaactggtcgaccggttcctataggtcccactgaaccggtcgatcggatcagtgcaagaaacactaaaaaactttccaaacaactcaattcgaccccaaacttcatacaaacttctaaacctgctataaataccataaagaacctaaaccaagcaataaaacatctcaacacataaagaacctaaaccaagcaataaaacatctcaacatacccaaaatcaaaatccaccattagagagcaaagcttgagttcataaactcaaaccttactcaatcaccacaacaaccatcaaaaacaacttagaacagctcaaataacctcaatatatcatcagaacacaaaaaacaaacaactcctacaatcacagaaccctaaacctaaaatcaagcaacataacctattaagaacttggagcaagtttacttttaagcacccagcgcccaggttgacaatttattaatctgggtgccttccaagtgtccgatcgaagattcgacttttgcattgagtctgtcttcatcaaaaatggggaaataagtccttttggtggaaaaacaataatttctgggtacaaaaagcagggcccagcgcccaggttgacacctggggctggccttgtgcccaagttaacaatttgccaacctgcgccacaaaaaatagagtttttttaggaattctttcaagcatcatctccattttcagaaaatattaagattcaactatttttgaggaccaaatggaatttttgaagggccaaaagagtggcttagcacccaggttaacactcggggccaggacccagcacccaggttgacacttagggctggaccctacgcctaagttaacattttgtcaacctgggatctttccaatccagatcagaaaaaagtgctccaaggattttcactttcatcagaaaaaatgaagattcaagtaaacttgagaagaaaactggatacctgagtccctaaaaatagggcccaacgcttaggttgacatggtgatgggtcctatgccaggttgacaatcaacttggaatgctgccttcaattgctcaaatgccaaattcaatgcgaccattgaattcggcatggtcaaaaatggagggatagaccctatcctcaagtttaaaagccttagaagtatcaaaacaaaatctagaatgctcggtttaaagggcccaacacccaggtcaacaaatgacttggttcgctgggctctgctaatccgaatttggtgtcattttaaccgtctatctagttttttacaagtgcaatgatccatgaattcagattaatcaaattcacaacttcaattttttggaaaatttactcattcaaaaattggaagttttgagtcttctgtttccgcaaaatagcaatatctctgagaacatgtgaccagcttcaccaaaacatataaatgggctaagtgatgtcaaaatcaggtgcttcaacaactatatttgcaaaggctcaagctttgcacctggcccttctttggtgttcggttatcaagctgttactcacttgtattgaatcggattgcctcttgctagtatcaaagatcaagcatgagtgaaaagattgttcctctctttttggacttctgtcatagatctggtgctccttatttttttttttcctaatgtatctctttattatgtttctaggaatgataatgtgtcaataatgcttaaggtgcactagacttgataaagagttggtatggagattctaagctccatcttcacttgtaattgtaactttgttcctggtttttgtttcattaagttgcaattgcttaaaaaaaatgtaataataaaatattaaaaagataaaaataaatataaaagtagtacatttattgtgatacaataattcaaatttgaatcaactttaaggtgcaaacttataattattacagtgtcagttatattttagtaatatattactaatttatctctccattaaaaatgctctaatatttaaatattgcattaggaaatagtctaaaaaaaacatttttacacatgaatcatttttttgatgacaatatctgttatagtgagatttctcnnnnnnnnnnactcgagaccagactcctatttaaaggacacgtgtattcag

SEQ ID NO: 14257 - DNA, 6371 bp, Cannabis sativa
atctaatttttaatattaaatccaatatttaatttataattataatctaatttttaatattgactctatctctaattgttttacagattatgctacatgcttgcttcttccgacagtagaggtgcttcctcatggctggtcgacccctcctgaagactggatcaaaattaactgtgatgtgaaggttggtggtgagtccatgtgcatagttgctttggctagagatcatgtggggatggttttgtggggtgcgaccaacttcctcaacttcacagatcctttgatcggcgaggtggcggtgtgtcagcttgctttggaaactgctactgttaggaagtatgattttatccttattgagagtgattcagaagtagttataaatgctattaaaggtgtccattccaattggaagattgttaactatttgtctgtttgtaatcaactctctaagaaatttttatcttgtaatttttcttttattcctagaagttgtaactttgcggctcataatgtcgctagatgggcttatgctcagaatatcttgggtattgtagaaccctctgctatacctaacactatcctgtgtaataactgtgaggtctaattttataattttcaatcaacattttcttttaaaaaataaaaaaaattatttcagttcaattaaatttgataggatgatactggacttattattgagtgctcactacatataaactaaaaaaaaaaaaatcagatgtagtgaggctcatgaatttgctgcatggaccaaagtacagcaaacaaaaaccttccttttacccttgatctcacatcgacggcccacggagaaaccgaagttaaattgtttggttttaacacaaaattataatgtttgtttttaataataataataataataataataataaaaaggaacagaaaatgttttacttaaaaaaggaataacaataaatataaggaaatgaaaggcagagcattaatcaaattctagcctcagcgaacgataaagattgactcttgatatgatccaacggtcagcgttggtttccacctgtcctctagtgtagacgaaaagctcaaaaaaaaaaaaaaaaaaaactcctttatcgctcataaaaactaaactaaaagtaagcttataaaacggcctctgaaagcactcctttcaattctctctctctttctctttctctcactcactcacccaaacctcaccaaactcaccaccacagccatggcttcttcttcttccttgaccctatcccaagctatcttggcccgagccatatctcaccatggctcaaactcatcatctgatcgagtttctctttccactctcaccatccccaccttctctggcctcaaatcctcttccttggcttcttcttcttcttcttcctccgctaagccacgccgcagggttcactctacccgacccgtcagagcttctgccgtggagactttggataagactaccgagacctctttggtggagaagtcggtcaacacgatccgattccttgccattgatgcggtcgaaaaggctaattcaggtcacccgggtttgcctatgggatgtgctccgatgggtcatattctctacgacgaggttatgaggtacaaccctaagaacccttactggttcaaccgtgaccgctttgtcttgtccgccggtcacggatgtatgctccagtatgctctccttcacctcgctggctacgatagcgtcctggtacttcttcttccttttatgttttttgggttttggtttagatctgttggtgataatattcgcatgtggatttcgctcatatagccataaaaaatgtgtcaattttaatttagtcaacgagacagctatcccaaagcattgattttttttgctgttatactttattcaagcacacccactcgtgtgttttttcttcttaacttccgtgattagtgttacacataaccttggagatcgtataaggttgtaacttagtattgggttcaattaataggaagaagacttgaaaagtttccgtcagtggggaagcaggacacctggacaccctgagaactttgagacacccggtattgaagtgacaacaggttagattcttgttatcaatcttactctgtggagatctcctagtcttgaggtttacttttcatttccttacatgctaaatttgctaacttgttgagtttatcttatggatacgttgttgtttaggtccacttggtcaaggtattgcaaatgctgttggtttggcccttgctgagaagcacttggctgctcgttacaacaaaccagacagtgagattgtggaccactacacgtaattactacctcttgatagattttgttgttaattatcaacattaaagttcaaccaaatatgattcgggtttaacatttttttttttatttttgttttgccagatattgtattttgggtgatggttgtcaaatggaggggattgccaatgaggcctgttcccttgctgggcattggggactaggaaagctgatagctttttacgatgacaaccacatttctattgatggtgacaccgatattgcattcacagaaagcgttgacaagcgttttgagggtcttgggtggcacattatctgggtgaagaatggaaacactggctatgatgaaattcgggctgctattaaggaagcaaaggctgtcacagacaaacccactttgatcaaggtttgaaattagctgtacttattaataacatgaatgtggaattgattggagaaaaaattattgaagagagagtttagtgagcttctctgtgtatgaataaaagttgacacgatcatgaatgcttatttgttttcaatcttttgttatttccaccataggtcaccacaacaattggttatggatctccaaacaagtctaactcatacagtgtgcatggtagtgcattgggtgccaaggaggtagatgctacaaggaagaacctgggatggccatttgagccattccacgtgcctgaggatgttaaacagtaagaagcctgacataaattttccatttcgtggaagtgaatcacacctttatgctaaatataacattaaatatgtttttctcttaggcattggagtcgccatacccctgagggtgctgctctagaagcagaatggagtgccaagtttgctgaatatgagaagaagtacagtgaggaagctgcagagttgaagtccatcatcagcggtgagctacctgctggttgggaaaaggcacttccagtgagtaacaaattcctttaatatttttcttcttatgatactacttgcttactttcttcggattgactaacagcaaatgtatacattttaaaagaattcaatggctttgcatttcacactaccagtttctctattgggcctctgctatttctgagctgaatcttatcgactaattaattatcatttatttggggtatgtatcatctaatgagatattgtaattgcaaattttcagacatatactcctgagagtccagctgatgccaccagaaatttatctcagcaaaaccttaatgcccttgcgaaagttcttcccggtcttcttggtggtagtgcagatttggcttcttcaaacatgaccctgctcaaaatgtttggagacttccaaaaggatacccctgaggaacgcaatgtgaggtttggtgttagggagcacggtatgggagccatctgcaatgggattgcccttcacagccctggcctaattccctactgtgccactttctttgttttcactgactacatgagaggtgcaatgaggatttctgccttgtgtgaagctggagtgatctatgtcatgactcatgattcaattggtctcggagaagatggtccaacccatcaaccgatagagcatttggctagtttccgggccatgcctaacacattgatgctccgcccagctgatgggaatgaaactgctggggcatacaaggttgcagtccttaacaggaagagaccatctatccttgcactctctcgtcaaaagttgccccagcttcccggaacttccattgagggagttgagaaaggtggctacacaatatcagacaactcttcaggtaacaagccagatgtcattttgattggaactgggtctgaattggaaattgctgctaaagctgctgaggaacttagaaaggaaggaaaggccgttagagttgtctcctttgtttcatgggaactctttgaggagcaatcagattcctacaaggaaagtgttttgccagcttccgtaacagctagggtcagcattgaggctggatcaacattcgggtggcataaaattgttggaagcggagggaaggctattggaatcgaccattttggagctagtgcacccgctccaaaaatataccaggaatttggtatcaccgccgaggctgttgttgccgcagctaaatcactgctgtaagcttggttagagtccaattagccatctttgatgctttgttaattgttattagcaattcaaacaatattcgggttgggggccaagatgaagagaccatatcccaattgatttgtttgatgagaggtctcttttttacttttttttttttaataaaagataaattaatttccttatgttgcttttaattcataaacacagcaacatggatcaaaaagagagaaagtagaatgaagaatgttcatgtattttgtaaacaactcttggacctgtgttgagttttgtaatgttctatggttgattaatgaggttcactttcactttcttatcatcacggtttatatatttaaagcacaacaacacctgttactttctcttttgattgtagttgtagtaactactgtactgcaactgattttgtctttttcaaatcttgatatgccttttcttgaagtataatctagttgggtaaagaatgaattattcttattattaatacaagtgtggtagttctttctttgcttttcccaaaatcaaaaagtggttttgtatgtaattgaaatagattggattggataatggtttcaagccatccaaatgagactacataatccatgtactcacacatgagatgattggaccttgtgttgatttttttgtccctacataggtttgtatatgtggaagatattattgaccaaacaatgaagcagataagtttgtgtggttgttgtaactcctgtcctcaccttacctatccatattatctatctcctacaaccattacttgcttcaaaatcaaagggattttgatgatgacacccaattttataataccatgacagttgttaggaattttagcatattcagctcactttttttaggcatattctctcttatacctcattcatcccacccttttgaaaaataccctcatagtatagttagatactttatggattgaataagatattttaaattttaaaggtttttatcttactaacagtatggtatggatgatgaagatgtggattaggtgaaatacaacaataattaggttgttgaatttatggtaaatattaaactaacatgatactttcctaatatctcctataactataaatctttttgtatatttagtattattagattttttgtaagtaactagtaaaatttattaaatcatacaaaagctaatctcgacttatgtaaagttgaacattctctttctattaatgaaaaggaataagagggaaaaagtctaatctccacttaacttatgttaagttaaacattaagaaatcatacaaaatctaatctccacttataagttataaacattttgtttatttcagtgaaaatgaataagagggtaaaaaatcccaaaaataacacaagtatagcagatattaaatcttttgtgaaaatagtgtgttccaaaagttaaaatatatatatatatatatatatatatataaataagttaaaaacacattttatccagttatcctctttattattggagaatttgagtttgagatggtgagtgagtgagtgactatgtttaaatgggccacttctaaagccttcagaaaagcctgcaacatattgagtcaattagaatcgatgcttttctatttatcatatttcttttttattctttgagaaataattaactttcaagtttctgattacttttctttgttttatttataggcataccatcatactaactcatacaagtgatacaattagcactttcaaaatttgtatacattttctattggttacatatttagtttcctgggttagttttcagtataattattgagcaaaatttgtgataaaataaaagccaaaataaatagtttataacaaaacaagcaattaagcacacgttttcagcaaaaaaaa

SEQ ID NO: 14258 - DNA, 13519 bp, Cannabis sativa
  modified_base (2776)..(2778): a, c, t, g, unknown or other
  modified_base (2904)..(2907): a, c, t, g, unknown or other
ctctctctctctctctcattattacaatttttcttttttgggatttcattacaaattacataaaaaaaaattaattgtgtaagaacaagctaagcatacttactgttactttcactttgtttgttcacttaatccattaaaaatgatttactcacaaaattaaattgtcgaagaaaatagacaattgtcctattcaaaattcttcatctatttttttttttattattgtctacggatatattattaattaattaattaagatgtaattggtgaggtttgatgaaaagtactaataatataagtcaaagtttattacttgtaaaaagttatggtatctcagtcctacttctaattttttttttattattattttcttattttgggataacatgaattttcactaattaattatttcaacaaaataaataattattgtcttaattgttttggtcaaagaaaataatttaaatgagagaaatatatgtttagaagaagatttgtaattaaattccaaaaaatttacataaaataatacttttaaacacgtagaaggacgttattatttggtcaaagaaaataatttaaataattattttcttgaatgataaaattaattttgatttttgttaatttttttaatttggtatctgatttcttttaaaaaaaaaaaaattaattagctacaaataaatacatgctccacaatgttaacttttaaaacttatatagattgattaaagaagtaagtgtatagtataaaggcaaaagcgtagtcgtcaccataaaattattttatatatgtttatatatatataagaaagaaattaatattccaacacaaaatgtagtaatgttatcatacacttatgttggatttttgtaattgttctgggttgatggactcatggacaaataacctagttataatgttttgggccttgagtgtaggtggagtgggcctaaacacgaggttagtctgtcttagtcaccacaatgatagacttttaaaccgcaatcaatgctagtttggaaaaaagaaataataatttgccattgaatattttgctaattggtattgtgcagcgattcttgcaatgttaacagtttgatagaaacctagaacaatttgaccaagagtttgaaacactgctcaacaggattcaaacaagaggcgaataattcgattaattttcttgataataatgatttattctatatatctctacatattcactcaaaaaaaataatttgaagttatataaaaaaaataaataataattatttgaagaaatataaatcttaatattctaaaaaaaaatctaattttgcaatgacagtaaaacagggatattttgtttatataaaactctaaaagcatcgagatattttttggggatggtggccgaacacacagcacaccaaatggcaaatgcattaaagaatcaaagagaaaaaatgtggacacaacaacacagcagccatacaaagctaatcaaacactaacagacagactaactgtggtctgtccaagcctgatcgagaccatttgcccgattcacaacacagcatcaaaaatatataggaataaatacgcattttgctattgcaactttgagcaattgttatatttattgtacctcatttaattctaaaatagacttgaacaccaaaataaaatcttaaaatgaccaatcaatatcttaagataacaaattatctaccactaaattgtacaagtaaccaaaatatatatgaagtgatatatatagtcgaaaattaaagttgtttatgataaagtaactaagtatcacttattatcatattgatattataagtaaccaaaatattacttagaaaaacaaaaagtttgagattccataattatttccattcaactaaaaacacaaaaaacaaaagtagaagtctaacattttttatgacaaagttgtaaattaagtttattaaggtaatttatatatttattttttttttttcattttagacttataatataaagccctattgtgtttggtttcaatgttaaagacattgatgaaagaaaaccctgatttaactaacgttaatgttttaaatatatttgataaattaaattatttataacaccgatgaaaaaatgaaagcaaaaaattggctaaaataattttttatgtaaaaaaaataattggatatgtaattgaaaaatcgatccaatttaattagaaattgaattataccactaattgaatatgatcagttttctaaatccaattactaattagattatattagactaataaaaaaatattagattagatgggatgtccaatcctaaatattagactcaaaatttcaacaataatattttacttttttgttttttatttgaacaataatattttacttgtttcactcaaatctcaataatgtattttacttttattttcatatattaaaactatgagttttgaattttgtactttttgaaaaataatttaaaggatagtccactcctcaaaatgataaatacactctaatatttgaaaaaattaagcttaaaataatttttaaaaattacttttaatatctttttaaataaatttcttgcattattttggattaatttcaatatttattttaattttattttcatatttttttttaaaatcatgtaacattttttatttttcctaataaaatttcatataattttttattttaattttttttgttataatatttaaggggaattaccccatatactgtttttttaattttnnntttaaatttacggtttgagtttttaaagtagttgtagcgctagttgcaataggagtttctatacgatttttttattgcaatttaggttgcagctctagttacaataggagtttttatgtagaattnnnnaaaaatgcaaaaaaaaaaaatatattttaaagtataaaaatgaaaaagctcctatttaaaatataatttattttatttagcaaaaaaaatataacctgtttttatttgataggtatattttattaaataaatgagttagaagaaaagaaaattaaagacaaaaaaactaatataattaaaaatatattttttgtataaaataaaatacatatataaatttgtagagtacaaataaaattttcttaattttccactacaatgactagtctaccacatttaacattaattggccataatgatccctaaattattaggagcaacccaccaataattagtaggtataataacgagtaaaaccgagtaaatgaatttgtgagaggaaattatcattcttctcttctaatactaaaaataattataacatagtcacatgtaaaaatactataataagagaataaaagtaaatcattttttttaaaaaaaaatagttactataagtaaagggcatttagtatttgaacatttataaataaaataagagtatatattatttttttgaatcaaagatgaaatttattcaaaaacactcagaagatacaatattctttagagcgctaggagtatcatgctcgctaaactcacaatctgacaaataacaagaccctctagcaacataatgagcggccttattagcagatcgtttaacataaatcaaaaaaacattagaaagagaagaaagcatttcacggcaatcctgagctaataatccaaactgagaaggcataagaatagtgctattaatagctagaaccaccaccaaagcatcagtttcgattacaacattagtccattgtttcttctttatccaactcaaggcttctttgatcccaattatttcagcaatttccgccttgactaagccaaaacgactcacagacaaagccgcaatcaaacatccattggaatcacaagccacacaacgaacaccaaacttgttctcatcttcaaaaatagctccgtcaacattcaccttaaccgtattgaacacaggtttcctccaacgctcacatgcattgttaatatcattaactaacaacgcaccacctttttgagattgagcattcttccattggtcaagggcaactctagctgaccgaaccacctccatagccgaacaagatttattattccacaacacatcatttcttgcaacccaaattttctaaccaaccattgtcgcttcacacaccaatacccgactttgagtttcggccacattgaagaaccagctactgaagtctactcccaaaccagcagccatattgacacccaaaactctccaacatgattgtgcaaaaccacactgaagaagaacatgatgaatggattcactagcaagattatagaaaggacacatcaaatccacattcacatgtttagtgtgagctgtgtcttagttggaaggcatcctgagatcgctcgccaaagaaaatggtgaactttcgggggaacatcaagctgccacaacagcttccatctcgcctggttttcaacattcacaccagctgaagacatttcttgcaacagtttataggcacttttcacagtgtaaaatccctgatggttcacgacacccattccaatcatccttcacagctgtagcactaagctgaatagaaacaataagatttctatctcgagcttcaaacatatcctccaccaattccaagtcccaagccaactcacccatcaaaaacaaactagaaaccctttgattgaccaaccccggattaaccgaagtaacatatgggttatccaagtctggcaaccacgagtcctggagaatactaacatcatggcctctcccaattgatctcctgaccccattccgcaccagagcttgagcctaaaaaatactcagccaaataaaacttggattagtcaacagacgccacccttgtttgccaagaaaagcaagattatagtcccggtgatctctaaacccaataccaccatcatacttatgcttacaaagtttcttccaactcacccctttactctgcgcacttgactgagacttctaccaaaacttagccatcatgccttcaagacttgagcaaatttccttagtgagcaaaaaaacactcatagcataactaggcaaagcttaagccactgatttcagcaatatctccttccctgcttttgaaaggaatcaactctcccaactaaagatcttcttctgcattttatccttgagaaaaccaagaatagcatttttgtttctccccataatgcaaggcagtcccaaataaaagctattatccgaagcctccaccatacccagcatatcacacaaccttgcacgagtatccacactcgtattcttgctaaaaaatatggaagacttagcataattaacctgctgacccgaagccatttcatacacacgaagcagttgtaggacattggatgcttcattaacattggccttacagtaaacatagctatcatcagcaaatagcatatgagagacccgaggagcatttctagcaacttgaaaaccagtcaatcgcctagtagcctcaaagtgtttcaacaacgcagaaagaccctcagcacaaactagaaaaagataaggagataatggatccccttgccttaaactccttccaggtaagataggccccataacatgacttccatatgtaacattatagctcacagtaatgcagaacataatcatcgagacaaatcgtctatgaaagcccattcgcatcaacatagcctcaagaaaagaccagcccactctgtcataggccttactcatatcaagcttcaaggccataacaccctccttccccattctctttctctttaaataatgcattatttcaaaagaaatcataatattatcagaaatcaagcatccaggtaaaaaagcactttgattgtttaaaataataatattttaagagaaagtacttattttattattttaaaaatcgaaaatatttttcatctatattttggtacgattatttgtttcatcatcaagtatgtatttctaaaattgaattatctcataatttaaatatatttttttaaaagaaaaccccaatgaccacctttcaagtaaagtttaaagagaatgtgaaggagatgctgattatattaatttatctcatgtaaaatgagactatgaatacaagaaggataactgagtcactaaacattgctaataacttttgacaaagcatatttagccagaattatcataccttaaaatcaatttgtcgcgagttggtaagaaggccaaggaatagatggaattatcgaaacttcatctagagaaaatagaccacggatcatatcaaatttccaatctcaattctaagttaggacatcatacttccttcaccaagcaggttaggtgagaacataagaaagttagaaggcatcaaaacccaattctcttcataaactttaattctaatacagtcacaaactctctagattaatccagcataaaataactcattctctcataaaatattcttccaaatgaaagatccttttttagatttaaacatggaaccaaaaggcttatgcatgtcatacaagccttttagaatcctagaagtaagggaattatttagtttttccaaatacaatctcatactgaatgaaacatcctagatttattctgaccagagaaataaggaagatccagatatttttcatggcactccacactgaccacaccaagtgttgctgccatattatccttgttagtggtcataatattcagactaatgtagattaacaatttctcaaaattgacactctaactagaagtagaaccattctaagacaataatgacttgaatctctcacattgtaacactgatgctttcaaaaagaaaagagagtcattagcaaaaaaatgagagatggttggccccaaaataccacaaagaatcccgtggagtaagctatcagcataattctttttagccaacgcagtcaggccttcacgacacaacatatgaagataattgtctgagacccctctcaagtccaatagaaccaaacacacaaccattaaccaaaattgagtactccacagtggagatgcaatctagaattttcatgattcaatcaatatgaaatgtcgacttctctaaaaaaatttctaagaatgaccattctactcgatcatagaccttggacatatttagcttgatagcacaataccctggagcactaactcttttcttttcttttttttttttcttttattcaaagtattaatacactcaaaaccaataagaacattatcaatgattaatcgaccagataaaaaagtactttgtttctcagaaatcacactagacaaaacatctcacatcctattaattattgttttagtgataattttacaaatgacattactaagactaataggaagaaagtcagcaagcttggtaggagaatcaactttagggataagacaaatgagagtcttgttagtacctttaagagtagaagtgccattcagaaaggctagagcagctgcggtcacatcatcgccaataatatctcaattcttttgataaaaacatgtaggcataccattattacttgaacttttagaagggtccgtttgacagagagcattcttcacatcttcataatttaaatactttcaacgcaaataaaataataattttagtactttcaacagaaatattcttttaattgggtaacttgactacaaaaatctcttttattgagtactttttttgtcatcatcacgtagtagacatacttaactgtaaaaacatatgatataatgtatttttattagaaaaaaatgaatatttttactataaatattcataaaaatatatttaacttaattttgattttaaataaaatatatttgataattaaatattacttctagttatgaggtcggacactatatatctttacattggtataatattgttcgctttggacctaagtcctcactgatttatttttgggcaccttcccaaaatgcctcataccaataaagatattgttcatccttatatacccatgatcttttccatttctatccaatgtggaactttgattgcacacctaacaatcctgcctaaaacaaaggaccaccttggctccgcttaaacgatcttccatccgtcaactctacctcgagacttcttgctcttttcttaagcaaactcctccaaagcacaccacctgtctactagaacacatccacagatcctatcatgagattaccgaggctcatctcctttgtttggcatttctaggattcattcacatggctgattttaggatctagctctgataccacttgttaggctccgttcttccactttattggactgacacctcaccttctcctacattagtatgatattgtccattttgggtctaagctctcatagttttatttttgggcacttttccaaaaggctgaatactaatagagtaggtggaacacttatatttaagccaaatcttgcttattctttcaatgtggtacttgggttgataccccaatacctcaactatttatgaattgtgttgttggccttttgaaagagaaactcaaggccaatattttactttttgtatctatttagaaaaggctaattaagatcccaattttaacatgtattaaattgtaactctcgaacttttcaggttgttaaaaattatccccgagctattgagataattagatttaaggtctttcatccaattttgttcaattttactagcggaagcttaacgtagtgcttgtctatgtactaaatcgtacccctaaacttccgtccacgttaggcactcattagtaaaattgaacaaatttaaacgaaaattcataaatacaacaatctcaataatttaatagtcatgatttaatacgtactttgaaaatttgagaaatcctagtattagaggtgtgacaaaatgaaatgtggatcggcggtggcctggtgggtaaaaataagaggtatttgattaggcagaagaggaggtggcgcactcagaggagagaatatcccaaccccaattatgttatctgtatcaccacaaacactacatgtgtgtgtgacaacttcttcttcacaaactaccaaagacaatacttccaatacagttatctattttttaataacactatttcactatttactccatgccctatttctagttacgttacttgtctttactctttacatatttatttctagttttttacttttacaacgtcatcgtttttgctgaacaaatattgagaagtgtgccgttgaacagcaggttccatcttcgaataccctcactcattatataatatatatatgttagggtcatcagatttaaataaatacattagattaactctcttaggataattcaaaacaattcccatttattacaatacatcaagaactaaggaaaagctattgacgagaagactaaactaattcattatagctttgatttattcagcagcagagcaaaaataaaccaagtataggaaagaaaaaagagaaccattatcaaaaaccaaaaggccattcttttacctttgtaattagagaatggaatacattagttttacaaaaaaaaaaaaaaagacagaagaaaagtctcgctagcctaggctacaaccacatgaagaagaccagtaccatatataatatataatataaatggaatcccctgctgctacgcaaatggggtccaaaagaatcaatactacatttgcttggcctcagatatttttttattattattattattaagttctgggtctgtctggtagtatactacttcgccattgtcactcacatagtggtcctggctgatgctcttaactagattctcgatcaagtggactggaattggccctgactttctaggctccctgtaatactttcccagcactggcttggctgccttggtctgcatacacatacaagtacattagataaatccaaagagcaattgtgtggttttgagttaattgtttatttttttcttttttaacaaagggatagaaaaaattacagcttccacaagatggtagtgtgggatttgagggaagagatggtgtataacatgagttccaatgtcatggtggatattgttaaatattccatagtcacggtctactgttgttagccctccccttaggtaactccattcctatacagaagaaagaatggaaattgttaagcttttgatgaatttgaataaatacacaaacttttttttcttcatatgattttagtagtactcttaccttgccccggtaccaagggagtttttgctcataaccatggtgatgcaagtaagtgacaatgtctagccacatcacaaatatctgtggaagtaatgcataagagaaatactaaagaagaagaagaatgtttggattgagttaatttgagagaattagagaaattgagagactcacccaataaggaacaacataaagcatgagaacttgaacaggacctactatgaaggacaaacagacaagcaaagcagccattgttgaccagcaaaccgttgaagttattatttggtttctctcacttggagtaaataatttgctgtaaggattgaaatgagagccttcttttcctggacttctattccactgaaaaatgcaacaacaaaggactttaatagctcaaatctacactagttttttttttcttcccaaatctcaaactaaaattttcaacaaatcaatatatgttgaaaaaagataagcatcctcaccagataaaaagggtatgcaaataagggaaatgggactttgaatctcagcctctttgttttctcatccaactgcttgtacatcttctcagtcaactaaaacaaagacatgaaacaagagcaatgagggttgtttctacactccaagattagaactttaaacacaataaatcgatccaagaacagaaagcacgtaccggaacccatgactcgtcattctcaacatggccatggttttgatgatgagttctatggctaattctcctgcaacattaattaaaagaagaaagaaataaaaaatcattaaaatttcatgtttcttttgttctttctggaatttaagctcaaaggagcagagaaaatatataatgtcaggattttgttttgtaccatccattgtaaggtacaaggattgcagaatgcagaatatgacccacagcgctattcagctcaggactgtttgaaaagcttccatggccactgtacaaatccatgaaccaattacattttgttatttcatcaaatcaagactcgaaaatatagaaaaaaaaaaagatagaaagaaacagagccgggagcctccccaagaaaataaaatatataaatagattgtaccaatcgtggccgagaacgaagagagcccagaacatggttccttgagcagcccagtaaaatggccaaacgacccaagtatcggaatagaaagcggcaaaggccaatgcaaaaatgataaagagatctctgaaaacatagctgagtgagcgccatggattcttaacccaacaatgcttaggaatggcggctcggatctcagctatcttaaacggtggaggatcactcagatcgaaatcgccgttttggtttcggatcccatttgccaccttaatggggtagtcacctttttcttctctcgccatttcctccgaagcatgtgattctgtcattattgaacgcttaagcctctctctgctataaaataaaaccaacaaaaaataaatgaacgagctttgaaaatgttgtgaagaaatttgaaataacaaaagaatatacatatacattattagatatatagttgaagggttatttatatttatatttggctaacctctttgaggttagagagaagagaaagcgagaacactggttatggtgtaatgttacgtttgtttatatagagaaagaaagctaaggagagagagtgacctaaatgaaagggatggcgctgatgatcgcacgtatgcagatgtacagcacaaacgtgtacgatgatagaagcgcactcgtttgctcttctatgccattgcgtgacaacgtaaatttatttagggcttaatgtctttttcttttttcttaacattaactacactataattttacttaattataagtttgtaactattttgtcaatgaaagttcattgttaaaaaaaaaaaaaaactattttgtattctctgtgttttcttttttagaaacaaatgtcataagagtcgatataaccgatgtcatataatgtttgttatgttttttttttcattacatcttatatgtacataattatagcacatgctaataatttctaattgagaagtgctaattataattttttagtcaatttttatgattgaaaatataagttaaaatatattttttttttaattttatttcgtaagggtattcgttatagttacaatattactcttgtacatttttgaaaaattctaaatagtttacagcacatgtggtcaaaaaactcaaacctattttagacactgtaaaccattcaaaattttacaaaaatttacaaggatggtgttgtgagtataacaaataccgctataaagaaaaattgaaaaaaaaatattccgacatgtgttttcgggtacaaaagttgactaagaggttgttatagaaaattgacggtaggacttcttttcccaattttatttacaattctttaatcctagagaaacctctatgggtaaattagtgtcgaaccttttccgaacgctcaaaggccatactagaaaagttattgggcgtaatttattaagagatgactgccctcatttattatctggatcaagtatatattgttagaaattttatgtaaaatatgaggcatatatgatcgtctatgaaaatacaaaattaaatcgaacatatacataatataactaaaggatctaaataccttcaactattaattctttgagctttaatcccacaagagctttcgatctactaaagaaaaagaaactgattagtgagggtaatcgggctttcaagctctctctactctctttaaatagatttactgtatgtcactgaataagtagtgcgattgggaaccgagaccctatatttatataagtgagacctttaatcaaagtctctgccacaattatctgtcacaatgtttaaacaaacaattaagaaattagattgggtaattaacataatgatgaccatcaatcaaaatattttatccataaatagaatatttatttgatataccaaatcaataaattataattaattgattatatatcgtgtgaataaaatattctaaaattctcccacttagttaatatttaaataaaaatatcacttaaacccaacgattatccttgctaaataaaaaaatatatgaatcatggcgatagattctcattatttggcaagtattatctttcatgtattacgatatatttattacactagttaaaagttacgtgccgaggcacgtaaatattaattttatttagagtttagttcttta

SEQ ID NO: 14259 - DNA, 21673 bp, Cannabis sativa
tatttcatcattatgttattgatcttataataaaagtctctttctcctaccgttgttcatataatttataaattgtagtttcaaacctcaatcaattcagactaaatgattcgagatcagaacaagtgaatccggtactgtcaatagtttagtcgatccgaaccgtttataactttgtggttcggtcactattttaaattctttacttgtggttcaaaccaataaatcaaactattttttatatatatatatttaggatttttcaaatttttttcattaaatattaatattatagatagaacacacaaatatatgcttcaacgtttttaggcattcaatgattagctaagttggctttatatagtaaactttttaatgtttggataataaattttcccttttatgtagcctccactgtcgtggttgattccattacagtatattttcttgtattatattaatatgagattaattttttttttttttttcaatataatagaatctaaaataaatgtcccaaaatttttaacctaaattaaattataaactataccctaattaaccctaacatcttctaacaagtgggtagtgatggaagtttcgtttttttttcttttaaattaagtagtgttttttccataaaaaagaaaaattatgaaaatatatcatttcaaaaatatttcatatccctttcaaaaaaaaaaaaaaaaaaaaattcattcttagcaaaaaaaaaaaaaaattactctaaaatatatttattatacaactgctcaaccactgaaatccttaattagcaaattatatattgttttagagcctagggcatgttttgctatgcacacataaactataataaaggcgagggaaacaacagcaataaacaagttattttctatgatattaacagcagcaaagctgaagcaatagaggtgtgtgtagaagaaccaaaattagtatgtgcttaacagtaatctgcaaaataatttggagtttttataaaatattggattttgggtaaaagtttttaattttactgtaggtggaattttttataaaaatactatctttttataaaacaatcttaaaacaataaaacagaacaattaaaataacttaaaaacaaccgtgaaaatttaaaacagtacacagtataaaacttatacagtatttttcaaaaaaatactatttttttaaaaaattctgcccataataaaaaagtaaaaaaattgaaaatttgtgtaaaaccccaaataattttacttagagaaacttatgaaatttggattaacttttacaaaaatactgttacacgaaaatattttcaaaaatactatatttttataaaacaccagtaaaacacagaacaactcaaaacaacagtagaacaactacaaaacaccagtgaaaacttaacacagtatactgcaatatgaaacttataaaaaaatacagtaaaaaaaagtaaaaaataccacttggcagtattttattaaaaaaatagcaacagttagtataccatcataatatcccttttacttatgtaacttgtccatttaaaaagtccataaaaccttctcaaacaaagaagatatctataaacgaatgggcccaactcgatcagtccagtgtaaaggaacatatctaacaactgagacctattttaaaggcccaaagtgaaatgaaagggtagataggcctgtaatcttatcagaaattactcttgtgagtattttttttaaaggaatataaaacatatgcacgtctatgaaaaataccactttctattttctccttttctacaatttcttttttgaacaatcaactgtttttattataataataataaagtgatgaataacaatacatattttggttatttcatccatgattttgagtaaagtgcattcttcacattcatagattatctaaattaattatgtaatatgtctagataacaatatataatattagaaattatttaaagtttgattaaaataatatataattttattatttatatattctgagtttttttaaagaggaatatatggagtagttgttttcttttttattatatatttttcttggtgcaattaaaatttcaataattttcttaaaaggaattatttatagaaagaaatgaatataactgtgtatattagtatgttgttaatcatatatatggaccaattacatgcacacgaccagtgtacaaaacttcatatcatcatgtcaattagtgtggtattccatggtacccccaacctagacacgtgtcacatcaatgaagatgcaaaggtttaatttatagaataattgtgagatcgataagatatttaagcttggttgttacaatatatatacaaaatgtactttgggtgattaattatattgtatctatattgaaatgcctactcaaaaacatgaaaatatataaataaaataataatggtagttcttatcaaactttctttcgagaatcttaccatgaaatgcaataaactcatggtccaatcaatatatattctacagtatacaactttttgtgaagaaaaagaaaaagaaaaaggaacacatgaaaaaagaagttacgggaagataaatctcagaaaacagtaatcttttttgagccaaagcgtgcaatcacctttgcttcttcatcaatacgacaccttagtggtcaagctaaaccttttttctttttatttctttgtccaatactacttaaatagtactttgtacatatattgtttcaattcgacattatatatatatctatcattttgtgttgtcgtgttttatttaagctagctaattgaccatatatatttgattttgatgtaacactaataagtgcattattggagttcagatattatatatctgcaatatacacacataaattaaaaaacattatatataatatatattttttttgaaattataattaatatgcgaaactcttggcctgaacttaaggatagttatataatggagagtagagagagaggagcataaattaaagatggccaagcaaattttgtattggtaggttaataattttattatttaattagtgggtcaaattcggcagtaggttataaaaggcagcagccaatatataagctaggtaaagcccaacttatattattgcaagttgcaaaataaaaacctagtcattaattatatttattcttctttaaataactaaatttcaatttttaaataattgttaaagtcctatgttcctcatgcgtaaaaagttatagcttctgattggacacatagcctaaccccaaaagaaaggttaatttgatgtcgaaaccacgtaaatctagagagctagctacctaggaatatatactacacacatatatagcactaattaattagtagaaaaaagaaatcgatcatattaatggaccgtacgaattaagagtgtcgttcgaattgtaccattagtattcttaggccgtacacgtactcacattaatgtacacttctttttctcttttctcttttttccttcctatttttgatatggagtcatgtattagtggaggtgacaatttcgtgacgacaaagaattagtatataaaacttccgagatgacttatcagaactttattatctgtttcttttaaattccttaatatattacaattactacaataatataaataatcattcataataatattataaatgaaagaaatttattagtagaataagtagttaaaattttgagtttacaaacagtatataaatataataattttttacgatataagtagtcaatgttataattttcctctaagcacctttaaccattgactttaaaaataactgagtagttaaatcgtattggaaattaataaatctcagaatgttgagagagaattatcaatattggataaatttgtagttaaaaatatagctagcggttgatgatgatgatcgatcacattatgaaatgataattagcacatttctaaaactgcatgcatgcatgtacaataacagcaatattgtacgtacgtacgtacatatatagtacatagcagctaattaaagaaatatcaagaaagatacacaaatttaattaaaaagacttagatatgagctgactgagggagggagtttttttttttttttttcttaaggatacttgcaaatccccccaaattgaaaactagctaattaattaataagtagcttaatgcaaacaacacaaacagggttgaagattgtatagcatcatgagcaatcagccttagattttttagcagagtgactgctcatgatgttatatcgttctccaacaaaactctctttgtgtgctgccaccattttcagaccaacttctttattgtttaccggaaaccgcagccgcctcctccaccgagagccggagcccaataatctgctccgttgtcactcccaacttgcaatgtgcatgaaacaggcaccaaacacagccccctactcttcagatctttctttggctcctcaacacaatcctgcaaagggtgacacacataaaggtataatttttatttttttaaaaaaagttgtaattgtacaattaacctatatatatacaagccctagaaaatagaaaagaaaataattaattattatcatgtgatcatatattatgaaatatttttacaaacctgttgatcaggagcccctttccttttcatgcaattatcattcaatagctgtaaatttaataacaataatgttatttgagcacattaattagaatatgtgttgtacatttttctttttattattattacaacttattttctctacattagtgagctttaaagattaacgaatcctacttaaagcttctagcaattataataaaacaatttggtaattgattttttttaataattaattaggatgagaattactcagccgtaaacactttttgatataacatatatatacataaacaccgctataagtaatggatccaataaaaagcatatatacctgaccaggatcttcagggaacatgcaattcctctccccatgaacctaacacaacaaaattttgcaatcatttattaattaatgcctaataattaaccataatagttaattttttttttaatcttcttttataaaaagagagaaagagaaagagattctttgctttggctttgggaagagagagaattaaaataaataagttaattttcttacagactgttgttgtcgcatgtttccagatccactgcccaagtaaggtaagctgagagcctgaaatattaatattattgggaaagaaaaatgagaaattttcaataagttaaaaaggaatatattgtgggaatgaataagtctgagaattataactggaaactagtttattgtaagcatagttgttagtgagaaaaataaaaaaaagagaaagagaaattaacaaacatcacctcaatttgactctgaaggaatctgatgtacccaatagcttctaacaagacagaggctgtgtcagtctgcaaaaagaccagaaaataaaaagtcacaaaacaccaaactcacatttatatgtctctctttaatgcctaaagggaaaacccacaaaccctctttaacattttaatttttcttttcttttattattttgaaaataaaaaataaaataataacaaaaaagttaaatttgagatcatgattaaagaaatgttggaatggaatctatgttaatgtgaaaaaaaagttccttttaatatatataataggttactagtatgctactatatctcatatatatatatacacacatagaagagtatagtaaagtagctgtaaatctagctatagttagtttcaatattttgttgtattctttttaaacttgtaaatctaatctataaaatataaggctttccaaaacttcttacctttccaaatggagaaactaattggtgaagagcagtaattctgtcacctaatttttccttcctcacctaaaaataatatcacccagaagatatgaaataagaggtgtgaaaatatctgagattaattaattaaattcatgcatatctagagatagagatctagaaagagagagctatagctaaaaagaattattccaattgaaaaatggacaaacatagaaagacaacacaatttccacaacatatgtatctatatgtatgtatgtatgtacatatacatatatatatatataatgtttaaatttgcaggcgcgtgtgcgcgtgagaaagagagaaaggaaagtaggagattaaagaaagaaaaagagaatcaattggggttggagaaaaagatgatctatctatgaggctttttaatgggttttctgttcaatattaattaccttaaaagtagtttgggttgaagaaggttgaaccctagctttcttgagtggcgctcctccagtagcagtgctgttacactttcaagatgaagaaaaaagataaatttataattaatttatgggagagaatagattcttaattttgttctagatatcttttttagctagaaaagggtaaaaatataaaaagatggagattgaagctagctatacatatatagtactatttttatattaatgatcattactttcaaatgtatatatatccagagacatattaaggtgctagcaaaaaccagctttataattcaatcccactactatagtgaaaaagctaatgtgtatgtgtgagtgtgtatatattatatataaaaacttagcttttttcacttaaaatatatattgcctttaatctaattagttgacttcaacccgatcatatatttatatttttacaagaacttaaaagcttttttgttactcagaaactacattagtgcccttcaaaaagtaatcaagttttagaaaccctagataatatatatatatatatatataatagaagacataataatgttgaaaatacacattttcttttataatataatgatattaattaattaattaattacctcagaggatcgatcctgaagaaatggtgtatgggtagtagtagtagtagtattagcaggatcatgatgaggtttgatgttagagaaatccaacatgttactactgaaacttgttacacaggatgatgatttgggagaggaattactgttgttgttgttattattattatttgccattactaatgggtgttgagaagataacaaccaaggagtagtagtagtactacaactaccaagcttattgacctgttcatgaagaagatgatgatgatactcttgagtttcatgtccgtacatataagctgctgctgctgtgttgctctcttgtttcacttctatattattagaaccctgctgatgattactgttattagtactcagctgcatctgatgatgattatgatcttcccaattctccaacttcttcacttgaaaatggttcatcatattaatagccttttcctcttcaccaaccaatcctcccctattaaataacaaatataaaaactaattaagttattaattaataaaagagatgaagaaagagagaaagagagatatttacaggaggagttggctccaagactcgggaagctggtcttgttggttattatgatcttgccaagaaggcatattattattattaggaagctgatgatcaagatgttgatgatgatgatgatgagaagaattagaagaagaattattagatgaggaagaattattagaagtagtggtagtagtggtagtagttgtagaagtgggaataaattgagggtacaagaaattattaggagaaggtaatactactggctgagttggtggcctcatagtgttgtagttccaccagttagggtttccggccgccatcatttgttgcaccggcgagctttgttgcaacacaccagctctattcataatatattatatataaatttcaactgaaaatgatcttctaactatgcctatatcctttcctttagcttttctttcttcactatttttttttcttggctttgtaagttgttaacaaaacaactctttgtagaacctttaagaggtcttcttactctagattaagtagtaagagagatgtggggtgaggatgaaaaaaaaaaaaaaaaaaaaactaggtcctgtttttgagagaattttgaattaatcatggagttttgagaacctttgtctctttgggtttcctttctctttctctttctttttctttctttctttctttattggttttgcttttgttcttcttctttctttcttttttttttttatttattttttatcttcttctctctcctcctttttatttatttatttattttcattttttttttctgtgaataaacttttactttatctcaaagtgggacagaaaaggtgtagcagttcccattaattaagaaaacaaaaattatatatgggtgttgctagaatgacagctgagtgtacgaaattcttcatatttacaaggcatgtgtcatgttggtgttgatgacgttgagtaaatctccttatacaaataaataatatatgacaaaattataaatctctcaaactacaaaatgcgtatatgcatatatgtataaactttttcatgatcaatagaaataaatttctcttaattttattgaaaaaagaaatttacaaaaataactcaaaataagttgtgtgcatgctctattcagctataaaggtaataaataaactagctagccataaggttttttttaataagaatagtatcttcgttttcactctttgttataatatcataaatgtttctacattgctgtttcaaccaaattaatgtgctaattaatattattatgtgaaactaagtgagattataattagccgtatatatatttgttaaaatcatgagagggacctatataaataaatattatataaataatttttctagctacttttgtgaggagggctaagaaatgcatattttcatcatcagatcattcatcgtgcaccgtcaacattgtcttgctttaaagggaagtctttgtaaaaatcaattaacgtatatataaattatgaaatgtacacagcaaaattattacaagaatatattatatatattgggattataatattatttataattggatcctttttagtaacatttttttttattattattatagatgattaattaatgcattcaaaaaatatatatatttataataagatttttatctgttattcagttttatattgtgagggtttttgtcataatccttttattttgggacagcaagctgaccattaattttgttgtaagatgaaattcatacgtactatattttcttatgtatgtaattaattttaatttataaaatcccgcaatattgtagcctgtaattccacataagtttaccatgctgagtctcaattttcttttctttaatcccatcttctttaaagttttcttgtaaaaaatattgatggaactcccgttatctacgagaactacttttactctcttattaacgagttgcactattatcacaagaggatctgcatgagggtatcgtacatgtaatccgtcttcatctgtaaagacaatgggcggttcatctgattttgctctttttagaagttttggagcaaacgctgatgtctcgtttttcacctacttaatgtaccttttctgtgcactattgctattacttgcgaggtgtggccctctagaaataactaggatatcctcaccctctacaagttgaggttgtcatcttagattattcgggttgttaggctgattatgttcgttttcttgtgtcctcacatattgcctaaaatatcctcacgagattaggttctcgatttcatctttcaactgatgacactctttgattgtatgtccaacatctctatggaaatgacaatacttattaggatctcgtttatttcttgcatgtctcattggatctggtgtgcgaaatgcgacccaatttttgttggcgaggtagatatttttgccagtctcatttaatttagtatacaccgaataaatagggacatacttttcatgtttcttttgcttctttttgtctttggatgagtctctcgactcatccttcctcttggtattcgaactatttggattttctactttagtggtcatggtgctcgctgttgctgtacttgtgctaggttcatctcctaagtcagactttaacaacttaatttcatttcacgccttttcttttcgctcaaaatatgtgttctttcattgaactcgttggtgtttctaacagggcgtccttacaagtcatcctataattctccccctccagttgacaagtcagttgtaattccagcttgaagggctattaattgaatgttgtcattcaaattcttgactttggctgcagtcgtgctaaaatgacttaagtttgccttgaggaattctcctggttgctgcttgatattggttaatgaagatgcttctggtcaccgatctcttgcagcttagaactactttttgaaatcttttgacaattgctcccaagaagttatagaatggttggtgaatttgtcgaaccaactacttgttgctcctgttaatgaagttggtaataatatgcatcgcaagctttttgaaatgttacttgctcgcattattgtattgaaattatttaggtgggcaacatgatcagttgtaccatcatattgcactacatgagggtttttaaattcttgaggaaattgtgaattcaaaatatcagggtggaatagttttgactctttgtctgagtaataccctagtaattttctatattctccatcctggtatttcctgaacttgtcttctaattgtattactcccaactgtattggatccataagctgctgatctgtattttgatttagttggttacgtaaatctggtacattacggtttaaatgcgcatgtaggtttggctgcctttgatttaattactcatagagatcaggttcgcgatgtctttggtcgtaattactcacggatctagtccttgagtaacttttagattggtaactacgcaagttactcatactttcttgattaataaaataatgttgtgatctatccctgtcttgtgtttgcctatgagctccgattgacctactgtgcctgtcagtccttgaacttgattctccaaaattcgatcgtacttgagccattttcacaggactcatctcgcttcgaccttctttttcaaaagagatttgacacacaacctctactcaagtatgtgtgtgtatttcctctgccgttggagaaggcctttgtggatgccttaggggcgacctatcccaagttgatttccaacatattttccctcatgctatggaattttttggttttctggtcgcgattgtcgtgcatttgtattcatgcaagatgattccgatatatcaggctaatcattcccttagtttgtttagaatgtcacgtcgatgctcttactttcttgtatttccaatatttggtggattttctttaaccattgggatatcccttgcattcccatgttgttcttcctgattatttatgggatttccttgattattttcttatctactcaccctggaaccttggggccttccccatggttaccttgcagatgcaccaggttaattttaaggatttattccttgggcaaccctagctgttgctgtttcttgttctaactcgatatttctccagtttgactcaaccaggcattgtcgaagttgcctattttctagttccaccagtgggacatatctggttggatcataggcgtcttcactttgcctttttgggatttgttcaccagttgggttgaaatctccattgttcctttcagaacagggagtctcggttgcgttggttctttgtgatctttgaggttcctttccagggcgatgggttgtctcctctagatgaatttcttcattacgctgggtattatccgccataaatatagatttttagttgcgtctatgaggaggttattttttaagattttattacaaaggctctcaatgaaagcaccaaactattaatgtagattttcgttaaccaaaaatattagtttttttttttttttttttataatgaatatactataaaattaattacagcgataaataaacaccaaaaagtttttaacgtggttataaagtaaattcttcaaagtttatgaatccattttattaggaataatctttggttaacagaatacaataatatcaagaataataatatcttacttttcctctttagattggtcgtcccttttacctgtgaccctgtccctatttataggggtatagagtgataattatttccttgagatctattcattcataatcgttcatcaaacgtgaacatttttcatgttttattattgtacatatggggtaatattaaataactgtttaactgctcttttattattatcattaaatagttatcctgattatactggatgtttctcgctaagtatgagttgtccttctttaccgtctttgtagaaaaaaaaggctaagtataaagatacaatgcttctcacagttatcttttaccattttggaaggtattaacaaggtggttacttcaacgtagaaagaacgagatggataaatgtagttattctttttacatacacatatgtgggtcaatgagttgtgagctcttattcttgagtatgtgggttaatgagctgtaagctctttgtttactcatcttgaacaacttttattatgtattctgtttatcccgagatggacttattgtctcactagtctcacctgttaatagttactattctcatcttgcatctgcctatgtggcaacgagcttaaatatttctatcaaccgtaattcttgaggcgagttatttaaattatatttaataaaacaattattaagctgattcatattgtttctctggtacacgtttcagcttctggttgttagccaaaatttaggtataatagtgacgcttcatgcgtgattggggatttaatcacgcatagagggacgtgatagttaatactaattaataaaaaataagaaaaattataaataaataagtatttagtgacccttcatatttttagtgatgtgccttgtaggatacaaatgctaaatttttattatacaacaatgcaggttgttagtattgataaataaaggttgtgtattagttgtaaaagtcagttaagagagttagttaattcttggcagttataaagctttttctattctcattttcaaaaacataaattgaactattttctctctttctctctctctcattctacgtggtatcaaaagttcttgagtagcgtcaatgtcctcgtctacctccgatcctactcaagctcatgctacaatggctcttgcccctactcccgcaactccttgtaatctgttttctcattctcttaattccttgctcactacaaagttagatcatgttaatttcctctcatggaaatctcaggtggtgtcgacgttaatcggccatgactttgatgacatcttgttcacaagggttcctcctccccaacttctggttaggggagctcccaaaccctagtatcatcaatggtgtcgtaaggattaactacttctatatgggctgtgatcatccatgtcaacgtaattcttggctctgtagccaatttcaacacttcctttactgtttgaagggtccttgaatagaagtttgtctctcagaccaaggctcatcgccttcaactcaagggttgattttcccatattcaaaaatgaggtctttccatcttagagtatgttgataaagttcaggccatctttgatgctcttacagttgctggttctcttgttactggtcaagacattatgacgtagcttcttaatggtcttggtcccgaatttaattctaatgatttagggataacatcaagaagtgatgctcttccaatagaggaagtttaggcatcacttctctctcatgaaaagtccccttcaacataatcatggcatgtatgatcactctgtcgaaatgtaggcaaatcttgcctttagaaatggtagatctggagtctctcgaccattccccaacaatcaaacatgtcaaacaaacaattctcaacagtttagtggtcgttagaggatttttttcaatttaagaacaccagagttgtgtgcaagtctgtatgagaacagatcacacaactccagtgtgtcactatagatttgataaaaattggatcactccaaaactaggtggttcacataatcatgcatatctcatagaattggagttcgattatgatgcacatggctactcctctactctggttcaagattttggtgatgatcattcttggtatgttgatactagtgctacaaatcacatcacattgacaattccaatcttgacactttttctccttacctaggtcaagaaacctttgttgttggggatggtaagaagctcttaatctctcacataggttctgctactatatcatcttctttaaattcttgtcccttgcatattgaatcagttttaccagttccatcagtcactaaaaatcttaacaaaccaatgataataatattttcttggaatttcataaacactggtgttttattaaggacaaggaaacatgagtttttttggtcaaggagaagcttaaggatagtctttacctacgtggtgatgaacttggtcagccccaagttgtctcttcagtgtcaccttgctactgctataaatgttaaaatcaatattcttgtaattcttcatttacatctgaacataaaagtgaagatcataatgattcttatattgattcatcaatcaataaacttattgtttcccttatgtttactatacaaaaaagtcttatgatgttaatacttggcattgcaaacttggtcatcattctcactctacacttagaaaatttcttcccactctaccacactcaggttctctgaaaatactattatttttcaatacttgtcaataagataaaagtcatagagtaccttttttagtatttatttatagagctaaccaacctcttgaactcattcatacatccctatggggtccttcacatgttcaatcgagagatggctataagtattacattttattcatggatgattatagtaggtttacatggatttaccctttatatgtgaagtctcaagcatttgaaatgtttgtccattttaaaagcacggttgaatatcagtttatcttacccattaaatgtgtacaagttgatggtagaggtgagtacaaaccttttgctaggttttaaactaatcaaggcattcatcattgtcctcatacacatgagcaaaatggaaggtctgaaaggaaacatagacatgtaactaaaaccgatctaactcttttggctaaagtagggttagatcttaagtacgtgtggcgttcttttcactatgctactttcactacaaatcggttgcctacacctgttttgaataatatgagcccatgtgaatgtttatttggtacaaaacctgattacccaatcttaaagccctttgactgtgcttgtttttcacacttgagaccctataattctcattaaattgatttcaaatcacaacaatgtctatttctagggtattctccatttcacaaaggatacctatgtgagaatgctgaagggagagtttacattgccaggaatgtagtgttcaatgaatataattacccagatgtctgtcctcaatcatcaacacctcaggtacaatttgtttcttccactagttattttcctactgcaagttttttaacttgttcaggttctaacactattgcttctcctgtgtatatcaatgttactactgatcgtgttatttctcaaaatgttccagctcctccacactcattatatatccatacaaattgatgttgcttatccataaatcctcctgatattcctaatccaaacatcaatcagctcccaaaccaaacacttcacccaaatactaaccctattgacccaaaaatagcctacctaaatgtacctctacctcactcaaatttaactccaacattacaccatcctcttctttctacatccaatattaatcctcatcctgttactaacaatttggaacagactcaaactaatacaaccagggcaatcttctctcatcaatctcctcactacttaatgaactccatgtcgaaatgtctcattgccctgtcacttgagtggataatcagagtgcaataactcttgcaacaaaccctgtcttccatgctagatgaaagcatagtaaaatagacatgcactttgtcagtgttggatttttacaaaaatctacagctttttatcccaacacaacttcaaagacacaaattaatacaagaattgaaaattggtattttttttaaatttgctttctaacatgcgtccatactagaaagataatattatattaactcgcaattttcaatatttatttcaggcccaaaaataaagagcccaacaacaaatcaagtatcaatgtaaatctcacaagagtcaaagactcttactctctctccactcaagtctctcattttcctttaatatatgttcggtcaagtagaagaatgagtcaaacacgactcatcttgtcacaatagtggtttggcctacacaagagaaaaagcagcccaattaaatgaaaccctaaagatccaagaaaccctaatataaaaggttcattatcaggtaattgatctcaaaccctaaagcactactacttcgacaacctcttctatttccctctctaaaaatttaaatcttttcaaaaatatttcttcttcttcacaaaaatagccgcataaataaaaactagggttaaggtttttctttctcttcttcttcttacagtcacggtaggattaggattcttatggttctaatcttttaaagcttcttctaatggcagtaataaaaatggttagggttttcttaaattatttttatagcttcttcactcttgttctacccgaaacaagaacagcccaaaataaaattttcttgctcttatcttcttctacccgaaataataagcccaaaaataatcacatttaaaaccttagaactgaacccaaaaaactttccttttaatctcggccaagaaactctccacaccaaactgaaaataacaagaacacaaaatacacacacatacaaatatcagaaatatagagtgagatgagagaatacaaagagtgatgaaagtgaaaagaaaacaccgaaactttgatctcagagttcacccaatattatcggctacttctccgtcaagctaccttagagcttgaatccattcatcaacaacaggttacaaaagtttgatctttttcattttacaactttgatttctctctttttttttctttttgaaactagcaaatctctctgttttatttttctttacatgaacacacaaatgagctatgcaaagctctcttagaggaactctctcaaactaaagcactctctcaaaatggctctctagtgttttttttttaaatgagagaaaaaatatcctttttataaactagatctatgactactgatctaggacagagccctagtgagtaactgtatttttttgtaactgttttatctttagtcttgattttgatcttgttttcgttgtaatgggtaaagttgtaatttttgggacccaatgaatagtactctgaagcttagggtatataaggggatttgtcccaacagtcagagatcaaatagctgagaagctttctctgttcgatatgttccatcccttgatcaagttacggatgtccttctccactgatcggttcaactatctcaagtccaaacttcaaatggcctcaacccctttttcgtttaagggagatgttagtattgttaaatcaaggtttggtattagttttaaaagtcatttaagagagttagttaattttgttggcaattatgaattagttagcttaacaacttcatcttcttgttttctttgtaatcaatggcttataaataaatattagatcaagtgaagaataagtttttgctattctcatttttacaaaaacaaaatgatttattttctttctctctttctgtctttctctctctcattctacagtaaagtggggcactaaagacctaaattttagtacattgatttaataatattacaagaaaataaaaaattacataacttgagagcgcaaagagactaatggaaattaaataataaaataaaattggtgatttccttttctatgatgacatatgtttgccttaatttattagttaattatattgttctcccccttctgcgtagcttagcaccgcaaaggggtccattgctgatctgatcctcccagttgaattttacgtttttttttaaaaagacatcacaagaatttgcttgtcttttggatatggaggcagacctggggttcaagggtttgttggatacagtgatggggcaaaacattctagttttaaggtggtgatgacaatttgggagcaatggtagcatcgggatggctatggctcttttgctctgttttcaagttatgctatcgtttgtttatgctccatgtgttattttattttcaataatggtattgcaataccattatactgttgatattgaaactagaatacaaaaaaaatgcctatgaccatccttatgaaggattgatccacaagacatgtggtcaatactaatataataattctctatatctaaatatagaaagtatacccatatcacctacacaaaagttgagtcattcgagatcgagcacacaagcaacccaatgggagacatagttaaaagaccttatcacaaacaaaataaatcctactattgaataatcaggttataattattcaatttttatagaaaaatctttagctgataatcattgattagttttaatgggaacttatacattaggtataggaaatctagttctctctaaacttttattgatgcttcacagctgacgacttataggttaattaaaggtgttgttagaactttcttttctaattaatgtaaatgacttggttgaccaattaatgttgagtatgatatttgagtgatatcgtcttttaatggaccttgtctaatttatatataaataaatatttctattttgttctaagaaaacaattactacaacaaataggtacttttagtgataactttttagtcataacacaatcttttgtgactaaagtgttgtattattttataatataataagtatagattagaatgtgataaatatattattatgtgaataatatatattaagagtacggtaaataaatgtgtaacctatgattttaacctacacttttgtaacctgcatgttgtaacttggagaggagttataatttgttatcacttgtaactcatgtgttgattatcaatatgaaagtacctattttttattgtaacaactatatttcataccatttgaatcctaaatctgaccactcactctttattcatcacacaaacacacaaatctaggcacattaagctattttcttgtgcctattcttgtgacagggagtgaccctcttgctgataattctctcattactgccttgggtgatcggttctccctaaaaaatgtaggcacattaagctattttcttggaattgaagtaaaatatacttccattgtgccaagctaagtatgctaaagaccttcttgccaaggctcaaatgacatgtgctaaatctcttcctacaccaatgaccagtggtcttagattgtcagctcaccaaggggatcctatgcttgatgtttaactttagagtctattgttggtgctcttcagtaccttactatcactcgacccgaactgtccttcagtgtaaataaagtgtgccagtttatgcaaaatcctttgcaaactcactgcaagttataaagaaaattctcaggtatataagtggtataactgaattcgggcttcatctcaccaaacctatgtcctatgagctgacagcctactgtgatgccgattgggcatcggatccagatgacaggaagtccacttcggggtttgccatcttttttggaccaaatttagtttcctagaagagtaagaagcaacagacaatttcccgttctagcacggaggctgagtacagaagtgttgcaaatgtaacaactgaattaacatggctgtaccatttgttctcagaattaaatattcacttacctcagcctcctacggtttggtgtgacaacctaagcaccattatgctcactcaaaatcctgtgttacatgctaggatgaaacacattgagcttgatttgtattttgtgcttgaaaaggtgttaaacaagaccattcggatcaaacatgtcgctgcctatgatcaacttgcagatgagctaactaaagcattatccagctagagattcattgattttagaaccaaactcaaaattgaagaccattcaattctgagtttgaaggaaggtgttagaacagatagttagttgagttagttgtaactaattttgttataattgttagctgtcataagtgttagttagctcttctctcttttctagttttggctcaatgtataaatactgttctattgtaataatatactgagactcttttttctccttcttctttccttctctttcgtttctctggttcttcaatggccaatcggcttaacacataaaaataataattcataattagttacaataattttacttttagtcacaaattttgctgtgactaaatgtaagcttttttatacaaaatttttctttctattaattattttacaacatatatatatacaatattattaattaaaattaagtataataaacaaaattatataatgtagcgtataaccccagctagatatagatgcatctatccgaacaaattaatacaatagcttaaaaaatatcataaggatatagttagaaaatggttctaagatgaaattcacactcactttatttttttatgtatgtaattaattttgctttacaaaaatgtggaactcctcaatacatattgactaactagtaattaagtagctctaggtttccccatttttcttaattttaaattcttgaatattaatagacctaagtatatttaagtaaacatcaattttacgtagtcctttcattatcattcacacttacgtgcacataactattatctcttgatgattataaataaataaataaataaaagaatttctccaattaattaattaattaattaccaaaaatgaagtagttttagtcacaaccaaattcgagatcattcaaatgaaatttttatcacttatgtcatctatcactcaattttcgtagctaaatatattaattatataaaagtttaaattatataatacatattaatattattttagaaacataattaatattattttgaatcatgtatattttaatcatttacaagtttcgatcttacttaataaagaaataaacttttaaaaaaaatatggaatttaaactgataataaattcaattataggatctaaaaatggggactaaaaatatattaacaataatatttgtgactcaatattaattt

SEQ ID NO: 14260 - DNA, 7276 bp, Cannabis sativa
tgggacaggacaatatgcgaatttcagtggtctccattcatacatattcatagatctatctccacttttataagaataagatgaagaagacattgaaaaattgaagagggaagaacacaggcgtgaagatcccaaccctgcgtgaagcccaaattttatttacccagacgtgaagaacaccagccgtgcgtgaagaatagagaggaaagaggaaatggcagctagggttctaagtgtttatagttctctttttataatgattttatttaatttgttgtttcaattcattaaagtaaaaaaaaaaatatttaggttacattaaaatatctacatcacccaacattaatatccacatgtcttgccacattattttttatttaaaataatactgccacgtaagtcattaaaagataaaattaagtagaattgaacggaagggctatatttctgcatttgttataatttgaggactattcgtaacaaacagtatatattaggagcaaattttagtagggtaaaaagttcgagcggcaaaaacactatttattctatagacatatatttagatatgacaaaggtgtgtttttttacagtcaaaggtgtgcagggataattagagcaagtagttgctaattatagacgttggactaaatttgtattaataaatggaagacattatttctcttttataaaaagtaatttaatcacttctctactcattgtcagtataaattatatagtaaagccctcttgcaatgatctgccattattatcctaagaaaaaattataaaataattaatatttaaatgcaaaaagtaagagctagataaaccactcgaatcaaaaaagaaaaataatcaacttttaaatcatatatatatatatatttatataacggcttcagattttgagactcataacccacttagcttggggtttgagatttaatctatttttataaaaaagtgtatgagattatcttgtgaactagatgagaatattaaatttatttcacattagttttatgtcgattaaaataaggccaaatttatctctattattgccaaataattaaaattaatattgtcagaaagtatgataagtatgtaattatgtatgatagtccttttgaatgtaaccaatcttttattatatattaaggctaagccactaagactagtttagtggtgaggaagagatggaaatgtgagaaactacagatttgaatccaaaacttctaaactattaataaataagtgatatcactatacaatccaaaaaatatttataattttttttttttttttcaaattttgatagcaatagtagatatgatatgtttttttcactatacatataccaaggacgaaagaagaagctaagatcaaggggccaaaaaataaaataataaaagagtaaaatactaatttagatttttattttgttaaatggtaaaatagtactctaaactgatttattgttaaaataaaacttaactgacaagattgattatattttttgcaactgtttatgttacaaattatctataagttacttatattaaaaaaattgttaaaaaatgaaattagaatactattaaatattatttaaaaaaatacaagttccaacaaattatttaacaaaataaataatttaattagtaactttttaaaatacggataaaaaatagtataaaagactaaatacataattttttctccaaaattctaaaatctacttaggcctcccttttagagcttaagaagatgttgtgttgtgtttttagtttttaatttttaaaagtgagaatagaaaatagtttattgtcattaaaaaaatataaaggtgtttggcaaatgttttttttaaaacaatttttagattttttttttaaaaaaacttcaatattctacaccatatcacgacatgaacccaacccacctcagacacggacccgcacgctagaccaggacttgtatctaaggtttggggtcggtctggtctccgagtccaaggtctaggtttggttgggtcagggtcgaggttcgaggttgggattggggtctgggatcgggtcgagttccggggaccgagtccaagtctagaattcgagtccggggtccgagtcgaggtccgagtatgtgagtgaaaatgtaaaaatgaatatgttagacaaaaaataaaaattgattttgaacatagaatataactttttgatgttttctgctttttagttttttgttactcaatttttataaattggtcaaacacaccctattagttttaaaagttgttttctatttctaaaaactattaatctcccctaagtagttcttttcctcgctgatagtgtagccataccctagctatttctgttacttaaactcataattatcttcaatttatatgttctcttgtaacacttaattttattgtttaataaaatatttcccttcataataaataaataaataaaatggttatcataagaggagtttttttttttttttcttacatatctcaataaaatatactactagataaaatttagattataataataaaaacttagtggaacgtcaggtcaggttactaatgtgcttataatctagaatttgtagtcccaagcttcaatcaatttgaattaaataaatttggcatcagcagtctgatcaatttggaccttttatttagaaaaattgaaacttgagtttagtataattttatgaaacttaaaacaattataaatattccataaagaaaactataaatatgtaatatttttatatatatattatgaaatttgaagaaaagagtttgcatcattttggtcactattacattcccttaatctctctcttttctttttccatgttacaaacaaaactttatagcttggtgcaagttgtaggatttcattatatctaaaaaaatatttctaagcaaacccacaaactataaagacaaagggaaaattacttcttagaaagcgttactaaattgtatttcaagtttaactatgcctcaagtgttgctaaattgcagcttatatatcttatgcagagttatgctcactgctcacatcagaaattcatacaaagaaattgacataaaaccagatcccacaaacgagatgccattttactcaattttactaaaagatgaaaaataccaatattagttttggaataagccaaaaaaaaaaaaaaatgaagaattagtgaatgaaaaaaccaaaactcttcattttcatagctgcaacacgcaaatacagaaactatagtccctctgagcataattattgacactttcggctcaaatcagtttattattactgattaatgcaacaattattcgtcgaaatctgttcctataaaaatctgccattttttttaggtgccttactcccttctaggaaaggtttgctgcttactttatcactctgcttcaagaagaacagaaatctcaatagacacgagctttaggtgggaatgtctcgacttcgtcatctaatgtgttcatgtgaactggcctgtaatctaggcgcactttctcattctcccaatatctgcataaaatgtcagccgaatttggatacaccgtaagaaaaatcgaatctcatcatcaccaaaatttacaaaagcacaaatttacgaaatccagttagtatacatcttaaatcccaaatgaaaatgttttaaactcgacggaaatgcttaccccaaggtatgtttcatccagttttcatcatctcttgtctgcaaaataagaagaatttggtttagggacggactattatctagaaactataagaaaaggatatcaacttaaaagatggggaatactaacagagaagtcttcacgcgcatgtgctcctctgctttctttcctggcctcggcagaatgcatggtaatacaggcatttatcaaaagattctccagctcaatagtctctattaagtcagagttcctgtcaaaatattgagaatcagttcatataacccgcctaaacacagataagaaagctattagcatccttgtacacataacattaccatatcaaacttcggtctattactttaacatcgtggaaactctcccatgtcttgtcaatcaagttacaacctgcaaagaaacataaaatttagaaggtaaacattatgacaacggatgatagaagaaattcaaataacagcattccttgccaagacttgaaggaaattatagctcggttagatttaagtgcaacaggtagcgactgatagtaagcctttgtaaaatagaataccttcttctaaagtttcttgtgtacggaagacagctgcattattttgcatgacacgttgcatattcaaccgaatgctagaagttggtgttgaaccatttgaattccttagtttgtccagccatgcaattgtcttctcaccagcatccttctccaaaggtttttgagtctctcctgcacatgcacaagctccaagaataagtttcgtcttcatatcggacggttacgtgcaaccaaccatttatataatagcaaggacaatttaacttgcctggtctatggatctctgcaactctatttgcacaagctcggccaaaaacaacaatatcaaggagggagtttgccccaagcctattggcaccatgaactgatgcacaggctgcctccccagcagccatcaatccaggaattactgtatctgggtcatcacctttaatagttaccacctgagaaatataagagtgtgatcgtgttatggtactccaattgtgagataatatccataaaccaaaaaaaaattaaacatcaaaatacagaaattattcaaagtgataatactatagccaattgcaagagttaattctttgggttgattttcctacctcgccatggtaattggttggaataccacccatattatagtgcacggtgggtaagacaggaatgggctcctttgtgacatccacaccagcaaatatggcagcagtttcagagatacctgggagcctctccttgagcacatctgggggtaagtgattcaagtggagatagatatggtccttcaaaggtcctgttacaattaagcagctcaaaaattacgctctttactctttttctaaatacaaaatagataaaactgagtctattacatcccatatctagatagaaaaataacaaaatatgtcatgttctggaacacgccctacctacaccacggccctctcgaatttccatagtcatagatcttgaaacaacatctcttgaagcaagatccttagctgtaggggcataccgctccataaaccgctcaccttcactattcctgagaataccaccttccccacgagatcctacaagaaaagaaaagaaaagatgagagagtgtgcaagtatttcagcggtactccaaccaaaaacaactctaaattaaaaatattaatgaaaattgaatgagtacataccttcagtgatcaggcacccagcgccatatatacctgtagggtgaaactgaacaaactctaaatcctgcaggagcaaaacaacaacaaggtatacataaaaatcatgagacactcacaatggaaatcaattaacattgagaagtaagaaaagaaaaaaaaaaacctgcagaggaaggccagctcgtgaaaccatggcattgccatctccggtacaggtatgagctgaggttgctgaaaaatatgtccggccataaccctgagagataaacaaaagacagaggcatgtgttagtgcatcatcgagtttactggtttcagaaataggcccaaccagagaagaagaaaatgcaataccccagttgcaagaattgttgaggcagcgcggaaacggtgcaaagtaccatcatccatatttaatgcaactactccttggcaggtacctacacataaagttacaaaaaaaataagcaattcatacaagctactaatcccatgaacatcactctatgacactagcataactcaagacttataaatcaggaaacatattaattgtgcgtaaatgcatattacttaatataacatcatacacactgttccgtaaccattcagcgattccacactagaaatatacagcaactattactatggttattcaaaattattaaatattgcaagcacatactaatatcattcaacttttaacaatgcaatagagcaatccatgtttcagtcatgtaacatttcaaatatctttaagttttgagtccttgagtcaaatttagtaccatagatatgtagtaattccaagctaaagaaaagagtacgtaataactcaccatcactgttcattattaggtcgagagcaaaatattccacaaaaaactgtgtattgtgcttcatggcctgcccatatagggtatgcaataatgcatgcccagttcgatcagcagcacatgcacaacggtacgcttgtccacctacaaataataatacagataaaaccaatatcagacagctctcaacagaaatcactagctaaccaacttcaaactggaatcagatgtctcagtcttacctttcccaaagttaaggctttgaccaccaaatgcacgttgatatattttgccttcttcagtccgagaaaaaggcagtccataattttcaagttcaattacagcttttggagcctctctacacatatactggattgcatcctggtcacctatttaaaccaaatattttcttgtaaaagaagtatcttgaaaagaaatagtgtgcatctatgtgcatccgtttagcatgattcaatcatgtctcaaattttgcataaaaagcttgaaattttagaacaagcaattttttttttttttttgaaattgaagctctgttaaaaggagccaataagcagatgttcctatatatgctgcctgagtgtagaagagcatccatgaaacaactattaaatacataacttggaacaagctatacagatgaaaggatagtcacaaaccaagaaaagaaaaacatagaataaacctcagtaatttcttatgggcatatagtttttgtaataacagcccagtaccaaatgaaatatgtaaatattctcttataaaccagtagcttacctagccagtcacttcctttaacagtgtcatacatgtgccacctccagtcatcttcagtcatatttcctaatgcagcattgataccaccctaaaagagaatccaacaacagcaatgaattgtataaaacaaatgaaggaacccatttatacagagtcaaattgagtcggtgaagcaggata

SEQ ID NO: 14261 - DNA, 13596 bp, Cannabis sativa
  modified_base (12948)..(12961): a, c, t, g, unknown or other
catgattttggcggttttttttttcttttttacgactgattgacaaaagtaataattacaatccttctttcacaggttttaatgtggagactgtggaatacaagaacattagcttcacagtttgggatgtggggggtcaagacaaggtatgaacttttgatgcttgtttacacatcctttaagtagccataaaagcaagtttatgagcctgttcattttctaatgctttagttgcccttatgattgatagttcaacattgtctatgctttatgttgctctggaaataatgagttaatgacctgcatattccatttcagatccgtcccttgtggaggcactacttccaaaacacacagggtctcatatttgtggtggacagcaatgacagagatcgtgttgttgaagcaagggatgaattacataggatgttgaatgaggtatgttgacaatcgattttatatattagtttgcattaccaattgattaaattgaatgactacttatgtataaaggactgtctttctgttttagttatttgaaaatcattatattgttggcagcagtttagaaatgattataaaatgcccacttattgtatgctattatcagtttctgctcactgcatgttcttcaatttgctaatttccatttacatattgttttctctacaaaataagtgctcatttaaaagaagaataacttactttgctttgctgattctacaggatgagctgcgcgatgctgttcttcttgtttttgctaacaaacaggatcttccaaacgcaatgaatgcagctgagatcactgataagcttggtcttcattctctcaggcagcgccactggtagccatctaatcttcatcattacttcgtttaattacacaatgctcgacactacagaatctaatatttgttcaattttccaggtacatccagagcacatgtgcaacctcaggagaaggattgtacgagggtctggattggctctccaacaacattgccaacaaggtcagcctttaatcttattttcaatttgtgtgttcatcgtttcaaattgcacactattagtaaaactcaagtaataatgaccattgaccagaatcttatttcacctgcattttatattttcaagtaactcatacgtctatctcctcttacataataatgaactcagaaaattgaatagtatttttttttttgcatattctaaaagttgaatatttgttatactaaattgtatttctcgaattataggcataatccctatgtggagcctttttgtggacaatcaattctggatgcaggggtgaatattatctagttcttttttttttctctttttttgtcgagacaattgaattgttgtgtctattgtcatttggtgacaatcatttaggattttgtttctaatggttatattgtaatagaagaagaatggtcggttggatatatgcccattgagcttttgtttggggtttaaatacaatgctgagttgtaatcaaaaactaattcgacttttaatttctttctgaattgtatctctgtctggctatatgttactatttcattttattcattcaaaaatgattttaatcagattaaaagcattttttttgtttgtgtaccctatgaaagtttgcttttatttaaattagtctcaacaactttgatttcctttataaaccaaggttcaaaatggtgatgaggtaatgattttgtactagttttgaaaagggaaagcacactcgcaccaatcaacatcagattcttaaaacataaaagatcatatgcaaattgcgtttgtctatatgtaagacagactttaatcttggataggaaaaagactgcttgacttggaatttctgtttacacagtgaaaagagctaagaattggcttttcggtctacactgttctattaacctgttgccgtataatatggtaatattgccaaacaatattaaaccacataatcaatttagatggccaagaatgatttatggcccttttttgcatcataggtccaaaaatgagcttgggaatttgggaccccttcgaaatgacctgtggcctattttagttcatgtgtacagataagcgagacatgtcgattacaaatatcaaacaaatcttgtacattccattcatttgttaatcgcatctgagctagaatgatccgaactcgaaagcatttttcttttgtccatattcgttagtcccacatatagctaagatagtgttagacttgtaagatggattaggttccttggcaatgagaagagaacagttggtaactaatagttcatcttagtcttgtactagcaaattatattcattgatatcatgatatgtgaatccacatgaatttagtagtgaatcctaatgagttactgtcttttgcttttcttgaagagataaacctctgcttggtttgtagcatcattcaattgacccttataatgaattttggctaaaacatatacttgcttgcctcgcctgtattttgatagagctaagatcctagcctttttttctcttttaattagtatcagtaatatttagcatttaatattactataataatatcatataaatatttcaattttatgtacaaattttaaccactttttgatttttattttttcaaaaaaataactatattaaacaagaaaaactacacaacattacacttatctgctcttaaaagcgcaacagcacaagataataaatcctctggccaaaacaaattacaattatgactaagagcccaattagctaaagaatgagccacttgattacaattcctagtggtaaaacttatatttgtacaatcgtctaggagcttgcttgctttaatctgcgctatcggaccccccagtttgcacaagggaccacaatcgctttaagatgattaatgaatgtttggctatttgaagccactgcaaaatttctgatgttgagtgtctgagccagctccaagcccgtctggatggccagaccttcagcaagcagcactgtgaaacaaccacaaaagtaccttgccccaaccgcaaccaaaagccccactgattcctgaataattacacccaaactgcctcctggtcgacccttattcaaagcatcatcacaattgatcgtgcaatgcccctcagggggagctttccaaccagtcttctccctatccttcactctgtttcggtcagctttccaactagtcttctccctaagtttcactccatttggggagtatcagctttctcattagccctgggaaaaaccacaaacgaataccaaggaatctaatttcgatcgggttaagattgaagaacaatttagcttatgttccaataaacatttacctgtagtaggttgtttatgtttcgatttcctttgaggaggaatcgcaagggtaacactttcgaaagaggcagtttcaccgctgacacctaccccctccccaaaacgagagcaagggattgatgaaatactacccaaacactcgacttctgggtcaatgggctcagtgtgctcaacaccttccttggaaggagaacttgagactaatatgaattcaacaaaaataggagcagtgctcgaaaagagagagtcaaagatttgtgaagaaatgcttcgattgtccacgttttctattatatactaagaaaagggagagaagaaataattctttcaactttaagaactaaggattaaaattgtaggttgagagcacagacagttacacaaagatttgattctatttcctaataacagaggaagtaccatgatccaaagtagtgaactagtaaaatgaaagaacccagtaatttagagagagacaaacaaaaataatgtaaagatggggtaaaaattaaaagcatcattttataagaaatttaagtacttgaggctatctcaagtggccataggtaggtgtgtgtcttagaagtcttgggttcgagtctcagctaaaacattgttgtaatatataacgcttaaataaaaaaaaataaataaataaggattaaaacctaaggcccaatagattaaacaagacttaagcccaaacaaaagagaaaacacagcctgaaaaatccataagaagttcaataattaaagacaaaattgtagagaaagcgcacacacccaaagttaatacaaaagctttagtcgagatacaagaaattgatagcactagaaaccaagtcgagatagaccaaggacgacactgtgctgaaataagtcaagaattcactaagatcgaaacgtgccaagataaattaggaaaaatattaaggcagaacaaatcatacctcaatcccataaataaaaaaacaaagaaagataagataaagtagagtttaaagaaagataatcataactttagaggaaaaaaactaatcttaagagaatttagacaattcataagaatacgtgtcagccacaggcatttaaagaatagcaagaatgtgtgttaatacaagcattgaaagaataatagcacaactatgcatgaagaggacgtacaatgttaaaaagcaaaaactcacgtaaaaggcatgcattatgaattgaaagaaaaaaaaaatccaccaaaaaaaatatattgacaggataatttgatcaaaaagaaacttaccatttttggtaaaaacaagtgtctttaatacctaaaaaaaactcaatcagaatttcattatatatgatgattaaatatatatttgttggtattagtgaaaatgtccaaaatattttatgtatatgtgttatataattacaatggttaatcagtcattgttttccaccaaacatattttctgtcatgatagcagcttcttccctctctcaccctaaaaataaagatattgttttcactttattagttaatttacacatttattacagttaactttggatttcctctagagattttctttgaatcgccattggcacatatattatttgaaaagcttgattgtaactgtgtagtgctaatgtaatctataagtttggtaaaagtaagagtactctcctcttattttgttttattcttcagaagaaaaataaaataaactgtggtgtatgtattcagatatctttatctttttcatatatatgtttttaactttgttaactttacttgagaagaccgttattaaaattccattccatatcacaacaattcagtacgtaggagaataatattgaccatatattacttgtatatatattgtataatgtgatgactatatgaagtgaagagaactccactctttatttattgtcaattatcaaatatatattttattcatttcattcaattattaaattatattttaaataaaatttgtctaatttaaatcccctagtaattaagtgaagatgaattactaaattatagatatttgaggtacgttaacgtttaattaattaattcacctatctagaaaatttgtccggtgtacacatcaattcatggtcaaatatcaatcactactaattaaataattggcccaaatgtttctaacttattagtcatatttgctaaatcttgtaatactatatcaatgtattaatactccaaaagtacctttccgaagctggacaatacaatgattcagtttgttatttttagttgagttattatatatgtatatagtaaaagggctatattatataacatgaagcattaatattcaagaagaaattttatttatatatatacatgattgtaatgtatattagccccttccttaaaattttggcatccaacctattctatataattctatatagtagcacttcaaaatcaaggacccacttagttggcctaagatgctatttttctttaatatgtttctccataaaggaaaatgacttattcccacttggttcctttacgatttccctggccgtaattagagtgaacacaattgatatataaattatatatataacggcatccatcgatcggtccatatcgattctagtgagtgtatgagtccagtcatactcaatctgaaccatccatcttgatgataaggctctctatagacgaatggtgggttgaacgactagttttgttcatttattttatttatttatttattttatatgtggtaataactaattacttttcttttattaaaaagaaaggtaacaaataatttgcatctggatttcatttgggattcatttaaacctcatttgacgcctatataatcctctataacccgacattagtatgactcaggaacaacaaggttagtggagtggcttcctcagtgttgctatatttactttcctaattagctcctcacatatctcatcactaattaaaatgggttcagaagttggtgtggaggtgatcaataatggtaagctggtctcagctcatcacgtgaataataatgataataataaaagggcttacgtaacttttttagccggtaatggtgactacgtgaaaggggtagtaggattggccaaaggcttgagaaaagtgaagagtgcttaccctcttgtggtggcaatactgcctgatgtgcctgaagaacaccgtcacattttgaagtctcagggttgcatagtccgtgagattgaacccatctatccacctgaaaatcagattcagtttgccatggcttattatgtcatcaactactctaagctccgtatttggaatgtaagtattataacataaacatatattatatatcatgtctatacttatggttaattacttctttttcatgttctgatgtattgtgttattgtatacatatgtatatatatagtttgaggagtacaggaagatgatgtatttggatgcggatatccaagtgttcgaaaacatagatcatctatttgacatggaagatgggtacttctacgctacgatggattgcttctgtgagaaaacatggagccactcactgcagttcaaggttggatattgccaacaatgccctgatagggtcaaatggccagctgagatgggttctcctccaccattgtatttcaacgctggcatgtttgtgttcgagcccagtcatgtaacctaccaaaatcttcttcacactctcaagattactccacccactccttttgcagaacaagtaataataattctcttctatctctttctttttaattactattttctcctttacgtataaaacaaaaccctttcaagtatatactagtggtatttattatattaatgtatatttatttgtgtggttgtgataggatttcttgaacatgttctttgaaaaagtgttcaaaccaatacccctagaatacaaccttgttctggccatgttatggcgtcacccagagaacgtcgatttcagccaagtaaaggtggcgcactattgtgctgctgtaagtactttgtctcataatagataatgaaaatacatacatatcttttagatcttattcccactaaataatctttattcctctctaattggccaaataacaatagggatcgaaaccatggcgtttcactggtaaggaagctaatatggacagagaagacatcaatatcttggtggccaaatggtgggaaatatacaacgacgagtcactcgactataagaagcctgaaaacgcacactcaacgactgatgaaaatactaatttctcaaggacctcatcgatcatggcttctatgccagagccaaggatggcctacatccctgcaccctctgctgcctgaactttatcatatatatatatatatagagtactattatatgatctgatatataaacaaatttctcttttcgaagttggtgtgtgctcctactacctaattttggtacaccttttcttacaggctgtttacttttactagttagtaatcaagaattaatacttttatagattcctcactcaatgtcttataaccaagattttatgtttgttactttacatatgtttagtgcggagaaaaaaaaaatatttatattacataaacttgtattgaatgcataaacgaaacttgtccttttgactcggtgttaattagtttaattttaatactctaacttgtcaaaaatcttcaattttcagagtccaaattctcctttttctttttctgtactcattaaaatacctttcttaaatgataagcaaaacttctaacaggccccgagtaattattttactttcaacttaaatatcaaaattttattagaaggaccttcagtaagacaaaaccgagaagaaatatataaaatataattattgatttttttacaggaaatatataatattcaattagtttttgttatactcgtaaaatatcactttaacgtagggtgtggattcgaggacaaatatttcgctcaatgctcaattacaatattagatgatggtgtaatgtaatagcaatgacaaaaccaagcgattggaatgaattgaaaattgaaggtaatagaatatcgttgtggaatgtatggctaaaaactgggttagcttacacgtagcggctttgaattggcctagataattttgtcaaggtcatcatggaatcgaccttcattggattgttgcccaattctagattctcaaatggaccctactcaaataatactttggggatcaacactaccctctttgtatgtggaaaggtaatcatcatgaacaattaagtgatcacattcccatcatgctggatgaaacggacatgactagtggcctagtagcaatggtttagaattaaagaaaaaaggtcccctcaaaataagctgacttaatacaattgaactctttaagtttttcaatactacatgaaaacactttgtggttgattttattgaattacaacaagtgaaatccaaattttaaataccaaccacataaaagatgccaccttatacatggtgttaggccactcactcgaggctcgctcattaaggaataaggtgatccattgtaagtttcccagtcaaagtactcaaattgtttcctttttgttttaggggggagacacctaaactatatgacacatatccaagctagctaggtgaacagaacaaagaaataaactagaccacgagaactagtcatgtaatatatgcaggttgaaaaattagttaatcaattatatatatccatgggactataagcattctcaccttcatattcatcgtattccagccctggttcctgaaagccgcaatcatcttcaaaaagaaacggagctacatctttgcttctctggggcttcttgtcattcatttcaatgactgaaataatcttttcatttatgcaagcttcaactgtttcaccttcaacatcttgagactgcaaaccaagtaatgaaaagcattctgtttggaaatctatgtcctcggaagacaaaattaggccggccattgtttttgccagatcaggagcatgactgcaaatctgagaatgaatgcagccgtttttaaaatgagctcaacataaattaacttaagaaacaaaaaatgaaaaactaattctgaataccttaagagcatgagcacttaagagtactccagtgtgtttttccctcaaatcatccagtgcaagcttaactgcttttttagtaagattactgtctagttgaatctttcgcctcgttgatggtaccaggaccttggcataaagtcaaggaacatacaagtgaccaaaaatgcatactatgttgtagaaaaatcaattaagagcaagcaatgccaaaataaaaacaaataaaatgcatgagactatgagagtatgacagtgtataggatattgctcattgtatagatggaggacgatatctatgtgagcatgtgcaggtaagttctcccactctattagtacattgctacctcgattctcgacactccccaattccaacccataacttctccagtcgatgctttgcagtgccttcaaagatgattgagtgatcgtacaagaagagaaatctttgaagtataaaacctgaaatgaaatagttgtataatcatagttaaacaaacaatgaggaacaaaaaccaaacatagcgagtgtagtaagtattgcataaatcaaatcaaaagcaacttgttctgttttagcaaaaaaaaaaattggcacaactgtacaactaaatggatcgaagttaacctctgttttagcaccacatgctctgaagcaagtacttgtttggtctgatatttcacttattacaatcactgcttccatcaccagacctgtatttctacgactttttgtttgacttaccattccactcccaaccttgagagtcccactacaaagatattaaaatttagtgttcagacctatctaaagaatataaagaatgatttaaggtaacaatgaccttactagatgatgagacagcgatttatgtaccaatgtgaatattcaatattcaaattctttatcaagattttggaacatcagtagaaaaacaaatatgcagcaaactgcctttactattatctatcctactaacttctagaacaatgcactctaagaccaaacacacacatacagagaaatgtcatgaattgtttataaacttacgaatttgggaaacatgagtggcactgtgtatttaatatatttccatgcttcaatacatattcttcaaggcctgattttaaacgttcaaggtttgaagctgagaaaggcaacggattccattcatttgctaaaaagagatatttgtcctttgatcgaggagtatcttcacgttcaaccaccagctcaattgcaacactctggagtaaggaagttaaaacagtcatgctacttttcaacatcacatttttagacacgttgaaaaaattatttaaacaagcgcaatccagttggatcactaaaaccttacagaaacatacttgaattgtcagtatacatgcttgcctcttcaatgaaaattaagtattttttataagcaaattatataaaagttcaaaatataagaacttaccggaatcttcagaacgagtatctgtaaaacgatatcaaacacatttgtattagtactcagcaaagaaatccagatggaaacagaaagggaaatatagtactcgtcaaaagtttcaagctactagatcatatgatttattattcatatcatagcacaaacaaacaatcttatcaaattacaaagacacaagaaatattatccaaatataaaggattcagagaaataatttacaaagaaaatgacaaaagtatcaaaccttttgcaaaaagcacttaatctctcccaccaagacatccagatttttggaaactagcaagcatacttcagtcccactgaattataaaaaaaaaaaaaaaaattgtagaaaagcttataaaaataaattataaaaggaattgtttaaaatatccagaacacaagataaaagtcatttccatgcctgaatttcacaccattctttggttttgaaggtagccttgtcaaccttttttcagaaacacattctctcgtacttaacagataattatgtatctcatcatcagaaatacctgatattccaaaggaaatcagcaaggaaagatactacaattaagaatttgttcatgtacactaatgtcttaaattcaaaatcatcaacttaatcatgatgacacatccacttgtgtgatagaatttaaacagatccacagcacatcacataatcatgatacaaatcttcaatcggaaaaagttcaaatcaaggacaaactattccaatcaattcaacgcatatacactaacttgtttgatagaatttgtacaaccaagaatttcatcatgatctctaaattatagaaaaagaactaagaaacagcactaaagtctgctaaaacaaactacatattatttttaacaagatctagatcagcatcttcaaaatcattgcaacatctcatcagtttgttcaataaatcttttaacaacatcctatcacgcacataacaatcatgatcggagaaaacgtaaagcaaatattcggacaaagaaatctagcaaaagtgaaaacaattaaacaaaatcgacacattttactgtggattcattagtattactcacttgtggtggtaacagaaagcactccatctgtatcaaaacggcaacgcatcagatctcatcaacgccatattatataaaatatacatttatatatatatatgaagcatttccattacttaccccaatattcagagccgaaatcttccgaacagagtttcaaatcaaaaaactcgtccaaacagcttccgataccagtatccgagactgtacgtaatgatgaattcaacaagcaatctaaattcgaactcaaaaaatataaatacaaaaaaaaaatctaaaagaggaatgacggatctgacttgagatttgaacgttggaatgaacggagaggcggagagtgatggataatctgcaaaggtgttcggaagctcggcatcgttggaatgcggaggatattaactgcaatgcaataatgttggtaaaatcattgtagttgtagatgatgatgagatttgaagaaaagcaaacgatatcgtatatggaatttgggggccattcttacatacatgtagagagagaggttgatattcggcgacattcatgttcatatgaatcatatctcacactcacagtcactcgtaataatttctttcaaaaacactaactcccgcgcttttcaaattttatactactttttcctggcaaaccctcctgatttactttactttagttttggcctgatgtgtattactttttatatagtttttttgtaaaatttttgtaactaggaatcctcaaaacaaatttttattctggttttaatttagtgaaatttttattattattactaattttattaaatagttaacctactattacaaaattacgttttaaattaaaagcacacaagtagtgtatctaaaaattagggggtgtagaggccgaaannnnnnnnnnnnnnaatatcacatgcgatgtttccaaagaatgctcaaacaagattgggttagactttttgactagttatgaagatacaatcaacataccaagcccaataggcccaagacgatacagtcaagtcagacattaacattatccatgatccaacattgagctcacgatgatccaacccgtatacgagactgaatcttatcactcatctaacgatctctaaagtgatcaatcaaactgaccacacaaataacgatctccctgatcaagtgagagaggagtgcttcacaagaggggtgagcggtcatgagtaatgtcttttcatggatgcctataagagccactctcagattctgagagaggcacatcaatttcagtcatctcaatacttcttacttatcgttcactctctcattctctctaaaactacatacttatatctacaatcaagataggcggtaacttagttcgatcatttattctcatttttttattacattgttaatcccaaagtttctcggttattcttttctttgttctacaggttgtcggtgcccgcttacaatcatctacagggagttacactaggctatgtttgataggaaggaaagagagtagaatggatggggagggtggaaaggatgg

SEQ ID NO: 14262 - DNA, 10315 bp, Cannabis sativa
  modified_base (7750)..(7756): a, c, t, g, unknown or other
tatttgttggacgaagaaaatagaaaacttcatttttagtattgtttaaactatattgtctttctggtgaataggcaaatagttgttaagtgggttgtaacttcgatggtccgagggaatgataaaaagtttgcaattagattgatgttcatactaaaaattcgatatttccttggttctctctgaagcagattgtattttcttgactacttctatatgctatatgttagatatctctgctctacatggcttgtttgtaggggggtgaatgactttatattattgcattgatggagctttcaatgtaagcattaaagattttttttttttacatgaattacttgtgaatacgaactggaaatgaagttgttttggtgattttttttattcctttcgcacgctatttgctatttcgttttggatgtttttatttaattaccttattatttgtcatgctagatcttggttataataaaaactatttcttctttcatgcttcattttcagaaactaaagctacacaatattaatatcctatgacagtgtttctttggttcttttcccttttttaagttcagtgcttaaccttcttgtttcgctgcaggataacaaagaagtgcaacatcacatatctgtcttgctctttgttggattgacttgtggcttcatgatgcttttgtttacaagattttttggctcatgggctctgactggtaattaagactgggccttagtttcagaaatctgacaataagaactctcttactgaatgtttgattatacttaataagttaaatcgtaggtgttattgataccttgaaaatttcttagtcaatttagtgactgatgattgcgatacttgtactgtcactttcagcctttactggggcaaaaaatatccaccttgtccctgcagcaaacacctatgttcaggtacgaaaattttagttgtccacatcttctttctattatttttataacataacgtttttattatccactagatgagattcaaaagagtaatcaagcagaattttccactttagttttggattttctttgctcagtagtttgtgtgagtactgaataataccatgtgtcctgaagcaatgtatcacgatcttttcaggacagtcactcattgcatcatacttatagttttccttagttactgttcatatgaattgtatatattattcgtttgaggcacttatgaacaatgttttacccaatattttgtgacattggcattagcaaaatgagaaagaaaatgtgaagggttcttggatattctaatagaccgtggatgcatgaggtcttattattctattaatgttcttgtataatcagtacttagcttcttttgaattttacttcaatgaaatatactatttgtgtggagctgtggataaatatccaattgaaccaaaaaatttctcttggtagattcgaggcttggcatggccggcagttcttattggttgggttgctcaaagtgcaaggttattgatctcttcttacatgttacctgtgtattaagtttaaaatatacaaatgaaccaataaatttgctggaaaacacggctttcttttctttgagtcactctcacttctaaatacttgataaagaatcatagaggcctgatgattatttttaacacatcgaagtagaatttatctggctaggtgaattttttttattatttttcatgaggatggatttttgagactaaattttaaaaaccaacatcttagtgatggctatctgactatattgaagttatcgtgattgttttaatgctgtctttggtttggtattgaacagatgttactttactgagtttgtattgtaatgctgtaattctgtttccagtcttggcatgaaagattcttggggacctttaaaggctttggctgcagcaagtgttataaatggggttggtgatataatcctctgcattgtttttgactatggtattgctggtgcagcatgggcaacgatggcatctcaggtatgttggatgaacattttgatttatttttgtacttggtgttattatttttggtgtacttatcaatttattctagattttgacccaaaaaaattttcattttgttttgttacacaatggatctaacaataacaagtttaggttgttgcagcatatatgatgattgaaagtcttaacaagaaagggtacaatgcatattcaatttccattccctctccgaaagatattctgacaataactgagcttgctgctccagtcttcataacattgatggccaaggtccatatttttccatcccatgaattgaaatgatttttttttttattattatttctgtgaatctaaagtgttttaacttttagatagctttctatactctcctagtgtattttgctacatccatgggaacaatcacgacggctgctcatcaggtttcttttacacttggcttgttaatttctctactttgatttgtttcttataaagctgaagctgatgaatacttgattacttgactgactctttgtcttaggtcatgatccaaaactgctttatgtgcactgtttggggtgaacctttatctcaaactgcacaatcatttatgcctgagttgatacatggagtgaaacgtaatttggaaaaggttcgtgttacttttacagatgttgtaacttgtaaccactaaatcctatatcaggtttcatcatctgcacgagtttattactaaaaacggttttccggtggcagtggcttttcttgcgataaacatgtttagatactcctaacaacactttcttgtgttataaactgatagattacagattaatagccttataaagtcttcagttttcagggcattttaaatttttttaagatgtcttacaggctagaacgcttctcaagtcgctagtcattatgggaggtatttttggagtagttttaggaacttttggaacttgtattccttggttgtttcccaatatctatacacctgatcagattatcataaaagaggttagttattctctttgacctgtttgatgtacatttgtttcttctacagttattgaaaaacatgttgatgtgaaatgtaatactatagtattatataagacttagtttatctgatttcttatggtgtattctcttgcagatgcatactgttttgataccatactttttgatcgtacttgcaacacccccaactcacagcctcgagggaacgttactggtgcgatttttgtttcttcttatttttattattattatcatagctacactctcaaacaaaaactggtgttttcggactctttattcaaaacttaaaaatctaaaatctaattatttttacaggccggccgagatctaaaatttatcagtatgacaatgagcggctgctttatcgtgggagcaattttactaaaggtagaatcattatttcccactcttctgttctgttatcaatgctatcatttttaacactttgttaaattttatgtttcttcttaaaaaaccagcttgtaagtgtcaaaggatttggtttagcaggcatttggtttgtactagctggttttcaatgggtaagaactccaacttctttctttcgttaataattttaaatacttttattttcttcagctacaatcgatcccccgaaaaccaatttgaataagttttttgttggctttaatcttttaggctcgattatttatcgcgcttcaacgtcttctatcctcggatggcatactatactcgaaagagaaagaatcatctgtaatagtttaggtctaaattatgaagctgtttcttgcaagttgtaatgttgtttataattatatgcctagctaggccaaaaataagatgggtgtcatatatatattttttttcttcataatgtcatcatatttattaattattttatcatttatatcccattcaatagcaaaatttgcagccagtgcactggcctccctcgctttatgttatgccatttcataaaaaataagtacaagcctaatttcaatttgaattttgtaaaattataagtcatggttttaatttcctaaaatgataatttaaacactatacttggtaaaataaaaatagtatataataatatctcgagtctaattttagtcagtttttttctttaatatcattaaaatgtaatcaacttcaagttagtctctagtacaaatatgtgtaaaaaaatatgtaaccaacatcgacataacacctttagattatatttagttttaaaattgtaaagtttgaattgtcttataatatagattatatttagtttgaaatgtctttagattatatttagttattcttctttttttactagttgtatattcagtgatattagtagaatttgtaattttgttggccataatgtgactaagtggattttctctcatcaaaggtttggggttattccagttgactccattctttttgacttgttatgtaatgactctgaggtttaatagtttttatttagtaatataatcacgcttttcttaaaaaaaaaaaacagaattatcttttaatataatgttttctccaattagatcaataaacaaatatatatgtatatatttgctgaataaatcttctccaaaaatccatggttagaaacattagtctgtctcaatttgccaaactactgtcaatattttgcatcaaccttggctacctcacaccacgaacccgtatgtcacttcctctcatgtgagtcttgttggtcaccctgtcagctcccttctctctgttgatgctagatcctgggacacagaactagttctcgacatattccaccagcgtgacgctgatctaatccttagtaaccccttgagctcctcaacttttggtgatttctggtcttggtctggtaacattttggacttttctctgttaaaagtgcttattgtctgcttcaagatagtaaagatccaaggccagacaataacaattcggggttttggcggaacctttggcaactcaaaattccaccaaaggtcaagaacttcctttggcaagctgcttctgggattttaccaaccttcttcaatctcagaacgaaacatgtggacatttcccccgtttgttcagtttgccactcttcttcggaaactacatctcatattttactttcttgcacttttgcttcatgatgctggcataatgtggaccttctgccatctctctcggagattctttctcaagttggcttgattttatcttttagcgccttgataccgattgtgtctgcgagttggttatggtatgttggtccttgtggaaagcaagaaattctatcatttggaaggacaaagttctcactgttgaaaatgcaaatgtcttagcttcaacacgtatatctcttgatcattggctaaaagctcaggacaatacatccctatcatccatcaacttctgtaatagtggtgatggggctgagctatggactaaatctggtacaaatacaattaagattactgttgacgctgctaagtttgctagtgaaaataaatttagatacggtatggtcgcaagaaacaactcaggaacactcattgacgccaaagttggttgttgtccaggcacttttactcctgaagttgctgaaattattggtattaagaaagctttaagttggatcaaaagacatggatggcagaacgtcgaattagaatctaacagtttggtctctgtccaagccatccgcagtcacactcccctctgttcggtctttgggatcctagttcatgattgtcaaactttattatcatctcttccttttattaaaattcagtttgttaaacattcaacaaatctcctaacgcatgtagttgctaggatatctcggtccttttctgaatgtagcatttgtgtgtccaacgcaccagccgttatgctggacattatgtatttcaaatgctaaatttaatgaagttatcatttcatcaaaaaaaaaaaaaatcatgcccccgaactttaatatctactaaatcatacctcgtgaattttaacatgtaccaaattatgccctttaaaatttttatctacgttagagatttttttattttttagtattagtaaaattagaattagacaaaagtctttaaattcaacaatctcaattgtttagagaaaatttttaacgatctaaaaaattaaaataacataatttattacatgtccaatgtctgaaagtagaaatccaaattggccaaaaaaaaaaaaaaaaaaaaacaacaaaacaacacacaatagataaagagtgagggagggagacattcaaatgcttttaccattttaggaaagaaaaaaaaaagaaatagccgccaaaaaaccaaacgtaacagaggtgaaaaagaatatccacgtggcgtgacgtaattggacaatttcaaaacatataaaagtaagtctccttcttcctcaacaacctcatcactgtccgtacacttttcttattttattcattatttttggagacaacagggcaaagatattttctctcttccccaaattttcccgggaaaatgatgattcaagctcatgtctccttccgaaaccctagcttacttctcaaccatcttcgtcctcgctcacaactctcttccaccttcttcaatcccaacaatcctcacttcggcaacaagaccactgctctttcccttccaactttacgttttcactcccgccgtgcccggatctcgcctgcttgcatcgccgccgattatgacgagcaaaattgcggcggagaagcggctgtggagaatgtggatgttttgggtgagggaatgtgggagcagattaaggagattgctatgtttactggacctgctgttgggctttggatttgtggtcctcttatgagtcttattgatacggttgttattggtcagggaagttctcttgagcttgctgctttaggtaagcacaattcagttttttgaaatttgtttggattttgatgaatttgggtattgattattggttttggtgtttgtaattttgattttgggttttgtatgttcaggtccaggaacggttttttgtgattatttgagttatgtattcatgtttctttccattgcaacttccaatatggttgccactgcacttgccagacgggttagtttcttttagtctttcatttgatgcattcaaatttatttaaatcttttttcagttaagacaaattcttagtgtcagttttttatgattctagcaaaattctaagttgaaagagtttttgtacatcaaaaactagaagggaaaaaaaacgacacaaaaacgtttagccatcttttgaatggtggccaataaggtgtaaaagactagaactttgtgagttttgtctagttcggtgatgttacgagttaagttggctgttgcaatttttggcatttaacttatttgagtcattttttgagtgttagagcatcttcaatattggaggtgtaaataagtggtgaaaaactaaaatatagttcatttaacaaaaggtgaatgcatatgatgtaaaatttataccacaataaatacattaattttttatttatatttatataatttctattattttattagtatatttaactatcttattaaattatgaaatattatattatttttttattattttacatattcaaataataataaaattgattataaagttattaaatttattttttttaataaaatattaattagatatnnnnnnntacatcaaaattttgtaattgtgcattagagtacaaaactaaaatttagtgtaaatttaccacaaaattactttttgtactaaatatagcacaatttttacatcttttattggagatggtcttaattaaccatggtttcttgtccaactactttgatgtaattatgcttttttctactcattaaatatagggaacgactaaagtacatatccttaaaatgcaacaccggtacactcctcatgttttttgacaagtatacagttataattttctttaatatgatgtaccatataattatttagaatatttgcatgtcttttgaaaattttaaataatttattgtgctaaaaacaaaattataataatgtattttacgtgtatatacataaaaactacatgcatgtattttttttttgaaatctattattctattctaggcacattcgattattcaaaacatcactaatatacagaatgttcaatataactacaatgttatatataaaaaaagagtgttgtctttttaagagatgtggtcttcctatatgtacaatatatacaatgtatatatatataattaatagaatttgtttgcactatattttagacatgtgcaacgtacttcattagttttacggtgcttccaagagaatgggagtaagtagtagataagattatagaatcaatgtagtattgcttcaagtctattagtttggcaaaaatttgttaagggagatttaaaagttttttgttcaggtctatttcagttgaagagacacaatagaattgttttcataaagctgttaacattagaatttacaatttagaattggataaatacttgtacgttgtaaatgtggattgataagaaaaatgtcaatttctgattgattcacatttatttgttcttgtttttttggataaatagatcagtgtaccttactaatttgccaatctagattttaaggctatgggttaaatacattattttacactttttttttcttcagatgaagttcttattgtataaaatgtatcctttacagtagtaactacactctttttcttgtttagagtttcagtgcttaacaatttggtatttgttgcaggataaaaatgaagtgcaacatcacatatccgtgttgctctttgttggattgacttgtggcttcttgatgtttttctttacaagattttttggtttatggtctctaactggtaataacatctggagtctactttggaacttcctttcattatggacatcttgagtgtttgattaatttgtcatagtttttggctgatacttttaaaatttattgggcatttcagtaactaaagaatttgattatgttgctttcagcttttgctggggcaaataatgtacatattgtacctgcagcgaacacctatgttcaggtactttttcattccttaataattcttaaaccagaaaatcaagttataacgaattcaaaagtataaagagcaaatattttcttaatcgttttatattttcttttagcagctgtcattttgaacgccaagtatccataaacaattttatgtttgatgggtgattggtacttaatttctttcgctgttttacttccatgttatactgtatgcacaatttgtgtgaatgcattttgagctgaacatattttctattggtagattcgaggcttggcatggcctgctattcttattggttgggttgctcaaagtgcaaggttatttttctcttctatcacattacctatggaatgcatattgaaaaagttcaaatgtctcatttaaaatagacgactgaaccattgtatgtatcaaaaaggattttcattttctttgaaatcaatgataattacttgatgtagtgtgttatagaggtctgggaatgttcctatgaaattatatttcagaaaccagcatttttaatcatgaatgtgttggaatcccattcttaatttgatattgaaatttttattgctgttttccagtcttggcatgaaagactcttgggggcctttgaaggctttggctgtagctagcattataaatggcattggtgatatactcctgtgcagagtttttagctatggcattgctggtgcagcatgggcgacgatggcatcacaggtgctccagatgaacattttgctccactgtctttccagattatatatttcactttagttcttattaatttccgagaaatatcctaaatgagtttgttttctttcatactgccactaacacaaatagtattaggttgttgcagggtatatgatggttgaaaatctgaacaagaaaggttacaatgcttatgctctctccattccctcaccgaaagaacttatcgctatacttgagcttgctgctccggtattcatcactatgacttctaaggtaaatattactcagttttccttgagcttggctataatctttccttagttttccttcaaaaactaaggtgtttatatccttaggtggcattctatagtctcctcatatattttgctacatccatgggcacaatcagcatggctgctcatc

SEQ ID NO: 14263 - DNA, 7173 bp, Cannabis sativa
  modified_base (7105)..(7105): a, c, t, g, unknown or other
ccaccgccccattaaccatcaagatggggaatccccaccccattaggggcggatccccgcagttacccatccccgcggtataaattttcatctctactttcaaaaagatcagttggagtgggtttcaaacccttgactcaaataaggaaagatgccagtaaaagtaattcctatcactacaccacacaatacgtggttaactaatttaaatttaacacaagaaaattaacctcactcaagtggcatatacacaaaaattaataattttaagaaatttacctgcaatgcaaaatcatgaattcatgcaataataatgcaataggaccttaaggcataaataattattgggaattagttatcacattgttattctagttttcaacatcaaaaaccaaaatttgatatatggtataatgataataatatatatatatatattttttttattttttgtaaatggcatataagaagctggcaaatgataatgatgtgttcatgatatatggctaatattaatttaattaataatttaaatactataataattataaaaacttgattaagacaaaagagtttaaatactaatattgattaattatttggaaaacaaaggtctcattgactataaacagatttaaacaatgtgggcttcattatgtgtacatatgaatataaattaatttaacttaattaatcatcaattgaatatataatctacatggtctcttatatataatgttattgagaaattcaacatcaaaaaagtctttattatgtggggtgattttctatttatgacacttaagaaaacttataacaataattatttttagtgtatattgtattcataatatacacattttaattttgcaacagagagaccactggtttgcaacagagagaccactggagactggaggaggagaaaagaaactttactgctgcgactgggagatcgactgagcttacttttaaaatcggaggcaggaggagacgagaaatgccattgctagcgactgagagatcgaccttttcgttgtaaatttgaggtgttagtttaaatactaacgggatgattactgtgtacacctgtgcatacataaaagtaaaacttcgaaactaatacagtaataatcaagttgatatttaacagtgatatttagtaggcattcacccaccagtggaatggtagtttacttatttcttccattcctgttaaactcttttgtaataacgatgagatctaatttttgtctataaatataagttaagtttcaatcaaagctctataattgggtaatatgtatattattagaatttttgtattgaataaataagatttgttaaatgtccatggtaaagcataattttttctttccattttgtaattatgctttactagtttgtttatagagttagtatggtcctataattttatttagaagtattttatgagtcagtaataataacgtgtaccatacaactattactccttagcacttttcttaatttagtgagtaaaaaaactttggtgttttttcttaatggtaatgagattgtctaaaacattcttgactggtacacaagtactattcctgtctcttaatgactaaatttaagtaatttgaaatgttgaaatctttctttgcttcttctagtgtcctcttccttctttgcagtcttgaccattataaaatagaaaattcttataatttggaaaaagatgccttgagtgacccttttaacataaaagctgtggttggatcatcataaaccccacaccccttcttctcctttggtacctaaaccttttgttatcatcaaatgatgactttccccaaaccaaaagaaaatagcccatgtgcaacctcttccccacttatctttggaaaaaccattaaaaaataaaagaatagaaaagaaagttcaagaaacattattgaaactctctagtatctcaagcattgatacctatatgataagctagacattatatattgtcacatagtaaataaataataaacatgaaagcttctctactctttaacacaatccttacttcacattaaaacaacataatgttgtagattttaacaagtacatgatcatccaagaacactagaagcaaattgggcatttaaccaatccattttcattacactctggacatctaatgtagtacaactcttcatgatcagtttgatcaccatttggcaagaccttccggctcccattgcagttaaagcacacagaaaatcgcacgttggcacaaccagggcacggggaattggcttggacaagtgggataccttccaagagtttccttagcttgccttgctcatgaagtactccaactacttcttcagctcctccaatataccttccctttatgaaaagccttggagggacaactctacttcctagtacactccatagctcttcccgaaattcctggtggaacgacacatccctttcgcaaaaagacacctttaaactctccaacaagaattttatagcactacaatcctcaaacgtctttcttactcctcttaagcttgttgtgtatagaataaccttgtcattcccatctggtggacatttctcttcaaaatctagcaatgatgattttattccatcatcatgatcatcataatcaaccttattaacaatattattgttacctactaattgatcatctgacaagtttttctcctccattgtgtcgtttaacttcatggtggacgaaagagtctcctcctgattgtcaccaacatcgaactcatgagcttccaaactttcatggctaagatctttgaaaagtttaggggataacccaatacttagtagctctgagagactttccttgtggatatcttcttctccttgagttagtgtggtttgagcagtacacttccaagtagtagaaaacttttctgttgtgggatttaattgatgaaagactaggccttgtctaatagtacctattgcttgtatggtttttagtttcttaaggaactttcccttcattcctttcatgttctattgtaaatggtttctagtgttctcaattctcaagaatgtatggaagaaatggatgagagaaattaaaagacatgacattggtgaggggtctctatttggggttctgaagtggctggaaagtggaagcaagaaagaagtgttaagactcctttataaagttagtgaatgcatgatgatcactgcatacagtgtggggtttggcaattgacacccttttttctttctccatattctaattcattgactcatcaccaaccatttggggtctctctcaatcatggttgatcattaggagtggtttttatcttgatgtggaaaagccatccagtggctgagattcaccctcaatcactaatcatgctctaatactcaatgacatggcacaatctcattggttagttggcttaacatagtaggaccatagttagtttagaggagacaagagggtgatgattcaattgcaatttgtgcaaaagttacttctttttttttcttcatcagttggaacttctcgggataacaaagtaaagggaaaaactttttgtaatgggttaagattgattaatatatatgtttgtgggtctttcaaccgcaatcacatccagttttcacgctcataatattacaaaagaacaagttcatatataaaaaggattatactactaactactagtgggattgatatatatagttttggagtgtcttgttcatatctatataataaataagaaaggttgaagattctatgaataatatgcttcacaatgtaccaaaccctgtcgtgttattatggaaaaggatgtacgaggtgatgcatctaatcaaatagaatggataaggtctataattaatcagatgttaacatctttcaattcaagcacacacagtactaacattaccaccacacacacgtgtaaatctgtggtatttgtgcttgaatgagtatgcaattaaaaataaagaaaatttttcattgagttctcctgatcttagaagtctgaatttgttggttactacacttcaatttgttgttttggtcatgactttgtagaattgtcatagttgacatataacaaactctaagtctaaagcatgaataatccatactagttgtgtcattcgacccttagccaattttcttttagttcttatttaattttctctttctggtgttatcgacaaaaaaatggagcaagtgtttgttatttattgattttttgcgtatatggtattataggaacaaaaaatgcatgataatgtcctatcagctgaattaattgtcaagatttttcttttttggagtccttaccaaaaaactaatacagcaaaccaaacaaggtggctcatcaatgtgttaatggtgcggattcagatgagattattcactgggttaggccactgatgggatagtcaaagctaatgtgaatgcggttttggctttggagtatagggacgccgaccgtgctgtatggagtgcgtcgaaatggcaccagcttctctgaaattatagctcgactcttctttggggctttgtggttaaagatactattgatgttaatttcctgttttgttctaggaaagtgaatgttattgctgatctctacgagtcctttcctggtggaattggctttagaggtgtgtttttgaggctatctttttctcaaaaaaagaaagaaaaacagcactattctaccttattaaaaagaatttgatttatgatcaacacacacacacacacgagattagatatgttatgaaaagaaaaaaaaaaaaagaaataaaagggtcttaaaaacagaaaagaacagacaatatagtaagtagggaatacccgggaatcaaggctgattacctgggtgtgacaagaggaatattttggttgctccttgaaagagctgtggtaacatattatcgttcaaaagggaaagtagtagttggtacaatagtaaattacacataataaaagtttaagcatggtttatggagcaacagtgctgaagttttctttttacacgtttttggaaagagggcaatgatgcacatagattaaactatacaattaatctatgctgcacctctagctatctgccacagatgatccaagcccaatgctaaacttgaaggaaatgcatgtcagttcatgaccactttcatcgtgcattctcattctaagtgtgtatgtaccctgtacgaggaaaatttatcagaaataccattgtatagagcaattatgataaggacatttgtttaatataaagttcgaatagactcctccatgaaaaagagaagaagatttaaggttttattgctaatatcatcttagtacattgaagattcttcagcctcaataggcggaaaaagagaagaagataacactattaggaggttgactcaactatgtatcagattttattataattatcaaacttatctaatttaaatggtcaacataaaaaatttgattcactaagagtagcccaagaacttgtaaactgtattaatctttcctgtgtgtacacagaccgacaaacatgacactttgttggctcaggacaacatttgaatatcctaagtagaaaattccttctataaataaaaatagaaaattcctttcatatacatggacatgaccccagtgcattatgttataagatacgaaactaagagccacaaatgatcttggaatgactatctaaatgaatcaatgatattagaggagatactatcagtaaattagatgaaacatgaatgatttagatggaatttagcatctaacaaaaatgatttagcaggaatttggcgatgacatggctcagaactaagtacttatatatatatatctaaagcaaattaaattattcaatggacagatgacttactggaggagtaaatgcaggtaaagcttgagagtgagaaaccacgaaatcaccggatgagacagggcaagatgtctcagtgcaaaggtcaagaaattctcggtggatttggattccaaacaccgaaacatcgatctctatcttccctccagagattggtgtatctgttggcacataaaaggtcccgagttcagaatagaaaaggaaagatcaaggcaaatggacaggcttctcgcaccgtttactaattattaacatcaaacctttcgtagtgagtttacatatacgttttgctaaagcttattttcagaacttttagattgaatcgtcatatatgatcgtgaaattataaaatgtcatacacccttgaagaaaaagaaaggtaacctgatgaagaaaaaaatgaacatatttttacacttagattttgtacgagcaaactacttttctgggccatttgaaaaacccattttggtttctttttacaccaatatcaaacaaacctagaataacatcgatagagagatactaactctagtaaaaagcatattttgatttcaattcttacagaaaaataaatcaaatttcatattgttttcaaccataaaatatcaaacagcagagcaaaacctttacatgtcgaaaatcataagtttaacttcagaagagtacctgtagttgcagcaatggcgaaagttgctggctcgcctctgactattggataaggatttatatctactttactaaccttgacttcataaagcttcttagctacattatatgtcacaccacaaaagatatcaggttattgttcattaaataccaacaacacaagataagaataagaataaattgatatatcagtctgattaattacacatatacagacatgataagcttaaatgaaattgttgaaagaacataaaaataattgagtatatgatctattgttgggcaccctatctttacaaatccattttcgttgttcaaattaacacatataacattatacatcaatcaagtggcataatagatatcatcaaaacaaaataaaattccccaaaaattaaaataataatcttggtaagccaatcaaacagagcatataatacttgggaaaaagaaataattttcgttttgttttcagtggtaaggaaaatcatggcatttatactaaagctaaaacnaaatcccaaatctgaaaatctatatgaaatcaagcctatagccagaaacccaaattaaaatcagagaa

SEQ ID NO: 14264 - DNA, 4655 bp, Cannabis sativa
aataaatgatctactgaaacaatcttttcggaacatgtactataaacttaccttaaataatatagagtaagtcaataagaggtgtttcaatagaccacctatttgctttagcatgcacaagagctttttaatttaatttatttttataatcgtgtatgttatagttatttaaggtcacttataaatttttagaaaaattcgaatattttatagtgttaaaaataaagtttaaatattttgttgcacccgtaactatttttttatatgtgtggtaaattactctttgaactgtgttttcagcactgtaaattattcataattttttaaaattttatagattatattaaataattaaaatatacacgatcataaaaaaaatgaaataaaaactatctttattgtcaaaatagatatggaatatctacccaaatacatttttaggggtgtcctacacatgtttcctgtaatatgtagtttaaatattcaaatagattatttaaaaaatataaaataaaaaaaaatcaagaaacaaattaacaaaaaaaataaattagagaatgtaaaaataatattgagaaaaagtattattattttactttaattaatgggatgcttatatgtattcttgttgtaattattatgacctatgtgtactaataaggtttttttttggaacaatatgtgaaataataagataataagaatacttttcttcttctttatgaaaaaaaaaatagaaaaactttcttcttcttctttttttctcaaaataaataagtaaatatattattgggccaataaataacggacggttggcccaataaaacatcctagtcgttcgttctaaaatcaaaatcccccgtttgatttcgaattgtgtgtgatgaaatcgtataatgtgaacccatgcaaagtattaaaaaaaagtatacacattaataattaataataaatattaatataataacatttcaactcactctactcacccagtagtactaactgatcatcactctttttcttctgttgtatatgtaaattcatttaatgcttattacagtactataaatataccatcatctccatcaaattacaatctcttcatttcatctcaacccctttattacccatcgattgattacaccttttttttttctttctttaaaaaatattatccacaaaacaacaatggaagaagctttcactaggctaaatggtacaaatattaccaacaccaatgtcctaagtctaacttccgaatctgaccaaattacccctaacaagaaataccccaccaccaccaacaagaggtcgttgcgagaaagctctactactaccggagcagcagctgccggcggcggcggtggaacaatgcgttaccgaggagttagaaggaggccgtggggccgttacgccgctgaaataagggacccacaatctaaggagagacgttggcttgggacattcgatacggctgaggaagctgcttgtgcttatgactgtgctgctagagctatgcgtggactcaaggcaaggactaattttgtttaccctacttctcctccaccacaaccacctccgccgcaactttcctccgaccaccacctccaccaccacaatctctactctcctcccttcaacttcaccaaacactctcttaagagccagttcatcatgggttgtaatactactcctcaagctcaaactcaaactcctcttcagttttcttcaaactggtcatcatcatcacgttttccacactcttcttctaatgttgacttttctgctggtcaaagaaacaatggtaataataataataataatactactactacttcttctccaatgaaccacatgcaactctttcttcgtgaccatttcaactactctccacataatcactttccttcatcatcatcatcaacaacttcttcttcttcttcttcttgttattcaaccctaactactactatggtcaactcatcatcagaaataataccttcttcaatccctaataataattccacaaaaaccacctttactactcaacaagacaataatgataataataattattatgaaccggaatcattctttccaaaagaggaatccgattccggtcttttagaagaggtcattcaacgtttcttcccaaaatcctcaaagaagtactactccaacaacaacaacaacaacaacaacaacgagtctcttcccaaatcttcggagactgttactgatggtagttataacggtaaccctatattttcggggactcaagtagtgacagctgggatcaaaactgattataaccaacaatacaacaataatctcatggctaccggttgttgtggtttcgattaccaacaaaaccccaacaataacattcctctcgtttcatcatctcaaacggtgccgtttggtatcaatagtaatattaataatagtaataatgatgctgagttgaacttccaccagtttggtcaagatcagtcaattttcatggatgatattttccagtttccagagcttgttactgcctttgctaccaggacccttcaaaatgcttaaattactatgtatgttcaactttaaatatatatttggtttttagggtttttcttttttcagctcatgataaaactttgatttgtagtacttaactttctagtatttgtacttatgcaactttttatatatataattatttttgttatatgctttaatcttcaatctctccaattttagtagtacattgctattaattaatttttcagttctttttggccactaatatatatactgttgttacatcttaaaagcctctgttgaaacttgtctctcattatcactttttaacaggtatatataattaaataatcgaatgtcaatgctttctttactattttgttcatgttaaaccatgaaacatatatagctctttttttttgtggcattgtgttgtacagtagtaagcttttttttatagttgactctatatatgaaaagtctacatgataatatattatatatagatagagatagtacgtaagtgtatattcacttcccagactttttggttttttgtctctgctaatcgatcttgattcttctaaagtgttaaatatagttagtgtagactaaaaggtcttgcaaacgttcttggatacaaccaaactaaccactagctaaaaatgttgtactaactactctttctttttttaacaactttttagggggaagagaatcaaatatattttattttattgtattagagttatttgaaagaaatttgtaaagtaatctttaaattctggaatatcgaaatattttgagaaatgatttaaatatattttgtgttgtatgcgtattttctttcgaaaatttgtaatacatccttgaaagaaagtatctggtatgtaattatttagtattattaataaattttcagaaaattttaaatggtttacaaagtatttaaattttatttttcaacaatataaattattcaaaatattttgacaatgttttgaaaatttataagtgtcctattttaaataactacaacttacaatataacaaaaagtaaactaattaaaaaattctcatgaatatcaaactaaatagaaaattcatcgaaatactcttttcaaaaggtataccatattttttccgcatttgttatattaagtaaaaatattttgaaagcttgctagatattaaattaattagtgtatgtttggcattataattaaaaaatattattttatttttaaaaacagaaaagaataccaaacatgctcttacttcttcattttctttgggtttatgtttatgcatcttattcgtgtatatttaggtattacaagtaaatacattgatttgactcaacaggtttatttaacatgtttattactcttttaatataatatatttagagcaaatttaacatgttcatatatcatacttaacaaactttattgatacagtttacatataataaatataaaaatgtatatactaataataagtcggatattgtttcacttagaataaatggtagataattgaaccatatataagaacatgagctaccccatttattgtcaattaattttgagatggaatctcatgattctcaacaaatcatggtgtcattgatttcgagttagacgtggtaaccttaaaataactcgttcaacaaacaagttagctatgtttacctaaaaatgacctaaactaagaaaaacctaaacctcctttaatttgtatggattttgagtcgtgttaatgtgtttgacaaaattttccaccctacccaataaattcttatatatgcttacttttaattaaacatgagcttctttttaatcccctaacatatatacatagcgattaattttattgaattgttttgtttcatttaattattcatactcaaataaagccaggtttctatatgggaggcttaagaaaacacataaaaaaatgatatttttaaaaactattataatataagttgctattaacaataataagtatatataaataactattcaagatacaccttacattaattattcatgtgtgtttgaagaccaggatacaaaagctgcttagtctgaacttataggcattttttttcttatgaagaa

SEQ ID NO: 14265 - DNA, 6979 bp, Cannabis sativa
tttttccccaagtatttcagtaacaaggattcactaaaacaaaacaattaatggatatgcattaatcaaattagataatccacctacgattacaatacttatgagaatactcacttagacttggcagagaccaatgtaattacacgatcaataaactccacttctacggctgaagagaaatcagtagtgcatttaaactaacagggaaatacttaaatacataggattaaaaatatattaatcctaactaattttctcctagagccagccagccatatctgatattcccttcatctccaatatgtgaaatgcagaaatatttattccacaacaagactgatccacaggattcacttccgttgaaattcaagcctatctatttaatcaaacatacaattaccgtgtatttcaaagtattcagtcatctttcttctctttcttcaataacagccattatcacaaaattccctactcattcattttctcgaggaaaaatccttgcatctcccttaatatctagccattgagaaacataaatggtttgatgaatgatatttgatgcctatttggaatgaaaaccacatttgaaaatttaatactactatcaatgtagcctttagatactaaagggaccaggagaaccaaccaatctagctgcaaaaaagagacaaatttctaccatacacaagtaactattcatgttatctcaaaaaaaaaaaaaaaaaaatgtaactaattcatacatgtttcaggcgagacaaggacaagatttctaacccaaaactctggtaggtataaataatataaagacttaccaagcttttacattcctttaccatatttctacttctagagctgctccacatccccaaaaatcaacaacaccttctatttcagcaataaaggtgagtcaaactgatttatcatcttgtaattgttgtatcactgaagtaagctgtaatggccttcatcttgccatttacaaagttcttctcgacctgacaccaaataattttacactcagatatagcatagatgcatagtgaaaatgcatcaataagataaaataacaataccaggacaaagcaaaattgttatatacaaaactgccggtgaacaaaaaaaaacagatgtcaggaattattttctctcaaagacatgggcccagataacaataggccataaataacataaacctagtatactaacgtcacccatgtggtcagatgaggtctagggtttgtttactcagacagttatctaccaatatgctaagttttcttaccttgtaaatattcaaaggttagtatcaaaaaatagctacataatagtccacagaagtacttactgttactcctccctaacaaaaacaaacataccgaaggtgtatatgaagaggaacataaattggcaccctcaacatcaattattgctggaagaatgaatgagggaaaaaatgcaattatgaggatgaaatatcttctgcagcagctgaactagaggatgaaaattaaacttccacataaaagttgcatggtcatactcagttctatccaattggcattcagaaatgcaacattgtttactttttcaaactaatcaatttagagaaaacttcaaaggctttttaatttatatatgtacatatatacataatatataaaagctttaagcattctttacataaaataatgaaaggcactttgacttgttctataagttaaaagatacctctagtgaccacggcggattggctaacagagacagctctgccaattggttgagatcaacatttcttgggagaaacataacaagtttgggagcaattttctttgcagcgttaaatagaaaatatctgcacaagaacatagaagagttaaactaggagagtagaagaagagttattcattcacagatttacaaaataaaataatgtataacatacccatcacgtggcttaagcattgtcttaatgtcatatgtatctactttagcataatctggtcccccccatggaggtgacaagaaaactgtatctgcctgcagccaaggaacatgtcgttttaaaaaataaaaaatctggccagatctcatagataaaaacatgagccagagacaacattaatgataaccttaaacaatcttcaaaacttcctttttgactaatacataagccttttaacagaaattcttaaaaggaaatattaaaaaaaaaatcccttctaaaaaaatctttgaaaacaatttgatcatttatattttggaagcataataatttgcaagcacattaagagggaaggcagtaaccaagggtgtactgagcctaaggactgtaactgaatgttttcaagccacgccatttaaataaaaacccaaattttcattaagagaaacttcagtacctttaacattggggccaaaaggaaaaaatctcctctgatgaaatctattcggtcatctactccatagactgcagcattatggtgggcatattcaatcttctttgaatcaatatcaattgcaattacatgtttgctcctgaaatgccatcaaatatataaactagatataaaatatatattagaagaaattttcccatgcatgtatttttgtatctagaactcacataaagacatacaaatatccatatattatataatatgtatggtgcaaatttgttcaggatttaaccaaactcttatatagtttgcacgatgatctactgatcactcttgaaattgaaaataaaatagaacatgaaagaataattggaaattacaacttaagccttccaataatataattcccaccttgtatcatgcaacttgagactaagataaataatccaaatcttaagaaaaaaaaaaacaaattgatcccaatttgtgtgtaattatctagacatcaaaagtgtggaatcactaataggtcgtaatagatctttccataaagcaacttgtggccccatttgaatcacaagttccattgataatgtaaacgcatcgagaagttattttatccttttttaaataaatccacaagacacgtaaattaaagtattaataatttaacagttcaaaaaaattaatttaaaatatataatatttatccattttcagcaccatagcaagtaacattattaagtttgtagtttgtcagaatcctatagaccaaactaaccctaaccctaacacatcttatctgatcctacatatcctaagtttgtcataacaataccaatcatcagcttcatccaggaggaacattaacatagtaaataaattttacaaaatacaatcataaatcattacaattttcacctctttgcaaattggatagaatttcctccaacacctgtgaaacagtcaattaccacgccattaccacaacgaaaggcatgatgtctagctataggttctggagtcactgaaaaccatccttccacatccatttttataccatcatcatatttggagaacaataaatatctctgccaccaatatttaccaatatcatcagacaactccaccagctcctgaagtttaagttctacagaataaaattgtagcacattaggactgccttaacacataaataaaaaaaaatggaaaagctgaacttcaaatagaggatatagtatttgccagatcacctaatacactataaaaccagaaaaaatggggtaaaaaactaatgacttataatccttgctagctagtttgcatttgacctgtgtgaagagggattctcaactaaattgaaagaatgaagtacatgaaccaaatgcacttctctcctaactcaattattttttatttaaatcataccatatgtatgtgttgatcagtcaagcaaaactcttcaatcattttagcagcatgaaaataccaatatgtgttgatcagtcaagaaaggactttgaaagttcaaattaaagataacactacatcttccagcctacatagtccctgattcttctattactgtcattgtactcactactcagtagtataagtcaaacttaaattcaactttctagtaacatattccttaaaagaaaatgataataccacctgcttgaattattagttagatgcccaatctactgttagtttaagtgaatcagctgttaagttctgtactaggctaacagataagttccatactaggcaacagttaatcttgaagctcatttcctactatcttttatttgtaattatttcaagaaatgataattacatatgtaacatcagaatgaacgatgagaaagaaaataaataagaaacctttaatttcactagatttttttttctggtttcgtgttcttctcgatttctttttccgctttgccatagaagtgccaagctgggtacccacttgaataactggaactacatcacctgaatgtgtacaactaacagataatttgattcaatatatatagaaaatgctgaaaaagaactattaacaagaaaatctattatagtagtcagataagacaactcaaaacacaataacaagagcatacagcattctgcatgcagctgaagttccaagacttcatcaatttggtattttaaggagtttccccaagagatcgtaattgacgctaatgtgaaaagtaataaataataaaattcagcaaactgattaataaatttctccagaaataaggggggaagcaattatagagataccttataatatgctcctggttatctgagaaaaaccattccttacttccatcttttaaagttcgacgggtgtcatcaagttcatctgaatctttgatattgctaaaagtaatagatcccttcgtagcaggcacagaactgcaaactgtaactacaccgccttcaaagagctcatcatgtagtacaaaatcatccataatttgattagcagaatcaattttgttttgcaacatataaaaatctgccacatttatttcaggattagcatccatcccagttaactcagctactgattcatttgacttatcagtgatgtcacagattgccagatgtcccattccctttggtggatcccatgttgaagtgtgtgttttaatattatagaagtagtttctcaaatagtaagaatcccaatataccatccaatctccaaaatcaccatagcattcattgttgacagtttcatttgtagcagaatcaaggacctctggctgatcagtgacgacacctttgcaaataatttcacctgctgcttcatcgaaatcctgagatgaagatgacgtttgcaaaaggtcacactccgctaatctttcacctacttctttttgactctggtcagaaatagcatctgccaagaagcttattgaggaaagtccagtctcagaactaattgaatttacttctgtgttgccttcgctcacaacagtgctaagtacagagtatatatctttgttatcagtacaagagatatcaaacaactcagcatgactttcttctctcacagtaccagaaaagagcccagacaattctgttggattttctacatcatgaagggttggttcacaaaaatttgtagctactgcaacaataaagtagctaactcagtttgtccaactattgacataaaaaataaggaattttttgaattaccatagaatatagtaggagatatgatcttacactcatccagattgtcttcacaagtgctgcctgtatgtttctgccgtgaaccctttcttttgccattagtcattccgctcttctgaaaagtgtagcaattaacgccagaaacattagaagcagctcaggggaaacaaagcccaaaagataaaattttcgatggtggcaccaaggaaaaacagtatctcttttcttctccatcttgccctatgcaatctaaaaatgaaactcaaccgatactaaattaccccaattaaggttcaattcagacttagattagccattgatgaattttaatacttgcccaaaagtgcatactatacgacattcccaaacctacctccctgtttgtgttgaatgagagtggaagtcccagcgcattcatctgtcgagcaagttcctcatcttctcgcaaaagactatactctgaactactcaaaagggaacgcaccatcagtaaatcacaaataaggaattaaccaaagagaattaagcactagcctggagaagtagaaaaaacgtttgaatcatcaccatcctcggcaatattagcttcctcagctcctttctgtaaattaacagataaatatttcaaagaagacgacattaagaagaagaagaagaaaatctgcacgctaaataaactcacagtgcgtccctgcaaacataatccttccgcctccgctggcccatcatccctgccgaaaatggattgaattaagaaacaataaataataataaagaaaaaaaaacttcaaaaaggacaattgtttagagtgagtaagagtaagagttaagatgaagagagacacaccatagaaaaacttcggtgagcttgaaaagggagccgagagctctgatagccggaccttgaccttcagcctcgaccatgtccgtttctttcaaagaaggcggagagacaagttttagggcgaaaagatcaaaacaatggcagtcctcaagcaacccaaacaatttcccgctggtgttttaatggcccccctaatcacgcctatagacgtctgcttttttttttttttttcttttggagctgtattctttcaaaaataaataaataaataacgtaactgagtctggcgcgattgtattgcagttcattgaaatagtttgtttttcattttttttaaaccaaaaaataaagaaattattacatgtaaaatataaaattatccagacgatttaggttacatcagacattagacgaatgtttcaatttcagaaagcatgaatggtgggtcgctgttgaaactataatgcagcagttatatctcttgcgagccaactaacgtgtaatttaattgcaa

SEQ ID NO: 14266 - DNA, 2868 bp, Cannabis sativa
tttttttttttttttttgttgggtaaataccatttgaaaccctgtgttttgcaaaaattatcaattggaccctcagttttgttaaatgataaaatggaccttgtattttctaaaatggtaaaaataggacactgaactgattttttatcaaaataaaacttaataataatccgatctaaaggtattatgacaaaattgtttatattttctgtatatgtttgtgttaggaattgtcttcaaattggttatattaaaaaaaaattatcaaaaattaagctcacggtcctatttttaccattttaaaaaatacaaagttcattttatcatttaacaaaacagaggatctaatgaataacttttgcaaaacacatggtctaaaatattatttacccttttttttttgttttgattaaatatgaaataatctcattaaaaggaaattacaaactatcaaccaagagacccgttaacacacgagtaattatacgacgtcgtatcatcttattcatagcaactcgatgtcgtattatacattatcgtagatagtagtagtattgtacaaaatcttcttccgtgaatttcaaaggagcgccagataagggccacgtaacgtaagtggacaaatacccctggcgcacgttagcgaggatgaggggatgaactaaaacggagaaactgatgtgatgaggggggcggacataacaaagacaacgcttaagttaaaccaacctcatacccataatattatttacaattacaacgctattccatttccttaattattttctccatctccattttcttcccaaatcaatttctcttctttctctacactctccttccatggagtctgctgctgttctccgatccttcaattgtaagtacatctctctttttctcacttaatgtagatatgtatctctacaaatgtattggtgctatagcactgaaagtaaattttggagtgaggttcgctggaaatggatatatttgagctttggtcttatttcgaggaataaaggatcattaaaaatctaagttctttgaaatgtttgaatgtcggcattaagacggtaagatctagttatctcgagctggaagatggcaatcgcgaatggtgttttcatgagctcagtggatttaatttgacatttgtgcttaatttcttttttctgcagtagtgatgatgtttctgcctactcgattgtttctactctttagattaagttgtttaatggtattgttttgttttttccgagttaaaaactattccatttatagatttttttttaaataacagtacggtacttttaggcattcattgatgcaatggatataaaatttaaagtttattttgcaaagttcgaactggtatgtagcaagcaaccagtaaaaagcttgattttgatcgtgttatattatattgtggtctgaaaaattcaggttcagtgggcattaattcacatacaaggtctttcattgagaagcctggtatgctttcggcgtataatggcagccaattgaccccaaatagatcttgcatccataatttgactattggtgggaagttaatgtactcttctaaaaagcacaagggaatgctagtatcatgtgtaaagacatcagatgctaaggatacagctaagtccaatggtgagggtttatgtaatttcttcttaattattttatatacatgtaactggaaacttaaagggcagtataagatacattttttgagaaagggtgggagctggggttgattaagaacttgcagtctggtttcaattattacgtagatgtaaattgctctaacaccaacctttgccatgtcttatgcaccattatgaacacactcattggttaaaagttctgccagattttgctggttgaatatggctctgcactgaagaagcactatgaactaaaaatgttttaaaatgcttccactgtaatcttatgaactaatatgggccaagaatgaattgtaatatcttgtgtttgtgtgagctagtatgttttaaaatcaatactcattaagcagtttcatcagattgcattccacaaggttcattggagaaatcccaccgaagtccaacttttcctaatggatttgaggtgagcatatttaaatggttggctagcattttctttcatttatgtaattatttttctttgtttgtcagacaatttagtgggtgcaaattctcccaatttatggcctaccatacgatgttatataaatgggcgaatgttgatttgtcaaaagtatttttcctgactagtatgcatgtgttacctatgtatatctggttcatttactcaatgcctggaatctttcattttagggatgattgatttcggttgttattgcatatgttttaattaaaatagtgtacatgttttctggagctacaaatttatggtttggtttcctaaagtgagcttatttaacacatcttgtcattctcaacccttgtgtctgtatagctctagaaatatggtcggcacaccatgtcatgtaatgatgttagtcatgaaattttgttaatggttatgttttaactatttgcctcgaataccatttaacgcacaaagtttgcttaaaccgttttgtattaacatagtattttgaattattaggcgttgatgctagaggtctgtgatgagacagagattgctgagctgaaactaaaggtgaacttcaagacccttaatctggtttatttcaaagtgcttcattgttgcttagtgcatatggaaaacacttgtgaatatacgtacgtacgactgttagaattaaaatggtcacaataactttattgagaccgctcataatgtacacagagatggtactaagaaaacctttag

SEQ ID NO: 14267 - DNA, 2856 bp, Cannabis sativa
  modified_base (49)..(51): a, c, t, g, unknown or other
  modified_base (2781)..(2789): a, c, t, g, unknown or other
tattcgttattagatcaaaattcaatagtttgatatttttaaaattaannnttatagttaaatttatttagtaaccattcatgggtaataccattatgacttgggaaaagtttcagaaattgttcaacgcaaagtactacaacgaagcagtcataattgcaaaaagaaaagaatttatcaattactgcttggctgtttaacactagcacagtaccccatgtcttaagaaactcaattactgggagtaacatcactattttcttataattatcgttaccttgagagtacttacatagatgtgcaacaaatttcaatgctcgtgtaacatattgctctcgtataccataacataacctatgtgtccctaagtgatcaaagaagtgccttcattagtcctttaccataccaaatcaccccgagccttcttgatcatgagaaaattgctccatataattcccaaaaaaatggtgaaatggaaagaaaaaatagaacctatattgagatggttaatgctatgctattaaatacaaatttgagttttacattgtggggagagacattgctaatggtattttacattcttaattgaattcctttaaagaaaggttcaatatcaccatatgaactatgaaaaggcaagatgtccaatattgaatattttaaagtatcagggtgtttagcttattataaaaataccaattttaaaaggatcaagttgggtcttagagctataatgtgtgtatttgtgggctatgcctcaaatagtaaaacttatagattattgaatatgaaatctagtgtaatagttgaatctagaaacgtagaattctttgaaaaaaaattgcatgatcacaataaaactcaagaattcatctttaatgaagaatctcaagacatgacttattcaaaggttttagagaaaccactattgccaagaagaagccaaatgcttgaaacgctaagattttattaatggtaactaccaaatagaaatcttatatttagtagatgatgaccataagaaactgaaaaatgatataccctatgatactttaaattgaaggtgatagtaagacttttcagggaagtaatgtcatcaagatatgtcgtttttcgatttaattatatctaactacacttgggaagcagttgatctacaatttggatcaatgcctataggatgtaaggagtatttagaattaaatgcaatattgatagaaccattcaaacctatatggctagattggtggccaaaatatataggcaaaaagaagaaacatattacattgatacttatgcttcggtagcaaaaatcatttccactagattgttgtttgcttcgtcatccatacacaacctacatgttcatcaaatggatatcaaaatgaaattcattaatggataactcgatgaggaggcttacatggaacaaccaaaaagttttgttctaatgggaaatgaacacaaggtctataaacttgtgaggtcactatatggacttaaacaagtaccaaaacaatggcacaaaaagtttgatcaagtcattacttctaattgtttcaaacacaagaccactgacgaatgtttatactttaaggcatgtgataatgtgatcattttggtgtgtgtttatcatggatgatatgtttatactaagcaatgatttaagaggaataaaaaaacaaaaaataaaaatcctatctttaacttttaagattaaggacattagagaggttgataccatcttaaggataaaaatgcattaagtcaaactcactatattaaaaaggtaattaacaagtttaatcatcttagtatcaaagaagcaaacacaccattcaattcaagagaaaaactcactaagaataaaggaatagtggagtatgcaagtacattaggcagcctaatgtatgtcgctcaatgtacaagagcagacatagcatatgtggtgagaaaacttagaagatatgctagcaatccaagtggcaaacattggagagcaatatgaagagtttttgttcaccttaaaagaaccaaacacataagcctccaatatctcaaattttctaaaagtacttgaaagatatttcgacgctagttagatatcaagagtgggagataactcttccacaaccggttgggcattcactttaggtggaggtacaatttcttgtggttccaagaaacaaacatgccaagccactcaactatggaataaaagtagagagagagagagacagagagaagagagatgagggcggctgatactttaggtttaaggttaaagtataatgagtttatatagaaggggttttatgtaaccttaaattttgggtattttttcaattgacatgcgtaattttagaacagatgcaaagtaaccctggggctataaactaacgtaaattatcaaaatatcagttggtacattcgatgttcatcgaaaatggagattggtgggagcatgatgttcctaatggtagtaattggtattggaggcaaattatgacggtaaaaaaattagattaaagatcatatggatagaattgagtttttacaacataatttttttattaacaatttttatcaaaagttcttttctaggaatcataaaaggaagtgggacaccaagatttggtgtcggatgagcactcccaatgattgtttggcttgctatgtaaccaaagatagattgatgtattttgggcacttaaccgagaattattgcttgatttgtgatagtatgattgaaacccatgatgtaacaccctaactagcatnnnnnnnnnacgtgattttcaaacatactgtgcagctcgttgctaatcaacgaggttttatggaaaacgtgattaa

SEQ ID NO: 14268 - DNA, 8155 bp, Cannabis sativa
cccttagatcaatctcaaccctcagatcaaataactccttcatctaacggctgtcgtacatcacagaatacattccgtaaaagtccaatcacgggaccaaatcatgtccctatatatatatatatatattttttactctctctctctctctcactctcttgacatgacaggccatcaggagttctattatatattcatacaaaatttgagtgtgcatatagtaaagccatgcagagaggccttgttctgaaagaaaatgtctattcccaagtaaggagcccaaaatgcagaactgtgtcacctaaagcaatggccagttgatatgtttgttggagtgttgtgttagaatgaagaaaaaaacagtagaaagaaaggagtgaagatgatatatcaaacaagggtcaactaaaaacaaagctgtcaaactatcaaaccttttctctattaatattcatagccattgtttcagttcagcacagtttattacactattgtaccacagattatagcaattgcaccaagaagacttcctttcccagaacagtagtagccacttggagaacatgcagttatctattcaatttcttccccttccttacataattgtaaatatagttcatttgggattataaaggctcaacttgttcttttaagctggtaaattttttcttttgatgtttaacaataatctttttagaaaataagcttaaaaatcctaaacatcaattaccaattgtagcaatgatatgagtttgtctgactataagtataaccagtatactgatttcctccagtgttggcagtacagatacaaaatgcaaaatgtaaagtgctagcaattgtaagtaacttctcattactttctttgagaatgaaagagttttccaaaaaaacaattgtttctgttcataaacaaaagatatgaataaaatggcatcttaagaaccacctgaaatttacaattctagggtggtatcaatctcacttttatatttgctgtaatattttcattttattttcttgcaaacagttcctgtagtatttactcaaaaaaagagatacctatattatggctatatccaagtatgaaagttagattacctaacacttgagccctcaaaaagtcaaaaggattggtgtgaccaagtttcacagatcaatatctgaaatgcacaaaccaaacaataaatggttttcaaagacaaggcagtaatgaaaaaatgtagaaaagtaatgaataagaaaccacacataccttaagaagctttcgaatcagatatctgggaatgccactggctgcattctccaaattcactacttctctctttcagaaacgatatccacaaacatatccttcagtttttcatgttggaccatctcttccaaaattctatcttctctgactttggttttgggaggattactgtgacagcttgatttggaaaatacaagtttagacattttgtgcttctcatcttggcgagagtacttttccctttccattgtcccatgtgtaaagagtctgtatatgtacacaattttcttctgtccaattctatatgcacgtgaaattgcttgccactcaacagaagggttccaatgaatgtcaagcaaaacaacccttgaagccccaacaaggttgattccttcagaacaggttctaagtgaagcaagcaataccctcacattgctggaaggattgttgaagacgttgattatggactgtcgcagcttaaaatccattttcccatcgatataggaaatctcagccttttcactccagctgaaatgggattccagttgtttcttcactaaccgcaatggcgaaatgtattggctgaacaccagtactttctcatttatagattcacaaagccgaatcagttctactagaaatttggtctttacaccagcatggtaattcagcctcagtctttttaactcgtccttgtcagttgttggtgctgtcagtgcctcaaatttaatcttaaggaacagtgaaggatggacagagaccatggagactccaaattcgaattcaaattggttctttctcctttcatgaattaccttaagtaggttcttctgcaatgtagatggctccaatatcaccatagagaccttaaacccaggaaggctatcaaggacattgccttcatgtacatgggcataagattgtaccaatgctcttaactctgggctgacgtattccattctttcaacggattttgtcagtgcattccaagcttttttagcttctttgtccctattgtccattgtcgaaggctctccctcttcaaacctcggcatcaccaggcagaacgtgttatacagttcgcttaggttgttttggaaaacagttcccgaaagaacaatgcgcttccttgttttaaggcgcgacaatgctttccacatgcgggtttgatcatttcggggagtgtgtccctcatcgagcaccactagattaggtctgtcaacaaggattttggcagactgcttagccttgtcgtcatttgctcttctaacacgttgtgcaaagagactgtaagtgatgcctaatatggcaccaccctttgcccaagatctcaatttcactgcccgaacagcctcagggtcatggcgaacaccccctctcagtagtaaccgagcagctacctcatcttctttacctgataaatctgttgagttataattgtgaaatggtatatcaaccttccacttccgaaactcttcttcccaggtaaggagcatgctgcaaggagctataatgactgggaagcacatggggtacagtttcaaatacgactgcaagaagacaatggtgaggcgggtttttccagttccaggagcatgtgatattatgcaaccttcctcactggagctctccatgttcctccctttaagatcatcagcgcgaattccaccagctatttttgtccaaataaactcaaagccttcttgctgatgcggatacatggtatctttgataccaggaatgaaatcccaaactgtatcagcatgttcagggaagccattgccagagagtgaaccacaattataatcttgctccccgagtttatcaaagacagagctgtttttgaagccaaggtctctaaattcagattgtccccatggatttctttcctgaattgcagagacaatataattgagtcagaaaatctaaaaattcaatctaatgctagtaagttcattagcacatataataaaagaggtagttggcctaaaatgtaaaaaccaagtctatgccataactaattcaagttacaaagctgaaaaatttaacaaaaccatttattcagatccatgattgttatgaggtctttctttaaacttcaatctttgactggtttagagatacatacatatatatacactatcatctaaaatgtttatttcagcacatactataaatttgcaacaatcatcctcccttaaaagaagtattatcaagttaaatccccaacatttatataccaaaatgagaaaataattatctagtatcacttcatatatctaaaaatactacacatgatgatgtaaaacaacatgatgaagagctacatagaaaacagatccagcaacatacgtcttatccaacaaatcacagtgacaactatattatggctaccaagtaatatatatataaacattaactcatataacgtccaactggaagatcattgttgagattagttctcactttaacaggaaacacaagcacatagagcaaggtttaacaaaaaaaatttacatatacatttgtacaaaattaaacatttgaacaatgaatctacccttaatgataagatcactcaatatacatacatgaccaacaagaataccataaacagtcctactagacttacaaaaggtggcataatatgctggatctccacttggacgtgcaaacagcgagagcatacgtatccaatttgctcatcataaatcagctgatgtctgccgtgattacaaagggattccacatccctttcactcgaaagaacatcttcatcttcatcttcaacctgaacatcaaactatcgaagttcagaaaacacttaatttgaagaaaaaacacccctctttttggacaaactcaataaaactagataacagagagagggcaagaatttgagaacaagcgaaattgagaatgaatgcttttgaagtctagtttatttttcagagacagccataaatatcaaggtgtacaagtttcccataaatgcagcagtacatataattcaaattttcaagaatagtagaatggtaagttttcaagtacttaaaatcggtatcttcacattaagtgttattatgccatttcaatagatctctacaaacaactataagtttgctactaatcctaaaagttttcatagatggagaatgactgccattcattgttgtaggtgaatgaatagtgggtcatttgaggttgtcacataagattgatgagagacatgttggtatggaaaatgttaggagtaaggaaaacatgactaatcataaattaggccagaagagtggaggtttcaaattcaaactcaaactcaaactcaaacttgtttctgttgtatggtctcaaaaaaggaaaacatgcacaacccaaaaaatgttgaatctgaataatctggtggttttgagaataggctttcataactctatcaaagtcaactaactcctttgcttcaatagacatgaacaaaattactaaactaatcaaataagaaaattcttgttcttatgatgaaattcagtaaaaacaaaagaacgtaccatatcatcaacaggcaatgaaccaatctcaccagcagctacagccaggttcatttcatcccaaagtttctccaactcaagctcctcagctgacttctctacttgcttagtctcctctccaaagaagaacttcctacaaatcctttcttcatttagcctcagattatcattttcttgagtcttaatctcattaggatcttgtaaagccgttccttctgtaatggagtccaaaagaatcctagccacgtcaagcttcacatcgagcttcttttctctagtcttgtcagattttaatctcttcctcaccaccttctctatctggtcagtaaacagttcatcagtaaaaagttctggttcttgatttccttcttcaagttcaaattcaagttcaccagcaccaacaccaccatcatcattatcctggtcaatgcaaaaaggttgacttgcagttccatctccatccttgactattacacgatttgattttgagtgtgaaaccaacctagctcttttagcttgagaaaatctcttatgagcaggttcacccacattcccctcatcatctacacccccattaacccaaatctctggacttggccctttctcttttctcccactgaattcaccaccaccaaaccgatcactactttccctcacacctgtaaactcaccatatcttttcctaaaaaacccaccatttgttttccctgacccactctttctccaaacaccagaacacgattctccaccctcaccgttcatctcaaaatccctccttttacgacaatgccgctcttctctatcctcataaatgtcgtacgagcagtccgaactgtcctcactatcatcatcatcgtgatcaaactcctcagatgaaagcaaaaactcactgtcactgctacatttatcttcatcaatgttgttcattaagtcctcatcttcatcgtcttcatcaatgcataaagggttatctctagttcccattcatccccatagaattattagcctgagactgagactgagactgagaaccaacctttctcgattcaaatccaaatcccaagttattctcttcatcaactaagacagccacagaatcattaccaaaatcttcattctcaactttaatctgtacttcagtgggcgtcgtttcccttctcctcggctttgacaagcttctgaagaactcttctgttttcgaccttgttcttctacaaacgggattagagtaatccatattcgaccaagattaaaactttctgccaatcgatcaaaacccagaaaaaaaaaccaaaatcagcgtaacaaaagagtaacagaacataaaaatccaaattgacaagagacagaagagagcaaagccaacccaatgagagtatatgaaaaaaagagggttctttgatgtttttgaaaggaaggttttgcagaagacgacaatggcggaggagagaagcgcgcgcgaagtttgtgcatgcgtagatatactggagaaaagggaagagagagtatatgggggaaatatgggaatcatatggtctgtcgtttagttttccttttatatgaaaaaaaccattacaacagtcaaaacaagaaatcgaaagtcactgcctaataataatagaattataagaattgattttaatttattatatttaatttattctaccaaaagtaataggacttttttttattattgaaaaaataaataaaaaaaaaaaaaaaatggtatcactcttacttttacctcatgcctaattggtcttttttttaaaaaaaaaaattaagtgagtttctcctcgacctcaacccatatcaagtatactctattattattggagttagtagagtatctacatatttgctatccaatattttatctatatacaagtttggaatttctgtatttttaataatgcttatttagcatcttgtaatttaaaatcatacctatttgatactctaaatttaaatttttttaataaaattttatcaatacaaaccgtttaaaattttattaattttaaatttaaatttaattatttgataacatataactgagatttgtttggttaaattaaaactgtattgattaaattttactttaggtactaaatatgtacaatttaaaaatatgaggtaccaattaagtattattgaaaatacagggtaccaaatatgtttttcatgaaaacacaatgcactaaatgaatgtattcccgagttagtatcataaatgaactacttttcctattgttaattaattttatgcacattttttcatgatgagccatatatcattagtgtaaatgaagtgggaatggagttgacactttctattttgtataattagaatattgaataataaataatgtatagtattttattttttttttatgtaagttaatatttttgtttatttaaaattttaaaataaaatttattttgggatttttttatttttatattttaaaatattttttttttgtattttcacaaaaattcacatagtaacaaatggagtaatctaagggtgcgtttagaaagctacaatctaattagatttgtatgtaattagaagtaattacacaatttgacatgtttgtctgaccatgtaattacactgtaattgtgtaattggaagtaatttatactcttaaattctcatggcccccatgagaattgaatgtaattacactgtgtaattactaaaaactttccataataaacattagctactaaaaaatattattttctcatgtaattactaactattttgtcaaacaagatattaagaattcatatgtaattaccacctcatatccaaatataccttgcatttaaaatatagtgtaattactaaagtgtgtaacatctacatagcaatccgcgtagaaactacttaaataattcaaaccgtaaatttgaaaaaaaaaataaagaatagtatatagagtaattcttttttttatttttatattaagagatttcccgtcttctttccgatagaaaataaatagagatggagattaaaatacttaataggaatgaggatgggagcaatataattattcattagttaaataaaaataattattctctttaattaagttttatcaaagaataagtcactttattttcttcatgtaaaataaaatagggacccaataaaataatataaacagtcttgactctcacttatagcttaaataacctttagacaataaatagctctcaaaggagaaaatagaaaaattatagtccatatattattataattattagagtaatttgcggcaaaaccccctcaactatcaatttacttgcaaaaaaaccatccaacctcatattttggtgg

SEQ ID NO: 14269 - DNA, 5015 bp, Cannabis sativa
  modified_base (4281)..(4290): a, c, t, g, unknown or other
  modified_base (4839)..(4849): a, c, t, g, unknown or other
  modified_base (4933)..(4934): a, c, t, g, unknown or other
tccgcgcttattttactagtaatcccaattaggggattagggtttcataagtttatttggtagcgtgcctaattatttagggcgttacagagagagagaaagagagatcgttacagtgagagagagatagaaaagccatacttgagttagtctcagcgccaccaaacctaacgacgccataccattcagacagaaaacgagggaaataccaaccttccaatacgattcagagagagagatagatggatgtaaggttttaaggggtgggggtcttcatttcgcggtcagactagaccatcgtaggccgagtttttggcatcttcttcttggcagctggaacaacgagagagaggaagaaagaggcgctgcaattttttttgaagggagggaggcgctgcaattttttttgaaaaggagggaggcgctgtaattttttgttgaaaggagggaggcacagtgagaaaggagagaggagaagttttagggttttgttatagttggttgtgttaaataataagagagagaaaaatgtatttggtttaattaattaattaattaacttttaagagaaataaaaaaattaataaatgctttttttttggtgacgctatagttaattaattttatttttaataaaaaataaaaaaataaatttaaaatttctgaatacttttagtgacacgcattgtgtgttaacaatattaaaattttaaagtcatataatgcgtgtcactaaaaattctctaaaatatttagtgacacacacctgtgcgggtcactatagagtgtcactaaaaaacaattttgtagtagtgtctttatatatttcaagagattgcatattggtgtttaacatattcaatcaagtgtcaatcatgcatacttattcacaaagttattactatcatcaacatttgagaatacgacatacaagattagaattcgtcgattagaagatctccacgaatgcctatatgagggggagttactttacactatacttttttcttttgaccaagttttttagtaaagttttaaatgagaaaatttttatagatatctaaggaagagtgttatgaaatattatttatggatgtccaaattactaaattaattattattattaatgtttggttgtattttccttaattacattgacttaatttctcattcttttaataatatttttgtataaataagagttcaacctattataataaacaattgaaaaattcttatttattttcttttttttttttatctttataatcttcttctttttttatatatatatattttttataataatttagtattttctcgtttctttctcaaggttgaaggttaccttaattagccctttaattttggggtaagttaaaaaatactacttttattaatcaattgatcaaatttacctttaattttatatttaatcgaaacatattttatatgtattgtacccaaaatattcttacataagagagtcacatgaagagtatcttgaagtgatagaggtaaatttggtacaatatttgaaaaaagaagtaaaaatgatagacttttaaaaaatgagtaaaaataaaagagaaaaatataaaaaatacatagagtgtaatttcttctctattaatgttttctagcttgggctcttttgtttgctccgttgaaatttgtcagcctttcgtccaatttgccaatcttctcgtaatgcaatatacataagttttttttttacccataataattttcaaatatataattatcctggagttgaactgtatatgtaactttttaataggcgtttataatgtactgtaaatgtaaaatgagcctaatagtggtaacagtagttatgatgaaattcaattacgtagcattaaaaaaaagagttgactcttgggcactagtttcatcatttttgacttactttattcccaagtaatgaatgctttaggctccaagtttcaacattataataattaaaataattattaataaaatgtaaatataaaaataatcattaccagaaaaaagtgaaacaaagaaaatgaataaaaaaacaaaaacaaaaggagatgctgtttaaataaaaagtcaacggctccactacttatgttgttttgtcatttagcgccatttttttttcttctgaaaatttccttattttaatatgcgcattgcgcattgactacctcagctaagcttccgctggagattgctatcatgcgctgcactttaagtactccccctcacactcttaccatgcaccaccacaccactcttcctttgaaaaataaaattatttacccaaagaaattgattttactgtaattctacagatgatacgatagtaaatcctctaaaattgtcattttggcgtactttctttctgttttggcatctaacaaggaatttttattcatttttttgttaatgatcatgtgtatgtcctcctgtaaattttaaaaacaattaaaggaaaaaaaattgtacaaaaataaaattatttatatagggacacgattttattccgtaatatacttttactaaatacattctgtaatgtacgacagctgttagatgagagagttatttgatctgagggctggagttgatctaagggtaattagggttaaaaaatgataacgtacactgagacccattattacgtaccctaagatctctctaatgtattccgtacatcacggaatacattccataaaaaatacatcacgggacaaaatcaataataactttatactattataataataacttttgaaaatacaagataattatagtataactcaatgtattaaaacaaatatgttaatgctaaaagacctttacaaatataaaaaagtaagaaatcaataaagtcacactaatttatgttttcaaaattttaattattcacagttaagaaatataaaaatagatgttttggtatttctttttcttatttaatttaattttattggaaggttttatatataaaagttttactaaaaaactattacttacatattttacttatatttttattattattttgaaagaatttaatatatttaatttaatttattttattttttttgaaaaattatctcatatactattttttaacttttttttttcaaatttacgatttagttacttcagtggtttttatatgggttgctatgtggattttagttacgatttagattgctcaattaattgctatagaatttctatgtagaattccataaaactacaaaataaagtgttttaaagtgtaaaaatgaaaaaatctcatatttttttaacatacataaataatattcttccgttaaaatatgatttttttttctccagcttttcttttcataattaatttattgccactaaaacataagtttcttacttaaaaaaggaaactttatgaaaataattatactattatttatttaaataaatgatttttttaattatgtctttttttccttgtaaaaaaaaaagatcacagaaaaaataaaatgcaaaaaacagtgaatattcataatattttctaattaaacataaattttataataaaacataattattaaaaaaatagtatttacatatttttatttttgttttttagtttccaataaatcaaaataagtatataagtataatcaattcgagctttttcatttttacacttcaaaataatttctttttttttttgcatttttgcatttttacataattttacataaaaatccttattgcaactaacagagcaacctaaatcacaatcaaaatcgtatagcaacccacatagaaatcactgaagaaaccaccttagaaacccaaaccataaaatttttttaaaaaaaaaaaaattcaaaaacagtatatgaggtaatttctctaatcaaattttatgtcaaatataatagataaattaaataactaaataaaaaatttatttttatgatgtgtcttaagaaaaagttgcataaagtattatataagaataactatatagacaaaatattaaaatattacccctaaacgcaaatagttattgtttaaagggatattgacggctaaaccacctgaactttacggtttgtaacacttaaccacaaaaatcgaatttttggcggctaaactacctagaccttggttccgctttgctctgcacgtctaaaaatcacaattaagtgccacggtggactgtccatgtgtacacacttatacatgtggcaaatttttagtggtccacgtaatattagttttaaaaannnnnnnnnnatatttaaaaaaattaaaaaattagattttttttctttttttacttttttttttttaatttaaaaaattaaaaaaatacttttttttttcttcttcttctttcttcttctttttctgcagaaatcctcccaacagaagaagagggcaaaacggagggtcagttgtactgagaaccaggaggaggtggtaaagacattggtggaggcattgagtgtggcattggtggtcgttgcatcatttgcatacctgggggtctttgttgagctacgggtagtccactgtttcgaggtggatattgaattgtgtttgaaggcatacgaggcatattcaaatctaatccaggtggtggtggtggaagaggacgaagtaaaggttgaccaaatatgtctataccaacggatcccgaaggaagcaccgtctcaccaccggatcccgaaccctcccagccctctttctctctctcgtctcaccaccggatcccgaacccttcgttttgccttcttcttctgctgggagggtttctgcagaagaagaagaagaagaaagaannnnnnnnnnnaaaaaaaaatattttttttaaattaaaaaaagtaaaaaaaaaaaatattctgatttttatattttttttaaatatttataattnntttttaaaactaatattacgtggaccactaaaaatttgccacgtgtaaaagtgtgtacaccgtggcacttcactgtgattt

SEQ ID NO: 14270 - DNA, 3218 bp, Cannabis sativa
acaaacccgttgccttgtctcagcgagtggattcggttaggtttcatcaggtgctcagcaccaaagaaaagttaaccggaaaaagccaagccatcgtacttagagcaaagaactccccaaatggaagaatacgtcggttacattccttgaagtcacacccttcagctaatatgaagccgaagagaaacacggaacaggaaaggagaagaagtcatacatggttgcaaccagagagtgaattagacaatatattgtctttacactcacctgttccatatttggagcatcttaaagaaactgaatatggtactttatctatgtctctcattgacaatattatatgagaacttgttaattttggaagttgttcaattttgtaatgctaccttatttataggccctcagtcaaaaaaaattaaatgtagttctgatttccttgattatggattcaattcaaaatccataaaatggaaatgatttgagtttctcattatatcattcttcttttgttatgttcaagaacaaaaacataaaataaatgtaacttctttgtctattcttgtttttcatttcgccgagtatcgcagagttaaacagcttgtttactcggtaataccgttgatataatttagtagcccgaagattggagactcaggttactccatgatcactctagtcctccttaagctttgttagctcttggaaacttgttattggtgtgttttttcttaccctaccaaagaaatttgctaattgctcgagtcttccaaaatctcaagtcgactcatttatctttatgttgatcgagtttattagtgataggaattcttttgttagcccaagtatttggtctcattgtttctaaggtgtatgtgtctgtattttcatgtcttaatttaaaaattgtcaaacttgttcaagatcctcatattatatagcttcattgtttgtacaaataagtgttaatgtgatcaaaaaagaaaaggaaaattgatagattgaccatgactttgttatagtgctgaatatgctatgaggaaagtgatcaacacaaattgaaacaacaaaaaatatataatagaaactcaaattcattcatagttgaaaaaaaaaaaaaaactttaatttagaggatattgcatatggctttttgtagcattttttttagatttaaaactgtaaaaatattataattgattattacattatgtatttaatttttaagcaattggttaatcgtgtacctatataaatatgagtaaccagttacaaagagagatgggtgaccaatttttgtgagaaaggtaacccatattgatgtgcaaacgggtaactagttaccaaacaatgtgaaaatgaagaaatgattaattaattaattaatcaagtatgtatttatttctaataacttgttactcatgtcacaatgaataatattagtaaccgaatactgtgagagggataacttgttaccataagagggtaatttgtggaaaagattaagaaaacaaaagaataaaaatagatgcacactctcttaaaagaaagaacaaaagaaacaatggatgattaggggaatgtggggagcattgtttgtaccaataatgtcaagagattgtaatataaagttaccaatttgtattgatgatgatcattgaaggagttacaaattttttaagatgtcagtctcttgtaactatcattctaatattatcactcattaattaataaatgagttactaatttcatttaaaatttgtgatttgtgaaaaaaaaaattattgggaataattatatttaaatttttatgaatttttttacactgacacttatgctgacatacttatgataatataacatatacatgtaaatatattctttgctttccttattatattatttgctaaaaaatagagaaatgttaaaagatatttataatgttgagtaatattattattggtataatataatattaaatttattttactataataaatattataaaaaattattaattaattataaaacaatatttcatcataatataaaatatcataatatctcatagcaatattactcaattcacccatcaatttgtttatttattatggcatattcaatgacaaattcagtccatagttatcatataatatccaatcctaaatcccatctttatatatatatagatatagatagatgtttggttaacttattatatatatccaatccctctagtagatacttatactggactttgtagttcccaaaaaaagttaatatatattctctggtcaacagagttaggctagtttcaatcaataaaaatcaccatcatatgctgttaaattacttacattattttctcttttctttgggaccatatgtgcagagatgtcctagttctacctaaggagggagacaataataaagacaatagtacaaatcttctcatcatgaacttttattattttctaccaacttgacaagttgatcatctatgtatagatagatatacacataattatatccaaaggctttctcatatcaaaaaatggtaaatggtatttggtatttttgtatagtgtaatattattattggtatgttttaaaattagatttttatttgttttattttaataaatattataaaaaaaaccgctaatcaattatatgacactatcttatagtagtactaggcagaagacagatcctatttaaaattagattttatttgttttattttaataaatattataaaaaatcgctaaccaattataagacactatctcatagtagtactagacagcagacagatcctatatgttttttcttttaaaaatttatataaatgatattaagcatatactgtatgaaatgctaaatgaaacgaacatatatactatgtaaaaaaattgattagtgtcggtaatcagactttcaagttctctctactctttttggatagatttatcgtatttcacagaataaatagtgaactcgtggaccgagatcctatatttatataagtgagaccttatatcaagctctctactataattaattatcagaatatttttaataattaattcagaaaattatatcaaaaaaacaaatatttagtaaattataatttaaccatttataaaaaggtaaataccattttggaccttttgttttacaaaaataccaattggaccctgtgttttgttaaatgacaa

SEQ ID NO: 14271 - DNA, 4212 bp, Cannabis sativa
ttttttttttttttgaaagaatgcgtgcatagataaaaaaatatttagacctcactagcttgtcattacagagaagattatccgaaatggaagaaaatagtagacaaccaaactacttgtggctaaacactcaccttgtaaaattatgcgcaacaaaattacaagctctactaatactaaaaaagatacaactaacaaacaagggagagatcctattatataaaaagaagaatagttctcaagcgtccaactagactccttcccattgagagtattaataaccactcttgagtttgcaactggtattaatagccacttccaaagccaagcagcagggcaactgcttcccatacaaagcatcagaaaactctaaccatgccatctatacccacaccatcttgccaagatggttcctaacttgtcaccattgtagttttctgatgcttcccgaggggcaggttgccaaacatctaacaaactcagagcatgagtagggaagagagaagcaaaaggatctgcataagagatacgaatagagtcaatacactatttccaattgtctagcttatgattttgtaccttgtcattgcggacccgctagatagtgtcgacaataatcgaagcctaaagaaaaacttcatttgcattaatgttggacttttaagtcccatagaagtttaatccagtcccacatttgaatgcctgtaccaactataggaaagataccccacagcgagaaccaccacaaatgatcataaacctcactacaaccacccaaaatagattaaatcaccacaaataaacccaaaaccagctcaagaacaaattctatcaagcttaaaccctaacgaaaacttaaaaactcataccaaaacaaggctttgcttccaaaaattaaatataaaggtgagctagggttttaccttgaattggctaaaaacttccttccaaattcttgttgaaaatcccgctgaaaatggttgaatttggtctggtttttcttgggttaaggttaggtttaaattgagggtaggttagatttaggttgtataatgtttattgtctaatttcttgttttaatcaaataatatttcagcataaaaataatttaccaaaattccccctttctacaactttaagtaaccccttaaccaaggggtaaaatagtcataaccatctaccccgcataaccccaatgctcttactatccataatttttttcccgctaaatctaagatataaactgtatatatgtgactgtaatggccaaattgttgggttctactattaccaggtataaaatataaaaatataaaatttcataattaacatgcatggcacacctaaaatacaataaaatctcaataattgagaaattatatcattaatgcacatataaatagaaatactaattaaatcactaataagttactaatttttatgtctaaatatgtggttattaaaaaattgaaatgattttttttagagtataaaaccccaacaaatgatcacttgggtagactcactaatggaatgtgataatggttgggaatttgaaagaggggttatactatagtgtggtatcttgatgtgttgcctacatgtgtgacttgtcaaaaaattaccatcttacacggggtatttttttatttttttttctaacaaaacttattaatcgtgcagagagatggaaaattttcaattcattataactctatagtacactcctgagcattttagtggatcccctgtttgtttcgtcattcagaagagttttttagctcaatttattttcatgatcgtgtacattatagttatttaggacatattgtaaaattttcgaaaattcaacgtagtttacaatgccaaaaataaaatttaaatattttttatacgtgtagctattttttttatacgtgtggtaagtaattgtttgaatcttatttttcaacaatgtaaactattcaaaaaattttaaaaatgtatagttatatttaaatagcgtgcaattatgagaaacaatatgactaaaacactattccacagtgtcgaaacctaatttatcccttttacagagtgtactacataatttttcattagtatgtttgctcgaatttataaaactaccaaaagatgctcccatgatatgctaaaatacccatacatctgtaaaaatgtgtttactaaaatataagcaattctccctacctgatgccctaaatcctcaattttgaactaataaaatcttagttagaggggtgcactcaaatagtgaaaggtgtctactatagaaatactctataataatgaaaggtctcacacttatctacacgacatatttatttatgtatatttaactggcaagtgaaatctgacccgatcgattgatcaaatatactactcgtatgtgttagctaagcttccaatatttctcaagtgacaagattaggatgatgacaagactcaaaatattatagtacattgctcgcaactaaaattaatgacttttttttttttttttagcaaagcatacgttcgtatagggtttttattagtttggtccgtaagtttggacctaaattataatttatacatataaattagctagtagtcgtaaagataatacctaacatttgacttttcgttaagaatcccttaatttatgaagaagaacaaaatgattgagacgaattgatttgacattaaattccaagtacgtaattaagttaaagcctaaaaaaaaggaatttaagacaagtactagtcaaaataaggaactctttctgttaaatatatgactcaaatagccattttttattatatttcaactatcacctgagtggatttggggtggggaaagtccaaatcagcttcacaatataatttatatttgaatttatatatacaatatagctctaatctatttatatataaaatatttctatatttaacgattattaaataaatttaacataaatattaattttaaaagagaaatttttattagtatacgtaatatacatactaataatagaaataacattggttaatttaataactttttaataacgtgacacgtcatcatttctaccgtaatatcaaaacaatcacatactagaatccaaaaagaagtatctcgctccatgaatgcgttgcattcttcctctaattacgagattgatggatcctttgaacagcctgtgaaacacaataccaaaaacgaaacttttaaatttgcttcctattatagaatattaaaatcacaactagaatcattcttacaaaaaaaaaaaaaaactccattaatgaacaaaaaaacttcgttcataaacaacataacatcaatcattcataaccaaaatcgttatctcaaactactgacaagatctacaaaattgttttactatgattatatataagattaaagtcactaactgaaaccattctcaccaacaaaaactccattaacaaacaaaaaagcttagattacaatctctacatgatcgattatgagttcagtgccgaaatcttttctcaaactaccaagaatacctaaaaattagagacaaaatcgttgctggataaaggaacaactcagtcgacactttaaaaaaattgatccgaaaattgctttgttctactgtatgatttttattttttttattttccctgcgtttcaaaagtaagtttttggttacctatgatatttataataaaccaattagttacttttgcataaaaaagaatattgttttttcatcttttctaataatatattataaataacatcaatcaactaacatttataatataatcagcttcttcatcatgaattttttttttttttcttgcattttcaaaagtaacaatttggttacttatagtgccgataaaaacttaattagttacttttacataatttttttttatatcatataattttaaatacaatttgattacctttaaagcttatttgtaaacctcttataatcaaatagttatttttaagttatattattgtatatcatttaaaatatatttgggtaaccttaaagtttatttttgaaactaatgaattgtcatgtattataataagttaccacttttatttaccaattgttttatatatatttttgttactttaaaaccaatgtatttatttttacattatattacattattttttaaaaatacttttacattactttttta

SEQ ID NO: 14272 - DNA, 2127 bp, Cannabis sativa
ccccctacaataataacaaaacgaagaatgagttcttaggagatattttgtaacatcaaatacactaattataggaaacaatcataaaataagcaaagaaaaataaaaaaaaaacaagctctttatttacattagaaaatggataattaaacctattgtcagtgtgttttatatgttgatctaattattagttattctttgggtgtggaagatattttagtaaattcgatgcatatttgaaactgcttagcttctgccatggaaatcgacaacggcgaggtgatcaaccacactgtaactgctggcattgttgaacttcttcacttccttctcgttaacgttaacagtataggaatatatttataccacaaaaatgtataaggaatatatttataccacactgtaactgctggcattgttgaacttcttcaattcagggctaaggacttaggggatttggatccgagtctagttcgagttcaaaatattgattaaaaaaaattgtttaaaaaaatatcaaaagtgatttttttttgtttttaaaattttaattattagttaagcaattaagaaaatagttttataaaacatatttttgaaaaatatttttacttttttaattttaaaaacaaaaaactaattaaaaaaagtgttaccaaatgacaccaaaacacataatttgatcgcgcattatccgtaaatatagagttttttttttattttcaaatcatatatatatagttgtataattgtattaattacataaaaatgcaattctaaacttgcattaaatgaatttcatttatgatagtttttttttctcttaagaaaatacataaataaaagcaaattgaaatgttatctttgcttaaatagaatatggggtttattgttcaaaagaaaattaaaataaataaaaaagagggtaattaggaaaatgaattattactgattcctgatgatcaatcacaaaaacctacctaactctatctccataattagtgatgtaagtaagttaccactatccatcattatttaccgagttacatttttgaacttattagtttttgtattgtatgagatctaatagcaataattaattgttattttattttgaaaaccatttgaaggcatatttattatttctagtttttttaggagcaatttgatgttttaaaataaagagcataaaaaaataacaaaacaattaaaatgacagagttaagataatgaattgaattgtagtcataataatagttgaaaaacgtttaaatttgggtgggttctacttctaaaccaaataatgagcatcattatttgtatacacgtgtcttagttgcattggttagacaacaaaacaagacaggtggaattattggcaaagttctatatgtttttgtttatagccatttgtttctctaatattaacagtaaccaattagtgtattgataattatacttatcagtgtagatatttctctaatcttttatttagttgtagttttttttttttttgtttattttcagattttataactttacagcctataatatagtgaagtggacttttgctaaaaatataataatttgtgatgatattgggcaccgttaatgagacactaacagtattctttatggtttttagtatttctctaatttttttaccgtattattaatgtagttaatacttattatcttcttgccatttaaaaactcatttaatagtggagaagctggcatcgtgtgacacgtagtcaaagatggaataggacatatctatagctattttattatggagcattgctattaggcaccagtggtgcctaacaccttctcgagatgtcgcgttccgattggctagcgatactccctaaaagttattatattgaactatataggacctgatacttaattggaccaatatcgatattgacatataggagggtgctaagcatttctctttattatgacttatgacatgataaatgtgaaaagaaataaatagtgcttggtatttttttagggttaaaatttagaataagatgtatgagattttattttaaaattaattgataataaaagagtagtctatttatcttatatataaggaataattatataaggcac

SEQ ID NO: 14273 - DNA, 5596 bp, Cannabis sativa
acagtctcataatcatcacacttgaccttccccagacgatgtgggattgcacaactcctagtctttacccttgcgaatcacagaactctaactgtcacagctgccgacagtgtataataaatgtcagtgcaatggacgttggacaaaaggtatgtagcttttatgttgtgcgcctttcccgtgtctaacgtaagggacaaccccttaattatgtgggattcagtgttagatgggtgccacgtaggactggacacctcttcgattgcctgttctggaataccccatgagggcatccgaatatgttccattaagtctttccttctctggacgagttgcccttctgggaccaaaaggacccaaccttataaagattagagttggtttgcagttagatccgaaactgtgattggacttcatcatgagctgatctactagcttaatggagtttgtgaataaacatatcttgattaattttagaaccttaaaagtatgtgtcacctgaaaagaattagacataaaaatattttaaattttatttaaaggaaaatgaaatttagacatttttttttaactttttacatagttacattaaaaaagatgtgtcaaggtttgatctattttttattgctgcgaagttattattaaaataaaaatgttaaacactcaaactagagtgtataaaaaaatgttttatgtataatcatcccttctgatttttttaagtgtacaacgctaaaatttatgcacttttttatttatttttttaagggtagattttattcatggtaaaatctaatatgattatgcaaaatataactgtacaattctcatagagatgaccaaacatctaaccacgtcgattacaaaaagagtaaagaacttgagagacagacacgacactaaggccaaaggaataaagggtaaaaaacattttagaccatttattttgaaaaaattactaattgaattatttcctatatctattcgcattaaaaattatctttaattatattaaaaaataaaattattaaaaattgaactcagaatcctattaaagtttattgtgtcatttaacaaaacatctaatcaataatttttgcaagtatttaccctataattaaccttaacaaacaacaagaagcacaattaaagattagtagtaggactagatttgcacaaagtcaaccaccgtcaaagagagttcttcaaacatgcacaaattttgatgagatccggtacatctatttgaggatgcaactgttataacaccatcttcttatgcaaacttagttagaacatttgatcattagcaatttgcaaaaagtgtcaactctttgttataataatagacaaaactacttggattgtaagatgatccatcgaatttaatttacaaataaaataaatatagaaattcaataatcgtatcatcacatattgccattgcaatgccccaattaaaattaggtacgttaaagtgaaaaatataaaaagccaatacttaaatggaatactctgagaatgagagaacagaatcatgaataaataaaggagcaaaacaatactaaatattaaaataactgaatgtattctcaacctattttaaaatcaaaactgattccatgacatctttggttcaagacataaagatctaaaatttacactcaaacaaaaacgacagcaataaagaggtttaaatttaaagttcatcatgtgggggtaagccccggatggcagacccactcaaaatctttcatgcaacatcggtaaccaaacgaatgaaacttagagctgatgggagaaactagtagaatctcatttaccgccaagggttgggaactgtccgggatcttcaatggatggggctgccacgttgctaggagtgtatccaccaccatatccacctcttgaaccacggccacgaccacgtccacggcctccagaatagaacctctcaccttcagctggcttcaggaactcatttatggtaagagactgcatccaaataataatccaattgttatgtttgtaacaacagaaaaaatgaaatagaactaccctgcatttgcatttgcatatttttaaaactaaaacccaataaataggacgagactgaagaaaccttcttagctttctcttccttttcagctgcttctttgcgcttatccttctcagatccctgaaatgtaaatacccagtaaatacaaatacagtttaagctggctatacaaggcatttaattaataaaaatagtgcaccaaagtcataccaatttgataaagatgtcatgattctcctttttacatgagatctgctgcatcgattcaaactctttaacatcaaccttcctttcctctgtcttcaaagcaaccagagcctttctcttctcctcaagtaccttctcatactcctccagggtcatttcctgacaagatatacagcatggaatcatgatcaggtattaacaataaaggcttaccttttgaaataataaaataatataccataccaaaaaataactcgatgcacaaacaagttcattactagattttcatcaacaaaaacaaaaggatcattactcaaacaacgctctgatttggattgtgttaagcattaaccaacctaacaggcaaaaacatatttcccaacattaaattaaaagtttgattgttgatcttatctttaaaacctcaaaattaacatgaagtagtaaaaagtaaagaattaagaatacttacttgataacctctcttaaagcataaaaaataattaaatacgaataaaaaaagaataatgaaagcaaccttgtcctcaggctccttctcttctggctcagctacaggactatccttgttggcatcaggagattcctcttctcccaatggcttctcagcatcaacattcttctcagtttcagcaacaggctcctcagcctccctgtttgagaggggaaataaatgtcacagatagtaatgaagcataaagtagtactacctccctaattacgagtccaacattcaagatatcaaaaacaaaaataaagttcaaaacttacggagcaatttcatctgtgggtgttccccagttcccacgcccagcaccttcccgcttaagctcatttctacacaaatgatagaatgaattttaaaataaaactaatagacaatgatcagtcaacaaaaaaatgctgaagtaaaatactaacccacgtccagttccactgcgacgttcataagatcttcgaggacgttctccttcaccagcctcaccgttgctaaaaccaccacggcgtccaccacggaatgcaccgcggggagcaccatagccacgcctttcagaggttttccctgattctccctcttcagatggtctgttgtatcctccagaaaacccattgttgccaaaggaattctcattagaatcccgattgaaaccaccagcaccaccgcgacctcgtccatatccacgtcccccaccacgtccacctccacggccaacctcattcctggactccttcactacaaaagtaaacaaccaaagattaaaacaaaacgccaaagacaaatcaacagtgcagtacattagtcacacaacacaatttaaatgttttcaatcctttgaatgcacctctcaagaataaaaaagcctcaagcataagaaaagaggctaataaatgtgagatacagataaaaaaatatgaaattcctgtaaaacaaaataagaacaccaaaaaacaataatcactctggaaactgagaaaaattatagccaataatatgtacattcttttattatttatctgaacatattgaaagtattttactctcgacataaataaataaagaaagaaagaaaacaatgaacttaaaatgatcacttccactaaaaaaaagcaataccatcttgataaatacatacataatctcatagatttagaagataaaaaaaataacgaaaatcaatcgcgagccataaaaatctagcatctttcgagaaaataataaaaatatatataaacccaatacgaaatgctctaaaaagcaataaaaaatacatttttttttgtgtaaagcaaacagagaacaagttcatcagaaaaatacaggtctgaaatgcaaaaaagtaaagaaaagaaaagcaaggctcaccagattgggcaggaggaagaggctttgagggaagcttggcaggcttagctggctgagcagccggaaagacaggcttcttggtgtcagcagcaacaacaggaagcttagcggcgatgagttgagaaaggtcatcgttatcatcatcacccaaaaggtcaaaagggttcgcggttgccatttcttagagtcccgaaaaagaatccgatccgaaaaaccccttgaaaagccctcaccaccaacctaaaacagcaaccacggaacccttattgcttattcgaatccatgaatctgcgattgagagggtggaaaagggtgtttgggagatgagaaaagagaaggaaagtagagagagaagagagagtgaagtgtagcaaagaaagaaaataatggtagtctcacaaaaccctagccaaagcggcagagaaataaggaagtggcttaacctaatcttaaaaaaaaaaaaaaaaccctactcgtgggcaattttaggttacggcagggtacactttaactgccttatttttttattattattatttttatctaacgtaagtaatacaaataatggttttgtgttggtgtttcaatttgagtttttgtgttatgttcttttattatatattaattaattaatttttaataaatagatttttttttaaatgtttccatatctatgatattggtagggttttgctttgaattattgttttgtaaaaaaatataaaattaaaaaaaagtatttacaaattttctttttttggttgtatttcgtgaatattttgagaaaaatacgcgaataattaattatagtatgaggatatatttaagtaagttaatgtagctggaactaaaggcggtgcgcctaagtattctctttttttttttacctcttaacactatttttatagttttagctatagggtgctttaaatatttatttataccacaaatttcttaaaaagtagctcgaactaagtataatgatcttaaatatttaaacattaacactaaaaatacggagacacgatatcaaatttgtggttagagtaatattatttgatttttacgtaaactatcgagttacagaccattgaaattgtttataaaaatgaacaaaatgcaagccattacaacagttctggggcaagaagggaccagatggcatgttgaggggaatcggaccaaaagtttctataccagtgacaactcaatccggaggccaaagcttaggtctattttgtcaacttcagaattatgccgacgtcgcatgcttcatcactagactatgagcgttgcgtcatggtttatgctatcatgaccaagatgacattcgatatttggtgagtaattttaagaaatataaactatgtctctaaaatgaagaccacagcgggtacgactcatagtgccctgattacagcattctgcttgaagcagggtgtgctaat

SEQ ID NO: 14274 - DNA, 3414 bp, Cannabis sativa
gtgcttttgtacttgaggggtggcttaagtggttagacatgtgagttgtttctgtagatttcttgtttatgggcaggcggttaagagcctagtttggcgaataggttcattgatggttactgaataaactaaatataaaattatttgatgttgttagttggtttgaaagtatgtactaaatttaaacttagatacataggtgtgtgctaaagaacttagtttgttttagcttttgttggaacttaggtacaaagactctatctatggttatagattgattgaactgttcttaaaaaataatacttttgtactcttgtggtcagacatgcggtttgttttcgataggtacttacttagcaaaggcttgcctagttttgagaataggttcattgatgtttactgaataaactaaatttaatgttatttgattttgttggttggtttagtataaataccgctatggttatatagcttaagccttaagtggtcaaacatgtggtttgttctcgataggtacttacatagttttcttgtttatggttaggtgggtagcctagttttgttgttcattggttattcgggcagcctagttttgctgtttatggttaggtgggtagctagtttcggtatggttatatagttgaacttggcgtcttgttcttttcttgcttaatgtttcgccttgttcattaaccagaccatgggattacagtaaagggagaaacaaatatggattcttattgtctttttttgttaatctatgtaatgtcttcttcttctgcagagggtcacagacatggctttttttgctgaggatgtccaccttcttgctaggtatccctctttctataatcatgagtcatttttcttttcggctatgttttctggtcattaatgttcttctctgcagtgtgagtgtggaaggacggctgtgtgtatggaaaatatcggaaggtccaggaggtgaagaaggtaaacaaccagagatcacagggaagattgtcatcgctgttcaaataactggtgagggggaagcttcacatcccagaatttgctggcactgccacaaacaagtaatgcttacctgataaccaatcacctcttaatcacctctttatcacctcttttttttttttttttctttttttttaatgcgtgcgattattgttgtctgaatgtctaagagattgtaataatctaaatactcgtatgcaggaaatgttggtagttgggtttggaaaacgtgttctgagatttgatactacaaaagttgggaaaggcaaagtcttttcggctgaagaacctatcaaatgtccagtagagaagctggttgatggtgttcagtttgttggtaagcacgatggagaaataacagatttgtcaatgtgccaatggatggccactcgtttggtttctgcttcagtggatggaacggttcgtactctcattcttttccttttcttctctctctattctctaattattcttcactcgggggttgtggtttctgtcaaatctgtctttcttggacaatcaataactttgatttgtaactaatttatgatcaaatttattgaaaggtgtgttttgattaaagtttactcgaaataaatgcagataaagatttgggaagatagaaaagcgcaaccgcttgcggtcttgagaccccacgatggccacccggttaattcagctactttcttaacagctccccacaggccagaacacattatacttatcacagctgtatgcttctgaagtttttcggttgaataatattctaattgtacttgtgcaatgcatcttatcagagtgataagcgagttgtagctcttgatattaagtttcgtttcaacttctttcagggtcctttaaatcgagaagtgaagatttgggcatcggctagtgaagaaggttggttgttgccaagtgagtcggaatcatggaaatgtactcagacattggaacttaagagttcaaccgaacctagggtagaggatgcattctttaaccaagttgtagcattgccacaagcagggcttctcttacttgcaaatgctaagaaaaatgctatatatgccgtacacctagaatatggtcctaacccggtggctacacgaatggattatatagcagaatttactgtgactatgccgattttgagttttactggggcaagtatatcaccccatggagaacatattcttcaggttttttgtgtccaaacacaggctattcagcaatatgctttggatttatcgcagtgcttgcctccaccaatcgagaattcagcactagatcggtctgagtccaatgtttcacgtgatagggctactgttgaaggattccctgaaatctcaccactgaagccaactgcacaagcgagcaactctgaaagtgcgatgaggtatcctgttggctcttctatcgaggcaacatcttctaaagaaattatgactcggagtacagaggtgaaatctgttgcgttaacaccaacagcaagtgatgctgacattgtttgtgctccatcaccgcctcttcctttgagtccaaggctgtcggggaaactatccggttttagaactccattagatacctttgagtcaggtacttcgtttagtgatcatgcttctggagaacaagcaaataatgattatcctgtggatgatgattctaggaatggtgagaagaaactttcacaagatgatttctcgagtgtcgttaatagtaccggctccggcatgtacaaacacccaactcatctcattactccttctgagattttaatggcagcttcatctgagagtactaaatccgttgaatgcaaggctggaggtgaggcaaacacccaggatgtgcttgtcaatggcgatgcagataataccgagttggaagttaaaactgtgggtgaatcaagatctaatcaaaatgatgatttcagagttcaggaagaatctacaaaggtttcagagaacaaagaaaaatatttttgttctcaggcatcagatcttggtatcgagatggcccgagaacgtgcaatatcaaatgtcaatgaagcttatagtacagatgaagctcggcaagttgatgatgcaagcagtacagaggcacaggtgcaacctactcatgccagcgaggaagatcaagactctacaagagacacatctgcaaaggcttccgaatcatgttcttctactgcagctaatcctatgcagacaccgaatacaaaatcgaaaaagaaggcaaaaaactctcaagcatctggttcttcttctccatatccaggtgtgctcaattcagtggattctagcaatgaacctggtgggagttcgagtttggaagctgcatttcctcaaattgtagccatgcaggagatgcttaatcaggtgtttattccagcttttggaaattagg

SEQ ID NO: 14275 - DNA, 13802 bp, Cannabis sativa
  modified_base (12140)..(12140): a, c, t, g, unknown or other
  modified_base (12190)..(12195): a, c, t, g, unknown or other
ttttttttttcttttcatctccaataattaggagtcagcaatatttttagttttataatgggacacctggtaagagtataaggtaagactattagtattttaataaatttagttagtaacatattattaaaatgtataattgttaaaaagtatactaattatttttatatgattatgataatcatgtttaatctaaaatatatttgaagtaacaattaaaaaatgaaaatgtttcttctccgcaactacaccccaataacttcttttaattgtctttcgaaaattctcttacccaacaaataaattcagtttcgaaataataatgtattttgtttattattaagaaaacgaaatctatccatacagaaattattgtgtggttttttttttttttcttctttttaatggacagaaaagaagcatgacatagaaaaaatggggtagtaaataatggggtgccacctgtaggataatgtaatataaactcgctttcagagcttttgtaagtagcaaaacgacgtcgttatcaaatttgtctcattcttccatacgtcggccgattctaataagacaaaaagaataaaaatttgaccaacagttttattatacatatgcaccaaattgtgtataaggcacgagtactacactatacttttggctccaatagataaataataatatatatagacaaattaaaggcacattattaggtacactattttagcataatttacacaagagacgtgaaacaatttctgaggtgttatggacttataaagtacatttctcatgtttggtatttagttccttatttggtttatatgatcataatattcatattggtgcactactcactatatattcaatattgacaggtaatttcaccaaatttgaatatgacacttcttccactattttgtattttcactatttactcaagttattattaatatatttagcaaaaaaaaaattattattattattattattattattaatacttctagtattaaagaaactcgtgtgtatgagtttgtcttacattattagtaatttgtggtatttatattatatttggtaattactaaattttaattgtgtaatataattttagtatatatattttataaaaataatgtaatatatatttcttaagctttgatatttattttaacttattattcttacttttttagcttaatttttggaagtttttttttttttttttttgaatggtttggaagcttttttcttttttaaaaaattaaaaaagtgatgaaattctgtattatttcggaattaaaaaaaaaaagaaaaatagaaaaacagaaaaggtttactaaactaaagccacccatgtgatcactgctttgttacgttaattaatgggaagtataaaagtgctttacgtaattatgatcgcaccacaaactcaacactcctcaataatatattctttcatttattattattattattattatagtcatttagaaaaacaaaaaaatgttgatattattataaaataccgcatggtaattaacaagagaagagataagtgttaattaacctcctattacaattttttagtcaatctccacatccgaaatcacatgccgaaatatttgtttttaaattttttttcataggtatttgttatagttacagtatcatcctagtaaattttttaaaaattctgaatagtttacagtaccgaaaacagagttcctgatatttcaatttaccacgcgcgttcaaagaacttcaaacgtattttcgacacggtaaactatttgaaatttttcaaaaatttacagggatgatgttgtaagcataacgaacaccctcgtgaaaaaaaatttgaaaaaaaaatattccgacatatattttcgagtgtagaaattgactaagaagttataacagaaggttgacggtaacactcctcctaacaaaaaaaattataatttgtttattctgtcactatatatttttctttattaaacgacagtaaagataaataattgcgaagcttctctcctgtttttttttatatgatcaccaataaatacatatatattatatatttatatataatataaggacagtagaaaactggaacaaattatccacgtttatagttttaagaaagattctgtagctaagaaacaaaaggtaaggaagagggtttcgaaaatgaaaaaaaaaaaaaacatgtggaagaactttcggcaaagttttttgaaaaagtaaagcatgtataattagaagacaaaatgaaataaattaggagtccatggaaaaaaaaaacatattccaacgctattgatatggaaaattctctaatctccacaaattaaaattagatatcaatcatcatcaccatcaagaatttatatttaatttataaataattttcattctcgatctatgattaaagaagattcacgagattagttgggaagaatgaaattataggaatataaataagaataagaatagaaataagaatggaatgaaataaaatttaaaatgcactaaaaaattaataaaaattattaattttttttcatgttgcattagaatatgtagagattaaagaaaggaaagaaaaaaatgaatatctcttactgattaaagaagatgaatacatagtttatatatagagctatattgagttcaaaccagaaagataacaaaataactaattttaacaaaaaatactaactgtacataactcctaaccaactctaactataaggtgccagcttagctggatttgtgttctcaacagccctcttcaaacttagtgtggttgagcaagccacactaactttgtctctcaaaaaaggaaacttggagttgaaaattggttttgtgagtgaatcaactaattgatggtcagcaagaacatggtgaacagagttttctttcttgagcttacctgtaacaaaatagagatcaatttcaatatgtttagttctggcatggagcattgggttggctgcaagcattatggtgttgagattgtcacaccaagacaaccggaggagtggaaactgggatgtgaaattctgaaaagagggactgaagcaagcttaattcagtcacaacagaggcaagacttcaaaacttagcttaagtggaggagcgagagatagtgtattatttctttgactaccaattgatcaagttatcatcacaccaaaaaatacagaaacatgtaatggacctctgatcattcggatctgcggcccagtctgcatcacaataagcttccaagttgaagtgaatttccttttttaggtgtaaactgtagtctagagaccctgtgagatatcttagtatccttttgacatcaacaaggtgagattgcagtgggttgtgcataaactgacaaaccttgttacactgaaggcaatgttaggtctagtaatagttgcatattggagagcaccaacgatagacctgtaggcagaaggatctaagacaggatcattgccttagtttgaaagcataaggccattgttcatggtgatgatgtgttttcactccctgcatcccagctttgcacagagatcttgaatgtactttcgttgagaaagaatgataccatcagcaataggaaccacttgaattctcaagaaataatccactgtacccaaatctttcaaagcaaatttagtacagagagatgagattaaagcaggaacttgtgagctatcactttctgtgattaaaatatcatcaacatatgctaaaatatagatgtaggattgagaggatattttgataaacagggagtgatttgttttagctaaagtaaacccaaagcttgttaaggtagaagataatttttcaaaccatgcttgagaagcttgtttgaggccatataatgtcttgtgaagcttgttgactttgtcaggctcatttgaatcaatgaaaccagaaggttgggccatataaatttcttcttgaaagtcaccattgagaaaggtattgttgacatgaagttgtctaacaatccatccttttgtaacagcaaaagttagaatcactctaattgttattggcttgactacagggctgaaagttttattgaaatcaaacctagcttgttggtggacgcccttagcaacaagtctggctttgaaagtagtgatagtaccatttgtattttctttaattctataaatccacttgcagcctattagggttctgtttggtggaagtttaaccaaagtccaagtcttgttcttctttagagctatgttttctgtttgcatagcaacaaaccacttgcgatcttgcaaagccatgtttgagagagggtggactgagggctgccataagcaccgtaggttttttgatgcgagacttggctctggttttcattggatgttgattgttcagtgttactgttggtgtagtaggagctacagagccaaattgacactgagatgctctagcaacaatatcagtcgaagtagatgaagctggttgagtgatgattggagcaaaagcatcattgtggcatctgttggatgaggtaggaagagaacctgcaagtaaatcattagtaacataggaataatagatggatctgcatgtgtggtaacagttggttcagtgtcagattgtgatgaaacacgtggtgtaacatgttgtgttgggataaggtctggtgagaccagtggaggagatggaatatgcacaacaggtggaacaacagtttttggaggtgatacagaagatgaggaaggtggagaggagggattttgagaagaaagaaagatattctcatcaaagagtacatccctgaaaatgtacattctgcatttttggaaaggcacttataagttatagccgttgtgatagagattatacccaataaaagtgtaaggttgggacctgtactgaaattttactttgttgtaaggtctcaagttgagataacaattatttttaagagtactaatagaaataagtaacaaaaatttagttttataaatttttattaaatttaaaatttaattacttttatcttaataaagtataaaagaaactacaaggttgctttttattttagttattttttgtgataaaaaataatatgcttattacatgtcaaaataatttccttgaaatatacatcatgatactattttccaaccaaaatagttaatagagttaatagtgtaatcagaattttttttaaaaataatagaattgattgagaaaaagagaggaagagagaaaattaataaaaaaaaattatagaaacttaggtcacagttgggaaaaaaaaaaagaaaaggacaaatagaacgagaaaaagaataaaaggaaagaaagaatatgctcaattaattttatcatagttatatttgatatccataaccaaatttgtttattttatcatagttatattttagatttaatgtgttttcactatgcaaatttatacttaaaagatattttgtaatagacagatctttaagctaattttttagcttatctccttcattgtttccaagagattgtgaaatacaaaataataaagctattttttaactttccaaaacatcttaaatcagctcatttcgagtgtgaacgggaaaggaaagtggaagtattttaccatatctctaataataagtattgctattatagtccacatttttttttcacatttcaccgagcccacatctattttctgatttgaattaagaataataagtaaccctgaacatacaaaatatattataatttaacaatatgaatatattataaatataacaatatgaagttactttctatacacaagacatctaaatgttttctatttacaatcaaataagtcttcaaacatgccacaaaagtttatataacttagtcttccactcagccttggtttcagtttggtgtctttcttcttaccaatctgtagaaaggaaagcataaggatatgttggtagccagatggtgaagatatgacaaagtgaaaaacacacaagaatattaagaagacaaaaacaggctagaatattaagttgcagcatagaactacattcctaaataacctggtaccaaattctcaagattggtataagacaccatagatatggtaccataaatgttttattttgatttgaattcggctattcacaatgtatgagagagggttccccaatccccactaagaatccttagctgaaaggttaagggaccaaatcacaatttggtgagttcgtaggttaatgagaaaatctcatctctagttctcaatgaaataattcacattcttactttacttgcaataagtgtcaaaaaaaaaatacacataccaaattatctcttattagcgtcaatgaacatggctcgagtccagtgctcaacatcctcaaaatctgatggaggaggaggaaaagttgcatgctctacgagatcccatccttcaaataagctttcattctttccagcctcggacaactccgtggcataaagaaagctggtggcaggattaggaaggttattttcacaaatgatctgcaagcatggaatttttttcttttttagacgatcaagttttgtattctcacacccaaaatacagtagagcgtaatgtttctcatttccctaacgttgtaaaaattcataatcaaaaaaatccgactcaaaaacccaagaacatgcgcacagtacaaaactgatacagaggacttaaaatacttcactgcctcgttagattttggacagtaacttaggcctatttgctgttcttttaaagatcaccttgttgataaacaatcaattttacatgataaaacttcattgatcagattcttgggagggtacccaaaaaattactaccaaagaggaaagaatacccaatgcaggaaaacaaagcatagaaagaatgaaatattatgataatttgaaagtaaatagaattagacatgaagaggaaaaaaagtattagaaatggaagcaagctctgtaccgtggatgtcattgcatgtgcactgtccagtatcgaggcagatgaaaaagcagaattcacattccatacagatttatttagttgttgaacttgcttattggacctgaaaattccaaagaaagattgctttaagatgaaaaatagaatctgatcaactgtctctctataattctttaactagcaacctaaaattaagatggtatctaggaaatggcatggaaataaaacgttaaaaagtaatcaaaacccgttgtaagactttttatggaactggctccttgcctaaccctacaatatttggggaccaagaaattagtaatttctatgagcttactcaggaggaacttgaacctcatactttgtgagagcacaccacatgtctcaccgttcgagctatcatccttgggtcaaacctaaaattctaaacttgagaggctaggataaggaaatttctctacaaaattaaatttgcctaaacccagagcaacaaggattgtgtatccctccctcacaataatatacaggcatagagaaggcaaataaaatatggaaaagagaaaaaaaaaaacaaatgatgatgatgatgttccgacagcattcaaattaagatatttgtgtgtaatgtacctcgaacaagctaactttatggagcaaacagaacggagttccttagatgaagataatgtagctaataactttccaaatgcctcaaaagtggatgcctccgatgggacatccagacccaatgaattatagcaatatgttgttaagcatgccacgcttttcttgagaagtgctatgcccttctgcaagtccttgtgagtctcaacagaatgtggagatgcagaagaatagttaaagcttcctgaagaatctaggcgggccttcctctccgattgtattgaagttacaccaaaattacttgagcttctatctgaccatgaattttctccagtagtggtgcaatagttttgacgcgggataaataggggatattcataactgcataacactaaattaatttagtccagtaatctgagaaacccaagtgctccatgctatgaaacaatttcattactgcataacactaagttaatttagtccaacaatctgagaaagccaagtgctccatgctatatagcaattacaatcacataccttcgtgaagaaggacgtgcattccaataagaatctctttgccaaatccgagagcaagaaccctgagaaacagtatataaatttaacacaaagaaaatccatacatgaatatttgatggcattgaagaaccttcagatgtttgtttaagaaaaagctctaaaagttatgcataccaagttattggttaaactccaacacaagttatgaaggctagagagaatatatatatctatatataattatttaagattaagaagcatttttgggtaggaattatttttaaattactatttataggtacttttagtatttttggtactcagataaattacaacttcattttttttacatgacggtgtataatgtatttatagggacttctcacaaattgttaggaaaataggattcacacaactttttgcatgcgtgcttgttccgatatttataagcacacacaacaagttgttttaatactaatttcgatatctttatttatccggaatttcctaaaaatttgtaggaggtcaactgtagctacattataccgttatgtaaaaaaatggagttacaacttgtacatgtaccaataacaccaaaagtacctacatgtaatgataaaaacaaccactatgatagtgggcccattattttaagaggataggagacttcaatgaatagtaacttattaagtttcttcaacacttttcgaaaggcaagaataagatcatagttgcttgttgtatcaaatataatcagttagtacaaaactggaaatcattgacagaaaaatatgcacatgatcaacctcattatgctgtgcaattaatctcaaccatggatatttttaagtggagactacatcatatttaattgtatagttgaaattaatagcacatcatagtgtgtaatgagtgtgtaattgagagtatctatcaatactcgatagcataatatatatattgaactcatacaatatgtcggatgtatttccatacgaaaacaacaaccaaacattcaaaacaataacatgacacaaccaagaattatggatagtcaaatgcaaaagaatcacatcattactcccaaagcccacattaagttcatcaatggtaaaactcaacactaaagaaatcaaattattgtcttgtcatttctcttcataaaaaacatggagaatccagcatagcttaccgcaaaacctgaattatgaagagatggagcagccaagatttgaacaacaagattaaggagttgcaccatatatctgttacccaaccgtggtcagcaataaatagagtcagacacatgaataacaaaactagcatagtgcataatagcattatttagtaacttaaaagtgaaggaatcgcagaaggaaaacacgaaaaattgcaagttgtctagtggaaggatgacagatagtagacataggcaacaaacaatatagtaatagcctaatagagaataaaggaataccccaatgaggcagcaagttcttctgatggaacagagtgtggatcgagccctttcggtaaccgtgaattgcaaatctgatcatattgttcacttgactcatttatcttctctccattcataatcacctaaacaacaaatgagtaaccttatatttcagaaaatatcagtgtctgtaaaaacttaactctaatgcagccttgcaaaggcactccaaactatagattgaactagaaaataataacatactaaaactgtaatgttacatgtcatgctacctatgtttctgtaattttaccatgaaccagtctaatcgatccagtctttaagatctaatagcaactctacttcgaaataactacgattagtgtaggcacttttatagtaacaggtgagttcagaccaaaccatgcagctaagtgtcttagaagagagaggggaaaacaaagattacttattttaaggaaagtggctagaactatcaaaagctaacctacataagttgaaaactaaaggattcaacttttaagagagatataatcttttctttccaataaatttaaatgataatcaagttaatcacaatagttctctcctacccagcaaacaaaaataatatatatatacatcaatatatataaatttatacacagaaactataagccgtataatccttccagcgaacataaataaatacacaaaacagaaacttagtcctacacagggatatatgtatacacacaaatgtagcttgtactaatatcaagataaatccatcatcagaagtgcttacacggcgttgaggaaacaatttgcatatttgttttataaccacagactgcttatgaagacgttcagaagtaattgccatctgcattaaaaaaaattaaaatagaaaatttgtgtaggacactagaagaatttcaaataccaacgtacaaatgtggcagaagtttgactttcaaacaaaatgaacactgaactgaacaactatattaacaaacaaaattacaagcaagttaagcttcaaaagttcctataagattagcatatagtgtccttccttcccaggtaattcttcttttggttttttgtcttttataagaaaaactgaaaaagaacatcataaaagttagcaatagaatatttacatgccccaaggtctgagtgcaaataaaattaggatagaacttctccagctgttccacgcggttgttctccaactgcaaagaggaaaacgatgcacatagcttagcaaaaaatggtagctttactccctttatcccataaggagattgattaaacaataattacaagcattaaacagaaaaaggtccttgataccatggaaagagatgactcaagtactccagactttactttaagatcataacgaatcttctcagccctagccttccctataaaaaaatagaagttgttctgaagtgacaatatcggtaaaactaaaatgtattaaagtagagctgtgaatgccgaccgttaccttgcacgagttgttccttagaacggcggagcttctcctttaaatttgcaattttttctttttgagacactctccaattcacttgatcatctgctttcccctgttgaacccaccatatatatatacagattttatatgagctaaattttagctcttgattctaattatatttatttatttatatcagaaagattgaagcaaacctttgctagaagaacttgttccaatcgagaaaataacgaatcgcgacgactcttggaagctcttaaaatattgtagtgatcagctaatctggttgacacaacattgatttcaatgcaaattatattcaaaataaataactccccaaaaaaaatcataaatttgtgaagtataagagaagaagaagatgatgatgatgatcatacctataatttacacaattgacacaaatagaagcgagattgcaattctcgcaaatggcacaacaattggttttccggatcattgtcgtacttctcatccaatcctttattttgattaatttaatttaagtttttattcattcattcccctttttctttgccttttcctgagaaaatcaaatttcaaactcatcaaggggaaatgaaactcagaaaaaaggaaaacctaagatgagatcttgaatttgaacaaacaattatgagagtaaagtactcacatgagatgaaggagtaattggaaggagagttaggaatttgcttggccgaacagaagagataacttgagaaagcatataagtttataaagctacgccactcacatgttttgagtttcgttcctttgcttcttcgtttgttgttttttgctctcccctcttacaaatataatataataaagggtaaataacattttagacgttgtgttttacaaaagttactatctgtgttttgttaaatgataaaatagattttatattttctaaaatggtaaaaatagtaccttgagtttaatttttgataatttttttaatataaccaacntgaagacaattcctaatacgaacatatacaaaaaaatgtaaacagttttnnnnnngcacttttagatcggattataatttaatttttttttttgacaaaaaatcaattcatgatcctatttgtaccattttagaaaataaagggtctattttatcatttaataaaacagaaggtctaattaataacttttataaaacacatggttcaaaatggtatttaccctatagcaaacacaaaaatgaaattacattttaccaaatggcaattggcaacgatgccataattataaggattactttggtattttggattggattaattttggttaaactgaattattaattggaaatttatacatttttggtaaaaaaatttatatgtttaaatattttttatatatatttttatagtgttttataaaaataacacagaaataacataaaaaaattacattgaagaatagtaaaacaatatctaaataacataaaagtaatatacaaatgttaactcccaaaaattattaagtgtaatttttgaagatctataaattagtgagaggaaaaatccaaaatatactttacaacaaaagaagatgtcaactatcatggcgggacaccacacaagagggggagccaacatgaggaagggccaaggcacgggttgagctccctgcgtgaggagcttcccgctccgctctctctccccactcctctttctctctattccactctctctctcccttgatcacttactcacttactccccttagtcaccactctctctctctcttgctcccttactcactcactccccttagtcaccacctaatacaccctcatctatacaaatgagcaagaacacttagagtatatatgttacattggagtaactccgaaagggatgaggaggaagttcttattaagtttgaacaacaagtctcacttctcatagacccattagtacttaagtgttatacatgcatcatgagcgtaagctataaagagaggaatgttattgcaacgtacaacaaaagatggagtcgttaaagcatgcacgcctctgaggaagtagaggttgtacaacaagcacaagtagtggagacccaataactatttgtctcactcagagtatcaactgacacccaacaactatctcaccactacccatctgacgtgttgatcttcattgtataaaagtaattttgtcccccaactttagggaccacttgtattttggagccattagagctccctataaatacctctctcttccactgaataaagggttggaaaataatcatttgtaagtgaatttatagattcaatacaacactatttttctccattaatgttttgagtttcttaagcttttcatcttcacccttttgcatttaattttctatctaaagtttagatgacaaggtttttccatcaacagactagcatcatttgtgggaacgacaagctctagctacgataattcctaaaccattcaccatccttttcgagatgtcaagacattcccatcgtctccaagaaaatggagttcactcagatgaaaaccagctagccaccatcgtaagaggacatcaactcctgtcgtcagagagggctaaaggaagaataaccaaagtgtggaacactaagcaaacactcaaagagg

SEQ ID NO: 14276 - DNA, 4594 bp, Cannabis sativa
aatcacaggacagtgggataaaaatgttgtttctctactatactactgctatacttgatgcattttgtgttgagaaaccacattctttgcttctttcttttcagtatgcacgaattgtgcgtgaggcactatgtgaacttgaggttccttacatccttcaaaatgttggagaaggatcatccaggtctaagtttctcattgatgcaattggatcaaaagaggtctgcaacttgtctctttattacttttttttttcttctcatcttggttggatgacacactcagatataactaaattgaaagtagttttataagatttttattgataccaaaggtaaacgttacaaataccaagttttcggggtcttgcttatctcctgaaagtaatttactttctcactaaacataattccgacccctaacttagagagatacaaggtctttttcctgctaggacttaaccaaactaatagcaacattggattgcctctaatggccttgaagttttattttaaaatatcctctatgaggtgcctcatttccatgcatgatgttatctgttgagaactctaagccaaggtgattgagtaaaacattcttcgtacaggtgcctttcttgatcgacccaaatacaggtactcaaattgctgactataagaagatccttctttacttgtttcaaacatattcaacagacagttccacttccatgcctgttacttgaaggtaatctttgaccgagtgacgggctaagcaagatgtcatgaactttggtaataaaagattagtgtcagtacttatgtccattaacttggaggcatgctattttaaggcaattttgtattatgcaattttggttttggttgtgatcataataaaacaatagtggaattttatgatttcagctactactcaaattttgaagataaacaaagtgttttccaaggtaaaaaaaaaatccatgttttatagaatcagctctgttgcaactataaccatcactgtctcttattgaatgaaagtaatgtctaaattacaattctgtgaaaagaacgtttgagctcaaaagggtcagctccaaaacttaggtcttcctagcccaagaacacctaatttataaagataattaaaatataaaagaaaaataatttaaaaatatactcttattcatgctcggatatcatgaccagtgctgctcaaacgcaagcagcaacagctacagcaggatgatcatcagattcacacctactctcgataaatctgtgtcgaaatttgtcaaactcaccagcttcgattgcttctcttatggacttgaagaaactcagataatgatgagtgttatgtctgcagcatcaatcaacagcaaaataatttacatatgttaaagttaaaaacttaaattcaaaagcattgattgaagttagagggacaagaacagaagaggccattgtacatttctagcagaatatgagcaagcatttcgtgtacattgagcaggtgattgatgtaagctcttgtgtgattctggcatgtataacacccgcagttctcaaaaattggtgatgtgtctttcctgaatcacaaacatgtaccaatgcaatgtttatatgatatatatacatataaatgtataaccaaatatgaatctataattttatactgtcaaataacaccaaaaactgtatcagcatagatatttcagttacatttactaatcctcctttatgttcatattttcataatcagctgtcaaaaacatacaacttttggaagcaggttgtttggatcctaatgaaactttgaaagtagaaatgtgaagtttcattacctgtatattgttgctcttaaattaattttggtctgttcaattccaatataactaggctgaaattcagaagcattaatctcaactccagaaggtggaaatgtaagtgcaatgcctccaagtgtaagatggtaaatatacctgcaaaacagtcatttacatcatcggagtttggccaagttagcagcagaaagaaacatgaaaatgtaaaatgatatgcagtagaaaggacaaacatactcagagtcgaaaagatcgatgccagcagcaactccctgcaaaacctcctctgaaatattaaaaaacaatatttatttggtgacaatttatgaactccttaacacaaataaagttgcaaaataggttatcccatatggatgaaatcacaagtctaaaatgaaatatcacaaactgagtaaatagtgaatactattacagactaaactctccaaaaaaatagtgcatatttcttcaaaccataatgaatgccttgctagtacggaattcaagtctgctgctgtaatgtggaaaagcaacaattctatattagaaagcattgaactttgtacctggaaggccaagcccacagacgaaacgaggcttctcctcttgtagcatatcctgaccatgttgtagaagtattagaagtatataactccacgttaaaattacagttaacagttaatttaaacacaaactgtcatgtattgaaaatgttcacggaaattgagtgtatgaaatgagtcatacagtaacagcgttgagaagagcagggcgctcctctatgctctctccaagtccaaatcctccaatcaaatagcctgcaggggaaaataatcaagatcagtttacagtgaaaaagattgcataacataaaagaatgacagcttaaatgagaaaaaactaaaaaaatatcagcagaagattctaatattatggttaggaaattaaggttatttagtcaaactcctttaagatgcctcattggaaaatacccttttgtgaccaaggaaagtgcttgttgttgtaactagttctgaacctcaataacgtttaactaagaaattaacatgtaaaatgtctaaatatcttctcaattatacgcagcacaattatgtgtactttatagataagctaactacaaaaactaataagagcaggttactatgcaatcaaaatatggcatcatgatataattgtaatgttattaacatgattttttttcaaaattagattatcattaaaaccaacagctactaattatttcttagaattatgtaacatagaatatgataattcaaaaagttgagtaatctcttaagtaacttatttccaaaagctagaaaagttggaacctgatacacttctcctggctacctcttgtgcacaacgttcgcgttcttccacatcagagcctccaacaatggatccaagaatagctccacctgcctacattctaaattttattaaagatttccatatcaaccacatctaaccaaaaaaaaaaaaaaaaacataaagaaacttttctgttgcccacagtttcaactaagtcttactcccaactaatctgtcctttgaacactgtgtatgaacatctacaatcattgccctttctatttataaactggaactaaacaaaaggtgaactgagataaaacatttagagccctttaccgagcttaacacaatgcattcatcgagccatctcacagttcgatccacagaggtcttgtttctcttctctggcacccatgcaggaacttcatctgccaaagtggcccatacattaggcctcatgcaacttatcatttcaacataatctacaggtttaatctgcaagaatattaagattttgcaacttcaggacaaaatacacaatgaaattaaatgcattcaagaagcaacaagtgccaattaccaaaaatcgaccacaacgagtctgaaaagatgctccaattttattagtggaattatattcaggaagactttgcatagagtccctggctacagcagcaaatgcatagtctggcaaaccaagcatctggttcaatcctccgagacttgatattgtttttggtgatagaccttccaggctgcataagcaagcaatacaacacaccattcactctcagctaatcattcaataacaaacaataaaatatacatccctacagttacaaacccagttaattgcatcgttggtgttagaaagtcccgcattaataatgtgtgggaacttaataccatatataaaatgcacgtgctactcctctagttcgcaagttttgacatagaatcctataaatcttaccatatacctcactcaatcctactttcatagcgagccaaaaataactcatacacctcaccctatcctactttctcaaccacttttccgcattctaacagttggttttttcattttctatgttggactgcaaagtagcatgtaatcaatcaagtgggcatacaaaaaattcaatttttaatggcaatgcctatctatcttgtctctcagaaacaatttcacaaacacttgaactgcactcacataacaacaaaagcagttgtaaacaatgaaagaacaaaagggtatgaagttaaagtttttaagactcacaagtgaagtgggctaacttggaggagatgggaatgagggaaaggaagagaaggaagaaggtcagggggaataaaatgaggaagccctttacgtgtggagaggagaagagcaggggtttgtatagaagcagggcaatttcccagttg

SEQ ID NO: 14277 - DNA, 8863 bp, Cannabis sativa
cctacaaaaattttaaaattataaaaatattattaccgtaaaaaaaattaatattaatttacagttgagaattaaacttaagtatttatactgcaaattattttattattgattatagtcaaacacacccatagatattcattatatggctataatatataaatatatattgcacatgggaagaaacttctgtagataagcacgaagaatatcactgaatagcataagaactaagaagccaattaaaaataaaatcgtcattttcttttgtgaaaaataaaagaatgcatcttataattaacaccttacatataatgacaaagctcttacaattgaaagtgaaaaaaattgccaaacgagcaccagagtgagagagagaactgaataacatttactacaaaacaatggaggaaaataagagcctaagtattctgtatgaaacccaatggggcggatatatatattaaaaaagaaaagaaaaaagatatacatattttggctgtatacatactaaatttattcaatccaaggaatttggcatctgggattttctcatgtgagcataataaccaatcactttttaactatacatggtgtacggttttgatgtagataaaaatgcaactatatcaggaaccagtagagtctcacttactattattactagctagctctttttattggcatttttcaagttccgtacagtcattactagctgttgtctttcaccttctacctctgcaaatttgagacttatttctgagtatctctcttgcatttcttttagttcacttcccattattgtgtttctctcctttaaagatgccaattcacttagtaattcctcaactttattgctattttggctatcaacattttggcctttgtttccttcctctgctacaaattcatctctgatatgaagataaaaattagactccactgaaaaacattgttcaaattggaagaaaagagcatgatactcagaagtttacctctttatcagtgacatttcattctcgcttgaagttaaagtactggcatctttaactacctgtaacaccaaaatttcattagcacgatcacaattgcaataaataattagtcaaataatttggatcctctgcggaatggattttagtcagtaaatgtttacggtaaaagctcagataaacaccaccatctaaaacaaccttaagaggtttcattttctgagctaagcatgctgcaactaaccttttgaaatgcactattatgactgagttcttccatccggctttccaactcgtcgattttgttttgaagatctttttccttctccaaaaacgaagaagatgagatttccagggctgcttcttttaattttatttgtccctgcaatagccaaaaaaaaaagtaccattactacttttatttgtataaactgcaattgacataaacaagtagaagaatcatcagtcatagccaatctggacttattccatcttagcttcatagcagagctatatattgctgcagttttcattaaacatgttagcatacctcaagcacttttattttctccctcatactaataacttctttcggaccaccacggggaactgccacagatttattgttttttggagaggtttttgttccatccaaaattggtgtgcgcccattgctttccttaagcttcttctcaatattgatgagtgcatcctctttcttctttagatcactctttaggtggaatacttcctttctaagtttctctttttctgcctcgtctttaagcacagacgactttaagaaatcatattgtgctttaagtttttccaactccgactgtaagagctccacggtagcctccttttcatccttgagattctttattttattcaactcttccaacaactctttcgcttccttcttcatctgagcaatagaatttatgagctcatttctttccacatttcctgtttctatcagcatctcattttccttggcagaggtcctcattttttccaactcaaccttcaaacccctataatgctcttctttcttggagacacaattattctccgttttgagcctctcaatctcagccttgagctgagagatctccctggagaaagtctcctttatttcttcctcgtgcctcttctgatgctcaagctgcttggtcacactgtcagtgtccgatgacatccttccatctgtttgactggaaagctcatgcaactttgcctcgtaatcatccctaactctctggagctgatccttagctttctgaagcattccctctagttggattttctgcccacgcagttcgctagcttctgtcattgccttcttagccaccttctcatttgcatcaaaggttgaagccatttgcatggaaagcattctaaattcctcttgaagcttctcagctgtattggtgtttttccatctcatctttctcaacccttcctcagcccggattgctctttgctcctgctcaactttagccacagttaaagcctcaaggtcagcttcaaatacctgtgcctgttcctctagttcctcctccaagcttcttatataggactcaaactgttttgttttggccaaagaatcagaaaattcttttgactgaatcttctgttcttcctccaagctttttgtatgggactcaagctccattattgtaaccaatgcttctgagaattctttagacttcgtctttagttcttcctccaggcttttggtacaggactgaagctcctttattgttaccaaagaacaagagaattcttttgactgtgacttcagttcttcctccaagcttatgatatgggactcgtgctctttaactgttaccaatgaatcagacaattctttcgaccgcttcttcagttcttcctccaagcttatgatatgggactcatgctcttgaactgttaccaatgaatcagataattcttttgaccgcttcttcagttcttcctccaaacttttgatatgagattcatgctcctttacagttattaaagaatcagataattctttcgatcgcttcttcagttcttcttccaggctttcgatatgagactcaagctcctttgttgtttccaaggaatcactgtactcttctgactgagtcttcagttcctcctccaaacttttgatatgggattcatgctcctttacggttctcaaagagtcagataattctatagattgcttcttcagttcttcctccaagctctttatatgggactcaagctcctttgttgttgccaaagaatcagtgtacacttctgactgcgtcttcagttctttctccaagctctcaatttggtcctcgagctcatttataggagatgaacattcatactgcatcttaagttgttcttgaatctggctttgctcaagtttataggagatgtcatggttttcttgtttcaatatctcataatcaagtgcaagctgttcaatctgcatttcaagttcatctttgtctctcctgtatatctctatttcactgtagaggtctatgatcttttgctccaggagagttgtattattatcatggctgtgctccttaataagtttctctagtgccttttgttcatcatcttcatctgtctcgcagtttcgtaaatttgctcttggcttcacacaatcttcgtcaaagcctgattgcttgggttgattggatgtttccttgttcttatgttccaacatttcctctagatcaccaactgccagaattaattctgcatttgaatcctgtgtcttctgaagctgcagccttagattggtattcaaatccttctcataattcagttcttgtctgagttcgtcaaggagagcccgaacgtccccaccttctaactgtgatatgttattggcctttccaatgtcattacgttttttaagcctctcacattctgccttaaatgaatctctttcttccttcaaactagcaacttctcttgagagatcttgccctcttttactctcttttatgatctgctttcgtagagtttgtaattccatctcagacacatccacctgtctagacaaaacaacgaggtcggccttgagcttttcaatctcaacatctgaagcctgttgagaatcttctctggtatggatattgtgggaactttgtgttgaaccatctgtacttactccatggtcagaacttccgtacgagtcccattgtgatctctggtgatcttcataggattcttttttatgaggcacagaagggtgattcagagatgataggtaggtaggaggctccctatggacatctacacttgctccaagttctcgtgaagtgttaagtccagagctgctatcagaacttgacaaagtaatgtccgatccactagatgctcggcggtttccattcgattcaccattgttagtgggtttgtttattgccccatcctgtaaacattgcaaccaaagaaaagaaagaacttaagaaaaaaaaaatagagcattgatacatttctgtttgatttttatataataattcaatcagagctatgcaaaaacatatgattaccagcacacagctcaggatttaaaaatgctaaataagaaataaactaattcagaagcattctttattataatgaaacttacaatcttaatgttgttatctgcatcaccattgctcaagtgggtctttaagctcttagcttggggtctaggcttcacctcatcacattcctccacctctctgcattttaaattttccaacaaaaaccaaattcatcagaattcatgaaccaaaatctgcaaaactcaaaaaaaaaaaaaaagtgtaacattgaaactcgtgttacctctgatcaacattctcctgtaccctttgaattaaaacctactcacaaaaagaaaagaaaaagaagagttaacaagaagataaaacaaacatccaagacttccatatcagagaatcacaaactcaacgagaaagagtactaacatgcaatattgcatcagaactagaattctttagtggaagagagacagtagaagccttagtggcctcagcataagcagcaaaatcaatagaaacctctccaaatacacaacctttgcccgatccctacacaaacacacaagagcaagttataatgctgatacataaaccactgtacagaaacacagataaacatttacagctctgagtaatttcatcaaacagttcacatacatatgaaacactgaaacggtagattttttcactgattttcccagttcttgggtcctgagaaaatttaaccgtttcatacactggattttcccatctgcagctcccatctctaatggtagctttatctaacttcacactcggttttcccagctcccctggaatcacagacaccatcaaggcatccacacccaattgggttacctgcaataaacaaattgacccaatgcgtaaaaggttttgatcactattaaatgtcataaatattcaacactgttctgactttttcagcttggttgcttagaaaacaaaagaaaaagaggaaaagaaaaaggaaaatttggtccgttgttgctttccaagaactactcgagagctcacaccaacaatgtgaagctaaattgagtaagtttcttaaaggttcatagctccaaaacattaaccattttttttcaaaactcaacaacccattatcaaatattttcgttcccagcattttctcggcaaccaaacaaaacccaattgagaagacttcaactacctgagttgcatggaactgcaatttgaacacagatttgatcttgttcttctcgctcctccatctcgccgacttaaacatcttacgactacgcccctgctaccactactcctacgacctctcttaataattgagcttcaacgccactccatgaatcgatggagctccgtcaaaacccgcctcaacattgcgatctttacattcaccgacggacccaatgccaacccaaaaatctgttttttttttttttttttggttagttttatggtttgaactgagctggttaagaaaaacagagcagaaaacagataaacgagttgactcagtgaatcaaagggagatagagggagttgaggatgacccagttttccatagaagcttggaatggtgaaacctcgggaaccagtttacagactcagaagaagacaatagtaacgagcagatctgatgagaggaaggctctctcttctctttctctctctttctctttctcttttcacttctataatacttctttagaaagcggtgacaaatgtaatttaaaaaaaatacaataataaaaatgaaaatgagaaaataataataaattgtgggagaagcttctatatgtgacaaataatttaaatgaaaatatatattatttaaaattaattaggtggaattaaatggtgttatatatatatatatatgatgtaatggtgtttgtttgtttgagtgtatatgtgaatattatataattttaaatatttatatatacttgacatgcatacccttaatacttatatacagtacttgcttataataaggtaatgttttgttgaggaaatatctttattaaatgtcttttattttttattaaaagagtttgattaagaaatctcaacttgggcatatcccacgtgtgaaccagcttgtattaggaaattaggattagtttactacaaatgtttaaaataagtgtatttttggaatggaagaaagtaaaaacaattttaattagttactaatttgggtttgaaagtcaagttttgatttttgatttattttttatcaatttgccattcattaatattgtattggatccatttgtgatttcccattttatggtttagttttaaaacatgcaattcccaacacttctcaaagagttgaattgttcactaaatactaataaatgggatttttctcatatatatgcatgaaaaattgtttgtataaattcttacttttaagcaattataaagtttaatgagatgcaaatgcttgtttaggtaggccaccaaatggttcatataaatatataataaacatcctatgcctttttatatgaatgtatattgcaccttttaaatatatggagagagaaccttggattcacaatattctaagtattttgttgtgtcattactaattaaatatatagtattttaattctaatcaaaattacaaaaatatagtgtattggacttggtattattggattcttttacaagatttgttcatgtctatatcatgctaattaatggacccttttgagaaaatgagtcccacaaagaatgtgtttttatgtattattgttccacccaaaataatacacattttacttggtcccatcaagatttaatttcttccaaaattgaacagctagagatagcagcaggactttcataaccttctcctttttaataaatctatagattattgaagataatgaataattctttttcaataaataaaaaaaaataacttttcaaaatgaatttacaaaaacacccttttaattcaacatcctaaaattttaagacattagtgttagttttatacatctgagtttgttggcattgaacacaaggagtataaacaacattgtcaagattgtgactccattgttaaattctctgcatgcattaaatatttttagaaaaatattaaaattcactattaatttattattcaaatatggcatacatatattcctaccatatatactaaatattgcagggttcgattgattgtgaacataaattcatatagcccatatcatgcagtaattaattagctgtgtcacttattttgatcaagcattttttttattatgtgcaataaatgggtttgatgattttaatttataaaataatacaagggtattctagtaattttccatggctttgtttttatgtctattcttatatcgtatgccctaaggatacatttctttgaataaatgtaatctcgagataatgacattataactaagtattatgctctttttagtcaataattttatattaatatatattaattacgaatattacgaatattagatgttttgaatacttacctacctccatggtcgaagctacatgtaaattaatagagcggtcaccccacttgaaatttggatcggtagtaaatcataactatttcaagcgtaggtgtaaataatttttttctcggtctttatacaaatacttttttgatcaaaataataataaataaagttacttagtattgttggaggaatttcgacaacaataaataaaatattaagataaaattattaaaaaaaaaaaaaaaagtatgcgattactccacctagaatggcaagtattcaaagaatggacactcagacgtactgaaaaatataaataacacaatggaaatatagtggttcagtcagatcacagtctgcttagtccactgttgcaaggatttctgtcttctttatttcatattggatcactcctttatatacaaagcgagtgtcctttgattatacaaaacttgattaattttcaatccatttttacattgaatatcaacatttaaatcaatagaaacgtaaacataataaatgaagaacagttttgactcaattcactaactacagcaatgtatgagaccttggtggtgggagttgtctgttcatattctcacataagctcgtgggcttaagatgcgtacaagactaatcgagtcttacgtgtttaagatctgcgttctatttgagtcacttatacggatatcctacaaaaattcaataacttaggacatgcgagtccttatcgggttatcgagtgcgttaggtcatccggaccagctcgctgagtaaagaatcgatc

SEQ ID NO: 14278 - DNA, 5738 bp, Cannabis sativa
  modified_base (3116)..(3118): a, c, t, g, unknown or other
aaaactttaagagtaatttgcaaaccccccaactatcaatttacttgcaaaaaaccatccaaccttaaaattttttggatgtttttttgcaagtaaattgatagtcaggggggagtttgccgcaaattactctatatattttgaaaaataaaattaaaaacttaataaaaatagtacaattacttaaaaaatatgaataattataaattctacttaaactgtggtttcaaaccaaaccaaactattcttaatggtttggtttggtttgagaaatttattagtctggtttggtttttaatattcaaaaaaatgttatactggtttgattcaaaaactataaaaatcataaccaaaccaatccgtgaacacccttatcgttatccatgttaatgctctgcattcgagatgatgtgaaagttagagttttatcatttttgccgaaaaaaatgaaataaaaagacttggaatggtttgagcaattgtaaatttacaacacaattaattttccaaattctacatgttgtatagattataaaggccgtaatggtgctgttaagttgtaaatttgagtttatgcaatacaatgattttgatttctcaaaataataataataataataaaatattcaacactgcactaaactttaactataaacgttaaaagacatcatgtgtgtatatatattttagagtaatttgcagtaaaaccccccaaccatcaatctacttgcacaaaaccatccaaaaaactttaaggttggatggttttttgcaagtaaattgatagttagggggttttgccgcaaattactcttaaagtttttctttttactttaattactcattttaatttttattttataaaatatagccacataagataattttttaatgacctatcattgctacgtggacaaaattaagacttaacaaggctggacagaagacaccttaaaaatataaacggaacaatactttggagggttttcccactaaaatatgaggttggatgggttttaacaaataaattgatagttggggggttttgccgcaaattactcatttttaaaagtataatatctataatatttttaaaagtataatatctataatatttttagaagtataaatcattaatatttttaacaaattttttgtgtttagtatcaaaattttggcaaatttagcttgtggagacagtagtggggaagattccaacgattcttctaggattcctgctatgcgtgaggacgactctggtaatttatatttattctaatatatttgaaattataaaaaattatatgttgattaaagttttttgttcttattgaaaatagaaaatgcccagagaaaaggttgtggtccatctattcgtgaacaattggagaaaataagaagggaggcaaaagtgccactaccattagtttactgtccaatttcacataagatagtaggagtagagcatgcaactttttcacgtatttcgagtgattacattgctactatgtgtcctacagatttaaaagattagaatgtagtgccccaacagtatgcgaatcaagtgcttcgaagacttctagtaaataattaaaaaaaattatccttactaaagttatatttgttaatattttactttttgatgtagtattactatcaaatagaagagaatccgtatgttgaaaaaaattcaaaatgtgccaaaactgagtgtggtaatagatacagaacaaagaaaaatagttggcacaagcatttcaaacgtttttataagaaacctgaggattacaaggaggcggtaaaacttagaaaagatgaagtatgcctcaacccaagaaataaaattcttagcttagaggcactttgaattagtaagttcaattataattgtagttaagttatattaaattgtaaaatctataatatttatttcataaataataggagaccccagattacgtcgagacatggaaggaagtccatactaaaaagaataagcaatttatcaatgaatatgcaaaacaagattatgtaagttttcataagttaattcttatatttttataatattagtgtcatattgttctaacattttgctttaagataatagtagttggaggctgctcttgcagctcaatctctgtcaaattatgattatgagtcgtcatttgattacatcagcctatttgaagagacatttggttcaagacgggtcacattcgtggaattggccgtaaattgaaaggtacatcttcaactagtcaggccaatcgcaggcgcctccacaggatttggtgaatgacatgagtatgatgtttaatctctttgcatcacaattcgactcatcaactgtggaccctacaaggttagcagtctttaatatgctaaagagtaaatactccactacaacgcctcaatcatctcaaactcacatgtctcatggttcacctacacattcgtctcaaactcacatgtctcacggttcacctgtgcattcttgtcattcagcggtacatcatgacatgcatacatcttcgcaatcacaatctcaacatccagcacaaccaatcccgcaacctcagccactacgcaccctccaccgccttacccctacatgtatggaccaccatacacacattcatacatgtacgaagaaattttgcagcagcatttctgggtttgaatgatatgggtagatcatcatagcaacctttcgtcatcacaggagcatccagtcttcctatatcaatggatgatgggggcatcaacatcacagtcgctatagccaccgtagacatcacagccgctacagccaccgtagacatcacagccgctacagtcacagcagacatcatagtgccaaccaccgcttcttgcagggttcgatgagaacgaaataaggttagatgactttatgtctcaattataaaaccaagaactacaaccacatcattagtactatttttctgttttatttaaattgtcttaacaactaatattatatttgtaaaaactatttacttttatgttgttattgtactatttaataatattacatggtaattatttgtgatactttattaatattaatttttattttatttattattattatnnntattttataaattaaatattaatatttctaatattacaaaaaaaattattttttttaatataaaaatctttagtacgtcgccctaaaagtcaaatataaatttttgacacgcctttttaagagcgactaagtaaagttcagaaattcgtgtattacttacatgtgatttttttgtcacttttaatagcgcttttaagtgcgaattattaacagtgactttttaggggcaatttatcgcctctaataatgattaggagcgaatttctatgattttagtggtaattaatttttgttgcgcctaatactcatatttattgtagtgatttctttggtacctaaacttgaagaaatcaagagaaaaagtaaatggatacttttttttaccggttggaaatagtcttaaattttttaccacatatatactttgacctaattaattagaaattaatgacttaggttaaaacttaaatataaataggtttttttttttttttccttttgtaatttttgcaatattcatgatatgaattgcatactttaactgaaaataaaaggttcactttcaaaagaaaaaaaaaaataaaaactaaaataaaaggtggggagtgagttgttattattattattgtatatcatgtgtgtgtaaagtgtgaattcgtgaataatgataaaatgacacattgatgaatggtatgtctttcgttactcacattctccccaccaatcttctctttgtcaaagtggtaggccacacccattaaaacataccaatcatccaattttattattttagggaccatatcatatcataggtgccttttcttttcttctttatatacatatataatagtcgttaaagtgttgtttatatgctgagtgtctcaaaaaagaaagtttcattctaccacaatcattactatcattttcttctattcagtttctctcttagctactttccctcatcttccatgtgaccaactaaatcaaataactactagtactaagctatacttgcttaccgttgggccatgtaattttttcttttcttttttattacaaaaaaaaaaatctacaaaagttatatagagcagtgattatgtctcagtaatgtaatggtcctttactagtggtaataataatatgcttatttataataaacttttggtcagagtatcattagcgttgaattttattttcataaaaagggaaaatgtcgatcggtttagtttttctgtactaaagcataatttcatcttaccaagaaagaaagatgcacacggtttagtggggttaatacaaaatattttcccaataatttttaatcacacacaatttatagtgtaatatgattgttaccatgcaaatgaattggatatgtgcatgcatggttatttgtgtacaaatttaaagtaataacaaagactacatgtacatgtatacgtaccttaatttcattgtaatttttaaaataatatatattatattaaattagattatacatcattttttatataatattgcattaagttttaatttgtactaaaatattatataaatataaaatttaatattacatataattttacatataaaaatattatataaaatacaattaaatataatactatataatataatattgtgtaatatatattagcaaaagaatcctatatgtgagaatttgttatgtgaggttcatgtttattagtgtatcgtattacattgtcaataacgcgtaggcatgttcttcataaacgaaaaaagtggaaactaactaaatgcataaaagttaatagttaaaatgatatatatggtacgtaatttgagcaaacctatcattacactaatttaattgggtctcatgttgcatgctcttctaggttaattatcaaacacatgcattgatcttttatgttattattaaggaactattttccttattaattgcagcattacaagaataaaaatgaatagtatcaaaaaaaagtgaagagatgatgaaacaccgaaaggcaaaagacacatgcatattgcattgtagactgttttgattaagcacgaggaccttatttatatataaatatatatatatatatatatattttctcttagtcttatactcaaaagcactgctattgccttcaaaagcataagtaagcatgcaatattaattaatatataaatttgtatatttataaatgaaaattgttaggtagtgattataattaatcataatatatagatattttagtatatctataacttgtgactattttatttttatacactactacaaatatattatttatctttgattttttccataataaattaaaatctgaagataaaactattttaaaactggtatcattgcttttggcttggtgcctataattatatcttcgatttttttaaataattgaagttaaagggtatatgtttttgtctttatggctattttctaatatccaaagacaaaaatctttatttttacataagcgataaaggacctttcagtttcctcgccttccttcttcgcttatgagactctaaaccctaaaattgcaatcctaaaccccgaccgcctctctctctccctcgaaggctctctctctctctc

SEQ ID NO: 14279 - DNA, 9656 bp, Cannabis sativa
atgttttgcttggttattgatagagattattagaattgtggtggctcttatattttggtgattgattcaatgctagtttgctagtttattatgattaggaaagcaacaactttacattggtttcttgttttaatcgttagagatttcgacatcgaatgaatttattcgaagtgtttattgttcaaattttaggaaaatagactaaagacttgatcacaattctaatttctgtgttattgatgcttttactatgattttagacttttatgagtaattaagtagaaataatactatatatgtttgttataaaaatactatatatatatatattcatacatatataaatgagaagatgattgttttgtgatcttgaaagtatatatattagcatgtggacggtttatgagttagggaatccttagtccctcaagtggatgaatgtgaacttcataagatatatgcataaaaatggcaatgaattagaagctaattctagttggattatgtgaggatttcgccatcttaattaaaagagtctccaagaacatattaatttgttgtatctcatgataagaatcagccttaatcttctttaaagtcagttcattaagtaaggagttagatattacacttaaggaacctatagcagcaatctttcaattttattaatttggcattatttttttaactgttatgagattaccgtgattagatttagtaagaatttaatatcttgttttgatttttcaggtcatgacacgaagtcttcttaacagcaatatgaagcgtaattgcttaagttgtagtatgggcaagtttctaatgttactgatgatattaggtgtagcatgtcttatgctgattcattcaagtcctgcacagtctgttgatggactaggaaaacatatcagtaatacaggggaaggtaagattacttccttcggtggcagcaaactaggaaggctcttgagaaaaccacccaggcttcctcctcgtttacctcctgcaaatagtactagtggtcttagtccgaatttagattccaaatggatagataggcaacagagtgttaagaaagcttttctccatgcatggttaggctataaaaagtatgcaatgggttatgatgaacttatgcctgtgtctcagcatggagttgatggattaggtgggcttggtgctactattgtggatgcccttgatactgccatgataatgggtgccaatgaagttgtttctgaagcaagtggatgggttgaaacacaactttcaagtaggattagtcaaaaagggcaagtcaatttatttgaaactaccattcgtgttttagggggtctcttaagtgcatatcatttgagtcccgtagaagcagggataaactccacatctaaagctatttacctagaaactgctaaaaaccttgcagatcgtctgctatctgcttttacttccagcccgactgctgttccctatagtgatgttgttttgcacgattcatcttctcatcctgctcctggggggttgagcagtacgtctgaggtttctactttacagcttgagtttaattatctcagtactctttctggtgatccaaagtactctatagcagccatgaaggtcttggaacacttaaagactctcccaaaggtggaaggactagtccccatttatataaggtacgttccttgataaaaactattaaattcttactcttcctactatagtaccttttttaaaaaaataaattaaaatgttgttcttacattttctttgagaagcattttatctacacaaaaagccttgcaaaataacatgcagcttttgctttttctaaatcgtcattttaattctgtgtttgttcatcttagtttattgttaaatatattaactttcatgaatgctgggtgtcatttggtccttttgcttatagattttctttataggataatccttaaaaatagctaaaacataattggaaatatgttttctgtcacaatggatgtaatgataaagtctgtcatgtcattaataatgtatgtattatattctttatcatgtcatatttcgtgtaatttatcacttttgttaatgcttgtgttcgtagatacttttttttttttgttgatttacaatatgtgctgtagctcatggtaatttttgtcaacatatggaatttgtaaattgtataataaggaatcggtaatttatactttgtttttccttcgtttgttccactgttcttatctcatcttttgatggatgcagtcctcatactggtgagtttagtggagataatataaggcttggatctcgcggtgatagctactatgagtatctactgaaagtttggcttcaaaagggagctagtagagacagtaatttgacatatcttcatgatatgtatgaggaagcaatgaagggtgttagacatctgcttgttcgcaaaacaatccccaaaggactggtttttgtaggggaattgccatatggacctaaaggtggttttagtccaaaaatggatcacctggtatgttgttctttctcaactcatggttgttacatattagtgaaaaatgttctgtgacacattttaggttttaattcaactttgagatgtatatatttctattgatcggtgatttaagtgattccaatttctaagcatatatacagtaatagagaaacaaaaagctttataagtatctcttagctatgtgctatttcttctgcatgacattttcataaataacaggcattagatgatttatcaatttccagccttctgctaaaattcattctcatttttaattgattcttgtctcagtgttcatggtgaaattgatcctagtgtgttatgaaaatttgttacatttataatgttatgctatgtttggtacaatttcctcctagatgcttataaagtggctgtaactcaatggatttgtttatactttttttattcacattttcttcctttgactgggagtgtgctgccatatcaaagaaattatgttttgcagccacatttttctttcacgatagtttctctccatgggttcttcctaattttcaataagtactaattttttatttgatacaaaaggttttgtatgtgttggttattaatttttctagactactttttttttggtgtggaccctgcttaatcggaaaaataacagatatacaacttgcaaaatcttactgtggtagttttgggaaccttaggaacaagttgctcttcattgttgcaacaatattcatcaatcacttgatacaatctgcatttattttttttacagattttaatcacacacatagcattaatccaattaccaaaccctatcatgggttatggctttgtagctatgggtgtaataccatctgcatttattggtcttttatttagtaagttattgttattattttttgtatttaacattgtttattgtttctttcaggtatgctttttgtcaggtaatcttgcccttggtgccactaaaggtcttactaaagaaaaagctatgagagacaacttgctcaactttgaagacctggaaaatttaaagcttgcagaagatttggccaaaacctgctttgagatgtattcagtaacctctactggtcttgctccagaaatagcgtactttcacacagaggtcagtgtttagtttttagttatgactctttgcatgggttatgttactagatttttattatatcaattacttgtgctggaaattgacacattcctggaattaagcaggaattctctgaaggaggtcttgacggtggcaacaagaatgcggaatatgtgaacgacataattatcaaacctgctgatcgccataatctcttacggcctgaaactgttgaatcattatttattttgtatcgtattacagaggatccaaagtgagtttttcttttatggcattagctttcatgtattcatatttgttttttggtgccttcaccacacaataagagttgtagtttcttttatttttcaagttctttcacttttatgacaaatattcttttctgtagatatcgtgagtggggttggcagatttttgaagcgtttgagaaattcacaagagttgaaagtggtggatacacttctctggatgatgttactacggttcatcctcctagaagggacaaaatggagacgttctttttgggcgagacactaaagtacttgtatttattgtttggagacagctctgttattccactggataagtatgtatttaacacagaagctcaccccattccaattgaaggtgctatcatgacagaatagttcattgatgcgtagataatggccaaagtgcatgttaatacaaacagaaaaactctttctgaacttgctgcttaatatggctcttcatcatgtctgaatagtatgagcaaatgactcggttgaagaattagaggcagcataactttacttatgcttcatgtttgatgcatccgaaatttaacatttatacttatttcgctcttagaagcttaaagaaaggaaaattttccaggcctttcctataattatttttagtgcacaatacgaagattgttagataagatatattttttttattgttattgttggttggtcagtaaattagattatcaattcaaaatgaagtacgattctgtaattgattttcctggtcttccagccaaaaactttcaactgctgttgtcagaatgttaattttttttttctttcttacaaagcctagaagttacaatctactctgcatatgcatctacatttttcttgttacattaggtcacctcaattcaagatctatattctcattatcgttgataagtagaaacaggtgatcaccatcccggatgacacttatgtcatcaatttcagcattctctgcattgatgattttcacaggtttgctgcttccgaacttttcacctgcagttttacgaagagtgagaaaggaactatgcatatacctaagcagtttgctgagtttgttcaaggtttgtatttttcttatttttgatttccgcaataatgttccttatttcatataaagcaatagtgaataattaaatcttcttatttcaggttggctattgaaaaatgcttaccagcaaccttgaacagctcgtcaattgagtcaggtaggattattaactttccatgttgccggtgatgtgtaatactgttatgaaactgcatgtggatagtgactcttttcctcattgtttcctttcccttctggtttccagacgagctagaagttcttatatgtgagtctgtatctgcctttttcaattgggaagtgctttcacctgcttcgggcaccaaaaactgtattctatgttcattcgattttctattttcataacttagtaagagttcacatatgcttttatttccttgctgttctgccaaagctttaggcgtccatcctctgctgtccgatatgctcgtacttgatcctcctccaagtaaattcttaacaacctcaagatgctccttgctgacagcagcttgatgagccgttcgaccattatctgtcatagagttcacacacaatgaagagcctgtaacactcttctcttttttctttggccctttgaaatgcccattcatttcctcctgtattactacatcctcttgtatcgtatcgctacaccccatgtaagaacagcattcttctgcttgtcctaagccttcagaccactcgttgatgatcaattcaggatctaaatgtgggttttcatatcccaagttctcttgccctttcattttctgtggaaatgaaaaacaaattaactctaaagacaaccttaacactcacactcggaaaatccattttctgtttttaggaagttttcctaataatgttttgcttaccatgaaaaaattattcattatgatatggccatcttctgtatttgcttgtatgatattcatcagtggtgttatattgagccgtaatatttgagcaagctcagttgtcctaactgtaaacggttgtggtctgtaacataaaactccaatttctccaaatgtatctcctgaatgtgcttttccaataacctgtgaaaccatgtagaatgtgaggatcaatatatatatatatatttatacatttggggaatagtaatagcaatacgtacttgatcatgtccaggagtattggatatgaattcctgtggccacaaatttgtaaagtaaactttgtgttagataagattatttaggattttgtgaattaattaatgcaggactgagactaagttaaacttaccactgctcctgagaccagaatatagagatcggttggagcctcgttctgcaaaattacgtcttctttaggtgggaagtactctgcctccatctctgaaacctttaaaaaaaaaaaaaaataaagaatgatatataaataaatcattaattaaataattatttgtaatatatcttatatttattaataataacgatcaaggcatgtgctttattgattttgtgggcccaccagaccagttaacatggttgtctattggcttacagaaaagactccattaaaaaattaaaaatgatgagatagaaaaaccaagtcaaagtcatgtggttttgatttgttaccaattggaatatgaaatcttgagaaactcctttgaagagatatgctttctgcactgttggtaagaataaatggtaagcaatacttgaacgtatggcctttggtaaactgtttaaggtttcttgttgttttagtccttctgttttgaaccttagacataagtgtgacaacatttgatcttgtactctaggaggcaagtgatttctttgagcaaattctgaagctgctctgattgtatctctctgcaaaaacacaaaaagtagtttttaaatatctacattttgctttttttagttaaatagttttcatgttaaaaataatcattgaaccaaaatttgtttcagctcatctttcagtcaacaacgtggggcggttttctgatgtttgtagcattttatgaggtttagatttttatatatggcattatcagatgtagggtagagagtaatacatgtaatttgtgtgagagagggaataaagattggatgggaccaaaaatatttgaagggcccaatagtcttaaattgcctaaacagacagaacagggccaaataattgaaaggcctagtaccaccataattaaggaccattactgcatgttataacaattccacctctaatactggcctggaaaaaagagagagaataattaaaaaaaaaaaaaaagaaaaaaaagagagaaaatttattgatttagaattttatgctctgggtaaacatgtttactaggctacataacatgggagatggggtcagccactagtgtaaatactgattgggacaaggctagttagaatttgttttcttttttttttttttctttctttctttctaaaaatatttagcaggtgaaaaaagatgcacaagttggagtagtaaagaccaaaaatagagagatagacagacaactcacgaagtttctggtgcggctggtccagtgaacaaccaagtttgtcatgttcccaatgaggtaagatgttaatcccaaattgaaaagcatgtataggatataaaaaagcatttcccttggattttcagcatgcaaatctccataacctgtggtggttagtgttgtgatggaccagtaaattgaagctacatatctgttccaaagactatctcttttgaaattcgggttcactgcaccgatccatgtctggcttggattcggatatctgtctgctatcaaatagttaatacatccggccaagtgtactgcgaaaagggtcacctgaaaagctcaaaacaaaacagaaatggagtgatcaataagatcagtttaggagtaataataatatatatgttttgttcacataccgaaataagttttgtgcagcgagtccagaaatagttgaagcggatatctttctcaagtctgaataacaaaagaaagaaagaagaatatgaatatctatatgatcgatgatgaaatggaatgaaatagaatggaatgaaaccttgcaaagagagagctgactcgtctgagacgccagagcctgagcatgttaaggagtttaaaaccaagttcactaccatgatgatttgagaaaagaaggctaatggattgaaacggggcagtagagcaaacatcgaaaatgaaccaggtacataggtacctgaattaaataaataaagaagattatgatatgaactatgtaaaaaaaaattaattaaagcagagtttattagtttactcacctaattgcaatcttctttggattatcaataagaagatatgtgtggctatcgaggtatgctacgaagaaagtaaggaagatgtcaatggcgaagaagccattgataatgttgtctattacgaataaagcatcatcttttttatatggcaggaatgcaaactcaaaggggcatatccaagcagagtaaaccacaagaacaacaagaaatatctcccaagctctggtatatatcatcaaaaccacattaatattattttattattacatgagatagagaataatatattacatatatatgtacgtataatcattattataagtacctatagctgggattgaaaggagaaacaatgtatttacgaagttgggtagtctgattaattcttgctccaagtgatggtaacagatcactagagaagaaactgctttgaaggcttcccatttgtaactcatcagtacagaaacgcctaaagaagttttttgtgcaagaaaacgacattttctttcttgttttgatcaagaagagatgaattatttttctcaatagctaagccaaacagttgagaatattaactgaattggttggatagtataagtctgctgagaaacaaaaaagaaaaaaggattatatatatatacaacacaacacaagatacgagagagacacggttgagacttgtattaaattattattattatctctagattgtttttttcatgcatattattattagaaagtagtgtttgactcagaaaaataaataaataaataaagaaagtggcccccatatagaaaagaaaaaaaagagtgaatatttatgagaaataacacgtacggaaataaaagagtgaatgtgataaagtggcagacatgtgagcctttctgtagtctgtaatgtagttgaagcagattgtatatgatcttgaaagagagagagagagagagagagagaagagtgtgtgaaaatggtgtctctggttggtgatggtggtggtggtagtggtggtgggagctccatcaatcatcatatatatgcatgtatgagttggttatcatcatcatcatcattctcattatcatcatatatatatataatacataatatgtgatgtgttgtatttgaaatacaaaaatggaccagacagacagctatggtaggatattaggaataggaacagagagagagagagagagagaggggccttggtattcattcatgggatgacacgtggaccaataagaagttgttttagaggtgaataacacttcatgtgtgcctgtctagaaaaaaactccactccttacctctttgccctttcgagtttggac

SEQ ID NO: 14280 - DNA, 18452 bp, Cannabis sativa
  modified_base (18391)..(18417): a, c, t, g, unknown or other
ttaatgtaattttagttttttttttttttttttctaagtgggaaaagttggtgaaggaggatgtgtctgaaattgaatatttgcagagttattataaaatgacaagggtcatatcgttattggactatgaaaaatataagagaatataatgtattattattatgtttggtgtattttctactctattaggggtaatatgagagaaagtgatttattctcactttcaaaaacttgtactaattttataggaaccgttaaatttgtaatctaatctgccttaaccgaagagcgggatatattgtgaaagtcgaatagtttgaccatggttaagctttgtctaattaccataatacccttattaaatgaacagtgccattaatccctgcccaacccatcttatgcttttatgtgaaattatatatatatatatatatatttggactacaatgcccttcctggaattaatttcatattcataaatcatattaaaccaacaaaatgtcaacaaatttggaaatttagtcaacaaactcaagtgttacatttactaaaacctcaatagtatgcctaacctcatggacactttggtaatttaaataaaaggctaaaatagtaaaaacaaacatctcaccactaaagagatttttgtctttctattacgttatcgtagtaatagattttacagattacagacaaatttggtctggagcccaaactaagtacttcgcacactctctctcttcctcacactgtatttttttagagagagagagagagcagagaaaagggaaaagaaataataataaagtatgatacatttggagagtaggaaggaatgagtaaagcaaaaaccttcgttttcgtcttcttcttctcgtcattgttgttgccaaggtttcttcaagtcaaatagattaataataaaaatagtatttgaaaaacccacttgccaaaacttggagaacttagttaatctcagagacccagaagaagaaaaaggaattttttaaagagaaaaaagttcgagaaagtgaaatgcttgtgcccatttgaaactataatccgattaagcaatcgaagatccctggtatgtttgtttgtttttttaactcgacgatcgggttcacatttgtttccattttgagtgtgattttagggtttgtttaaagaaaacaaaagtctttatgggccactttagttgcttttgtgcatgtaaaatgtgtttctgtctctacttttgtgtttatctatctgggttttggtcggatatggtatgagcatatgaatgtggtttatgcgtgtttgtgcatttatctttttatgggtttggtttgatttcgcctttgggtttggattgtttttgagtcagatctggtagatatcttatacacacccgtttatcattagttactattttaggagaagtgcgcaagtatttgtgcattttgtttcttgagaagggtttattagtagtacttagatccggtgctttagtattgatcaagattctgtactgaaactagtgagttttagttgattgacatctactttgttaaatgtataattgatttataccaaaaacattacatggttggaaatgccaattacttgagtgggttctcttatttattcttggatggtaacattttaatgtgttttttcttttccttcttccaactggtttgtaactgtgttttataatttattgtgtgcttctgaaaacggtttcttttatttcctatgaattttgacattgctagccagcattgagtggatctccgggcttctggaaagtacaactgggtgatgaaccgaaggaagaagatataggataagtgcagagagtcgaaaatgaaacctgacacccctcttgattatgctgtgttccagttgtctccaaagcgatcacggtgagaacaatatcccaagtcattaacttctgaccttgcctattaaggtgttaaaaatacaatcgcttttgtttcttacagatgtgaattgttggtctctggcaatggaaacactgagaaacttgcatcaggatcagtcaaaccatttgtatctcatttaaagtttgcagaagagcaggttgcacttgcagttcagtcgattaaacttgaagttgagaactatagaaatgcagagacctggttcactaaaggaacacttgaaaggtttttataagtcaattaagttagcacttgttattacactgttatttgtgcctttatgtggatgtgatgacattatgagtttcatattttatttggtttgcaactttttccagatttgtgcgctttgttagtacaccagaggtcttggaactggttaatacatttgatgcagaaatgtctcagttggagtcagctcgaaggatatattctcaggtaattattgtcataattagaactacttacattatttacccccattcattgttgctatcttgctgacggtgtgtgtgtgtgtttttccttcttttaatcagggtttgggagatcaaaaagctggcggatcgggtatgtgcattactttttcttgttcaaattcaagtagttgattgcactttttgacttatgattagagaaagattaactttcaattttattatggtcattaattattgtaaaatacaaagtttagatattccatggcagttagctgaataaaagagaaaaatagaagaataattatgattacaataattatggtttcattattagcgaagacacctcttaacaagagtgttgtcctgcatgctgaatatcatcatcattattgttttgacaaccaattatagttgaagctagtactagtttggtccaaatattaggagagatggaattttcttgaccagggaaatgaatctgcattgaaacttgaatggtgtatttactgtgcatttggataactatggtggaattaaatgtgggtgtaattggaggtaattacatgatttggcacgttttgtttaaccatgcaattattgtgtgattggatgttattgaggggttctaattacactattcatttctcatggtctccaatgagaagtgtaattatgttgtgtaaatgtaattactaaaaactttccatttgaaatatttatcactaaaaattattatgttcttgtgtaattactaattaagtacgtaattatgtaattatcacttcatatccaaacacacattccttttattataaaatagtgtaatttctatgttgtttacactacctagtaattatacagttactttcaaacgcacccttagtatttacaagctcttttatccacgaaatgattattttgtattatttttgagtgaaatgaggttgtaatgtcttcgttttagttctagcgaaagatgaaagattactacagaaatgacagaaataatgaaaaagagaaagtgaattgtgatatatatggaattatggatggaggtcatgtagaattcataaatgtttattatttattatattgttaattgtattatcaatggagtgactttgtgtgtaatcgagaaccttcccatcaccacaacaaaacttagagtattctcatacctagcacatatataacaaaaaacttttagaccaaacaaaaacattcaaattgaaattatagaaaaagttgaaaagaatgagtttagtgagaaagaagaactgtaccaattcttcagtcagttcaatgattgcaaatctgtaacaacctctttttctagcactactcccacaaaaatgcaaacaaactttaatcttgattttaagtccatgtctaataagtacattggcaatatttgggaaagaagaggacggattatacgaaaggttgcaaaacttgtaataacaaatatctccataagacttcttaagaggagttgtcttttcggtcgttggaaaagtgaaaaggaaatcaacacttcctctgaagaagtctaatggagatatttgttattttaagttttgcaaccttttgttcaagtcttccacttctttccctgatattgttgatgtattaaacgtaggcttaaaatcaaaagtttaaatctgtgtgtgttttgtgagagtaatgctgggaagagagattattacacagatgcaaccattgaaccggttgaagagttggtacaaattttctttcccattataccgactttttctatatttttgtttggtctaaaagttgtttgttatatatgtgctaggtatcaagatgctataagtttcatcgtggtggagggaatgttcttgagtaagtatgtgacagtgagtacataggctttctgttgaccttcaatgttttggttagagctacaaactttgaagctgtgacaatgtgcttcactacactacacccacaattttctctaatattaacaataaaaatcctgataagaatcttatagacctaataagaatcctgattttccaatctattgagttttgacttgatcaattagttcttaaaagttcaaatgaaatcagttattacgaatggatattgttactacattatcaatgtgatttggaccttgggtgagtgtattaaaggcaaaagaagctggtcatattgccgtgtttcatgctcaatgcaatgttaataagtagtgttttttatttacttgaagctccgaaggcagaaatagttgatgctagcagtaccaaattgtttgtatgcaagtttggacctactttgtctcttgaagatgggaatgtacaggcagaagaaaagcagattcattgatttttagtccatctattaggatttaggagttgtgtttgggatcagatgcagctgcttggtcatgttatagacgtttctagatttatgttagagtagtatttctctgtaatatgctttcaagatgcataaaggacttggttaagaagtcagtatgtgactgcaattttaaatgtttgctacatgaaaaaggttctgctgacttggttatgaatgaaaatttttaatgccttaaatgacttggctttcttgcttgcttacaagtattataggttggatcttcttggtttaaattgattactcctaccactctgatccaagttgtactctacaataactcataattttatccaatttacctcaggtggggatgcaacaggaattacagcagctgcggatgcgacaaagtaaagcttctagtttttttttctttttaattgcttcatttatggcaatctgcatcatatatgcaagtcttttttctatacatactgtttttcagtattatgatgtatcattgtatttcctttctaggtgttttccatgttatctgtgcttttcttttctgactctatctttcatgcaggagagagctattacgagctattgatgtacggcttactgcagttaggcaggacttaatcacagcttatactcgttcatctgctgctggtttcaatcctgatacaatttctgatctccaagtctttgcagatcgatttggtgcccaccgcttgaagtaagagctctgggatatcccaccttcacgtaaatcttattttttaaacccgtacactcacttctcttttctgcatgcacttttgcatttgttgactcacctcaatgtcaatgcacatctatacttgtatgtcatgaacctgaaaactcatactatggtcatattcttgtatattggtctttcttctagggagggattagctggtgagatttaatagaaatggctaggatagagtcactgcaactttgcattaatcatggcaacatgaattcccgtgttacctttttcagcttggttttctccctttaggaatgccaggttaatggctttgaaatgagattgtaacaatatcactatgtcaaagagggtgtacttaaccactttaattgagcacttaccacccaatgaccaatgagggtattacgcacttgggtacttttgttttagtgcagttatcggttgtttcattgtatattaatgtgaattaacaagcggaaattaagccggtttagctgtctcttgtattatgttttgtgtttttgcaaaaatgtttaataactcaaatgagttggtcacggaataacaaataaaatcatatgaacttgaattttatattttccctttcaatgaggcaaaatggataagtagattgattttgtgttttttcttttgggccctttggctgttgattacttaaatggatccattagttaaagtctaagggaatatgatacatagtctaacattgtagaaaaagctaaggttacctgtcaaaacactgcaggtacggcagttgaagaagtcttttccaattttataaatctgaactgcattttacgtctgacccaaataaattccaacttaaatatttttattatatgtatatatatataaatatattttacaattaaattgtttattttaaaaaatttgtgcagcgaagcttgttccaaatttatatctctatgtcaaagaagacccgatgtaatcaaccaatggatacaaggtagtgatgatgatagagccgtaagatcatcttatgggtctgacatgtccatcgaggaccccactgaagactcttctggcccccaaaacaagagccagcaacaactggattcatcccaagcccacctggaccaatcaagacttgccacttgtcagcaacccacctcctcttctcctacaataagcaacgtaaacggaaaaaacgaagtgaaagaagaaacccaccaaccgttagagaaggagaaaaaggaggaggctctgaccgagtcatcttcttctcccagtccagtgggtcatcatgtcaggcgactgagtgttcaggatcgtatcaacctttttgagaacaagcagaaagagcaatctactagcagcagcggtagtgctggaaaacctgttgttggcaagtcagtggaactcaggagactctcctcggatgtgtcatcagcacctgttggggttgagaaggctgttctgcgaagatggagcggcacaagcgacatgagtattgatttgagcgagaagaaggatatagatagtcccttgtgtacaccctcttctgcttcctctattcctcaagctaagtctaatagtaataatataatattggttggttctgaaggtaaggatcagaagggattgaatagtggttcaacttcttcatctaaaagtgaaaacttgagcagttcggtcggagttggcgatgttgggttaaaagaacaagctgagggccacacccaggctgtggtttcttcaggtatagaggaggaatcaggatccaagggatggactaattctaaggaccaggttgtttctcagacccaactcaagtattctacttcaagagcagaaatggttgctaacgatcagaaggtttctttggagaagttaaagaattcatttaatagtgaagataggagcggtgtgtttaaagatcaagcgggtgttggagttaaaaatcaggccggtgttcgggtacagactgtaagtctagcaagcaaggtgggggatgcatcatctgctggtggatttgtgaataaagtgaatgatttggaaatagttgatcagcctgtaattcagtcacgtacaaggaatttccagagtcattctcgctcttcttctggacagtttgaatctggtagtggactaaaacttaaggaaccatcctcaatccagcccaaatggcttgagggagatcagcttccttttcagcctcaatggagatcatcacctgctcgagggcttgaggggggtgaagtggacttaatatcgtcaggtaagcaacaactaaaacctgaagactctggagttcagaaaatgaaattccagaaacaggtttcttctaatgatgaacagaaacagaaatcccagatccggaggaacgaaagcagtttggcaaacgaagacagcaaattagatttaaaagttaaaaaggtctcagtaaatcaagagagttcgggtataatgtcaaaacagccagttgagcaggtgcagagagtaaggcagactaaaggaaatcaggagcgcaacaatgagcttaagatgaaggcaaatgaacttgaaaagctgtatgcagaacacaagcttcgagttcctggggatcagtctagttctgctaggagaagtaaacccactgacatgccagaagaagtggatttagattcgcagtacaaaaaactggcaccagaggatacttccttacaattacctgagaaaagcatggtgatggaatcaaccagcggatctagtaatgtggcaatgtttaatacaccaccaccaagcaagttggtaaataaccatgagtccggggattctctgaggcagaatttctctgatcttagtttttctgatgattctaggggaaagttttatgacaaatacatgcagaaaaggaatgctaagttgaaagaagaatggggttctaaaagagtggagaaggaagccaagttgatggccatgcaggaaagccttgagcaaagtagagctgagttgatggccaagttttcggggtcagcagacagacaggatcctgtatctactgctcgtcggcgtgctgagaagctcagatcttttaatcttacttctagtttaaagagagagaaggtattaatcaagttatgctttaagtaatcttgagttaaatcttagaactggaagagttttaaatttattcctctctttctctatcgctctttgattattaatatttgaattactgtcaagtgatatttgggttcttcattcaatttttcttaatgatgatgaggttttcctgaataaacagtcaatggattcatttccaagcgaagaagatgaggaagacctttctgagtttccaggacaaaagttttatggtcaagagagatttcttcgtgaagcatctccgggagatggctcttccagatccactcaaagtaaaagacttttgccaaatagaaatttgtcttcatctactcggaccatggcagcaccagtaccagcaccagcaccagcaccagcaccaaggtcttcatccaaacttgctaactccaattcagggaggcgaagagcacaatcagaaaatcctctggcacagtcggttccaaacttctctgatttcagaaaagaaaacacgaagcctgcttctggagtcagcaagccaacgcgttcacaggtgagaacctatgcccgcaacaggagtaccattgaagaagcaccaagtttcaaggaggagaagccaaggcgatcccagtccttgaggaaaagctctgctaatcctgcagatattaaagatgtgcctcctttgagctctgaaggtgttgttttgacaccgttgaaatacgataaagaagaaactgagtctagtccatatgaaaagtttcagaaaagcatggagacaaaatcatatcttaggaagggtaatggcataggtcctggttctggagctagtattgccaagttgaaagcttcggtggcattagaaaatctcgaaaatgaagaatttgatgaattgggctctgaggcagatgagtttgtggacgtaactaaggaagaagacgaagacgaagagattgatattgaaacaacagaggttaatgattgtgcaaataatggaaaatcaaggctgagtcagggatctgataagtctggtaattctgagtttgataatggtgattttacaaggtcactttctcaagctgcttcagttgcagaattacctgctgctattccttcagcatttcatgttgtagggtctattcaagactcacctggagaaagccctgtttcttggaattcacgcaatcaccttccattttcttacccacatgaaacctctgacattgacgcttcagtggactctccaattgggagccctgcttcttggaattctcatggtcttgctcaaacagaggctgatgcagctagaatgaggaagaaatggggaagtgctcagaagcctattattgcttctaactcatcccacaatcaatcccgcaaggacatgactaaaggtttcaaacggctattaaagtttggaagaaaaactcgtggaactgagactttagtcgactggatctctgctacgacttctgaaggtgatgatgatacagaagatggccgagatcctgccaatcgatcatcagaggacttaaggaagtcaagaatgggcttctttcaggggccttccgacgacagcttcaacaacgaaggcgaatacattgagcatggtattttctttttttcacataataagtaattacccctttctatgtttacagattgcctagaattcttttaactttgtacttaatttcctttttctttttgtgttaacagctccacgctcattcttctcgctctcttcgttccgaggcaaaggaagtgaatcaaagccaagatgagtaaccacaaaacagcaaggctatggatcttcagacaagttagggtgtaaaggatgatataataaatatcaaaagcttgagatagggatgacacgacgatgggtataagatccacgatggaattatgtatatcttactggattttcgaggcctttgtggtcatttagttagtcatatatatgatcatatcttaatagtgttgtgtccaaatatggtgtatattttttctgaacattgatgagtcgcttattggcgtaatgtaattgtgatttttggtagttaaaagaggcattctttctccttgttacttctagttttgtgtgatgtatatctagttaaaatcagcattggtgacatttttaagaagtgagagatgatatagcttgtaaagacatgaaactattttttcaactcatcatttcttattaatatacctgctcttgctatattattcagctcatcgttttttttttctttcaatttgttcgtttgttagttgtagttttcctttttggacacttgaaattattttgttatggttattatatggttatattgtatccttacttcgccattttcttgtgtctgttaggtaggacggttaaatgaagatataaactttagaagtcaaatgttgagtgggaaagttccatcggtgaaggaacacaaaaacacttgataagaataatggattggatttcaggctttttcatcattactaaacgtttctgaagacgtttctcatcattctcaaactcattttaggctttttctatacttacataaataagaatattaaatcaacctacagctaaaaatgatgaaagaaaaacaacaaacccaactataataacaaatagagaatcattgcttctgtgttatgttgacatatataactataatagaaatcacacacatacatatcatatataaattatatattattggacatttttattacataaacaaagcaacgtacaggagccacgttgagaattatgtgtgccggcgtccccctttggcctgcaatccaatcaggttcgttgatgattacaattcatctaaccagtcacgtatatatgtatatttaaatcaaaataattaaataatcataaagaccaacattgctataagaagaagaagaataaggtacaatgtctagtattcttacaaaattttatccgataacaataattataacaccaatgcatatatacgtgtatctgaattagaatctcaatagaaccaaaaataaaaatggcggattcagcaaagtttttgtttgactcctaaagctggaatttttggacttgatcacacttacaagttccaactttttctctgttttctttttcctttctaaccaatttatacttcgactgtcttcatttccattctgccatacattttcatgccatggctgattcctcctttgagtttaacagctctgttgctgactcaactcaccgtcaccgtaatcgcaatgatcacagtcacagtcgccgccgtcgccgtcacccaactcctgtcaactcacactatgcaacttctagctctttcactcaatttagctctcaatactacccaagtggtttgcctgccggaagaagattccgctacacaactccggtgcccaccacgccgtttgcctccgacaatgacgtgtcatggcaaagtgaggtgtcttggcagtttgagcccagtggatggcatgaaaaccacaacctgggctctgttcttagcccatggaccgccactcccaacgtagttcgtcgttcagccaatgattactatctttctcgaacgaataatggtggccttggaacttcgatgaattcacagtacgattattccggctttcatggtggcaggattgagcttcaaagctttgttggtcaagcctttggtcgtggcgtacagagcaagttaagtacaaaagctaagcctttggctagtacagatgagcttagtatagttaatttcgctataccagaagatgaacaaggacatgactatgattcttggccttctgcttctcaatacggtcatgataagtctggtattgatgttggacgagtttcagatagtgaagaagaggaggaagaagaagaagaagatgatgatgatgattatgatgatggcccagctaagacagttggactattgagcttgtttaagtattcaaccaagtgggatattgttcttattattttgggttgtttgggggctcttataaatggaggttcacttccttggtactcttatctctttggagagtttgtgaataaaattgctgaagattctttggatactgataaaatgatgaaagatgtccttagggtatgcaaaaagttgattgttgttctaaaatcttgattgtgaatttagattttctttaaaaatgatgttgaatttgattttcagatatgcttgtttatgatgggactagcagcattagtggcagttggagctttcatgggtaagagttcattttcttttttgcacaatggttggttttctttataagaaattgtatattagctttgtttagttgttaggagcattgaaatttgttactgcttttcttattatgactaaattggcagagataacatgttggagattggtgggggagagatcagcacaaaggataagaaaaaaatacttgaaagcagttttgagacaagatgttgccttttttgatacacaaatcagtactggtgatataatgcatggaatttcaagtgatgttgctcaaatccaagaagtcatgggagaaaaggtcttttcaaaactaaataatccttcagagaaagataatttttattcctatatgtagcacttaagtttattatcaactctgattcaattggaaatttttttattgcagatggcacacttcgttcaccatatatttaccttcatttgtggatacgcagttgggttttcacggtcatggaaagtatctctagtagtcttttctgtcatccccctaatgatgttttgtggtattgcttacaaggctgtttatgttggtctaacatcaaaagaagaggtaaaaggaagaaacaaatatcataacaacaacatattgttttcaatagctttattattataaattaatattttgtgctctcttttgtttaaggtttcatatagaaaagccggtagtgtagtagaacaagctatcagttcaatcagaactgtattctcgtttgtggcagaagatcatttggctgaaaaatactctgaattgttgaacaaatcaatcccatttggagcgaaaattggatttgctaagggtgcaggtgtgggagttatctatttggttacatattcaacatgggcattggctttttggtatggctctattttggttgccagaaaagagttgtctggaggtgctgccattgcttgcttctttggtgttaatctaggaggaaggtaataaacttttcatagattaaccaactttgtagtaagactagagtggcactgaattgattgttgtataatagtgtcattgttaatgaaagatgttgctaactgcagaggcttggcattgtcattgtcatattttgctcaatttgctcaaggtactgtggctgcagcccgagtttttgaagtcattgacagagttcccgagatagatccctacaacccagtgggaagaatcctccaaaaagcccgaggaaggattgagtttaaagatgtaagctttgcatacccctctcgtccagatgctcaaattctcaactcctttactctagtaattcctgcttcgaagagctttgcgctggttggcgctagtggtggtggcaagtctaccctttttgctctaattgagaggttctatgaccccaacaagggtaattactcgtctttctgatacaacaatcttttattgtagacaaggaacaaatcaatacatagctgaaattactcttgtttttaatttattggggcaggtatagtcaccctggatggtcatgacttaaggtcactgcaagttaagtggctaagaggtcagataggtatgctgggccaggaacctgttctctttgccactactattctagaaaatgtgatgatgggaaaggagaattgcacagagaaagaggccattgcagcttgtatagcttccaatgctcacaaattcatttctactcttccacaaggctatgacactcaggtttcaataacatagtttactaatattcctagacaaaaatatcaagagaaatgctaagaacataggctttagtcatatcaaaaccattgatgcattgatgatagatctcataggcatgtttgtccttacaaagacacactaataatatgcataagctctcagtgatacaaccatgccaatactcaattgtgaggttgttttttttttactcaaaatgttcactttgtgtggcagcttggagacaggggaacccaactttcgggtggtcagaagcagcgcattgcattggctcgagccatgattaaagaccctacaattcttctgttggatgaacctactagcgctctagaccccgagtctgagattatagtccaacaggcaattgacaagatttctttaggccgaacaaccattgtcattgctcataggctagctactgtgaaaaattctcatgtcattgctgttcttgagcgtggctccgtagctgagattggtaatcatcgtcagctaatggaaaaagctggcgcctactataaccttatcaagcttgcttctgaagcagcctcgaaaaatacagttgaagtaaaagatagcgcgaaggttatgcagtttcctgcttttgacaaatcagtacatgacatatcaagatcaaagtatttgtacgaagtatcagtgtcaaagaacttcaaatctatgcaaaaggaaattcaagcagaagaagaacaacaacaaaaaccaaaacaaagaaactataagttaaatgatttatggaagttgcaaagaccagagcttgtaatactcatcttaggattcattttaggtatgcatgcaggtgcaattctatctgctttcccattagctctgggacaagcccttgaggtttactttgctaatgaaccagacaagattaaaagaaaagttgggcatctttgtttgataattgttgggcttggttttgggtgtataatctccatgactggacaacaaggtttatgtggttgggctggaacaaagctcacagtgagggttagagatctcttatttagatcaatattgaaacaagaacctggttggtttgattttgaagagaattctaccggagtacttgtctctaggctctccattgattgtgtaagctttcgatcagcccttggagatcgtttctcagtcttgttaatgggattgagttcagctgcagtaggccttggtgtatgcttttatcttgaatggaaactaacccttttggctgctgttctcactcccttcacccttggtgcaaactacataaacttgatcataaatgttggaccaagactcgacaacaaagcatatgcaaaagctagcaatattgcttctggagcagtctcaaatataagaactgtcataacattttcagctcaggaacaactaattaagtcatttgatctagctttatcagaaccaaaacaaaaatctgttagaaagacacagattctaggcctcatacttggggcatctcaaggctccatgtatgtagcatataccataactctttggtttggggcatatcttgtaaaagaaaaggaaacaaactttggtgtagtttataagattttcctcattcttgttctgagctcattttctgtaggacaacttgttgggcttgcaccagacacttcaatggctgctacagcaattccagctgttttaagtatcaccaaccgcaggccattgattggaagtaacagagagaagggtaagaagattgatcagtcgaaaccatttgatattgagctcaaaatggtaacttttgcatacccatctaggcctgatgtgattgtgttgagagacttctgtttaaaggtcaaaggaggtagtatggtggcattggtggggggaagtggttcaggaaaatcaacagtagtatggttggtacaaaggttttatgatccaaaccaaggaaaagtgatgattgggggtgtggacataagagagattgatgttaaatggttaaggaggcaaacatctttagtgagtcaagaacctgctttgtttgctggaactataagagagaatattgcaattggaaatccaggggcttcatggggtgagattgaaaatgctgcaagggaagcttacattcacaaattcatcagtggcctccctcaaggttatgaaactcaggtactactaattaaattccattgttattatatttaatgcataaaaaaagacttgtattatatgatagagataatattgttctttttatgtaataaggttggagagagtggtgctcaactatcaggtggtcaaaagcaaaggatagccatagcaagggccatattgaaaaattcaaaggtactactacttgatgaagcaagtagtgcattggacttagaatcagaaaaacatgtccaagaggcagtgagaaaactttcaaagcgaaccaccaccattgtagtggctcatcggctttcaaccattagagaagctaatatgattgcagtggtgaccaatggtaaggtgactgagtatggtagccatgacacactcatggcttcccatgttaatggtgcatatgctagcttggttcgtgctgagactgaagccaatgcattttcttgaactatatactcaactcaaacccaagtgtcattaactacacacaccttgtaaagaaactactactactaatgagtattgcttcagttttcgtaattactttactctctcccagtgtgcaaaaagtcatccgatctaattataaccgattagtcaattacgactcatctaataaaattcgatatccaaacctattcaattattaacgagttgtcatccaattatgtttttaaattctaatataaaatatcacatatttataacattaataaatatattttaaaaacatataaacaaataaatatttattatttttatgtatttctttgtatgttttttttttaaaaaaaatttaacgaattaaaatgtatttattaatttttttttatatatttgtattttattatgatgaaaattaaattttgtataaatatatttttctttttagtgaagttggctaaaaataaataaatgggtccgctccaatttaatagaaaacgagtcactacatctaatagttagaactgatttaatccaatgcatggattggatcggatgggatcagttgactcaatttaattggattagatcagctgacaaaatccaacatctaataaataagagcattgctatgaagtaccaaagtgtagcacttttataaaatgacgtcttataattagttaacagttttgtataatttttattaagttaaaataaataagactcaaattaaattgtactaatagcgatataacgcttcataaagtgctaggcactacttagtttagcatttctcaaagattaaatcggttgggttgaaatccaactcctaactatttatatattttaaattgcattcataggtttgtaatgactaaacacaacctccataattgtcctctaatataataaagtatcaaaataaatataaatacacgggattctagtatattgagaacaaaaatttttaattacaaaattttatttataaatacacgggattctagtatgttttatttataatttgcttaaaaattttaattacaaaattattcttataaagttttaaaattataaatatacactttgttcagtaaaaagtaaaaaaaaaagtaaaaaataacctaaccttacgacaaccataaataaactataaaacaactaaaaaaatcttgtaagaagtataaataaactaggttaattagcaattttttcccccgaactttgannnnnnnnnnnnnnnnnnnnnnnnnnntttttggccgttaaaaatttctcccgaactattaa

SEQ ID NO: 14281 - DNA, 8520 bp, Cannabis sativa
gctctgtgattcacttttctattttatttacagttaatatgtatgatattagaatttattaagatagagtaaagaagttaattaatgtgcttaatttattaatagcaagtataatatttttcttgataaaatcataccattattcaattattaaaactctattctatgattataacttatcattgtttagtataatattgtttagtcaatatatatggatcgtgtcacaatcattcaagagctaatgataaatccaaagactcacgactttgatcaaaatgatattaattaattaattgaattttgtttggattaattacattttttcttttaaaacatcgtgctctctctcatacagggtcggccttgagtaataatgtgtcaaaaaatttgttaaatatatgttttatttaaagtaaaatgtgagtattattggacctctttttacaaaaaattttaaaagtattatttttttccaatgtaaactatataaaaattttgagcattggatttaagtgggccttagacacatgcctagcctaccttaacctaaagtcgggcctgctcccatataacatttattgtgaataaataaatgtacttttaataagtataaccaataaattaatgagtattattaagaaaatttaaattttcataattttgcgatctaattataaaaaaatattttctttttattttataagagctgatgtttttccaaggtgagatgtttttccaaggtgagaaatatatataaaaaaaaagttgactgaattattatttgatattttttgaacaatatataaaacatattttgatatagtgtgaaaagaaagatttttttaaattaattagcaaaattaaatatagaaactcaaatttttcttttattattagtcattagatgaaatttaatgattcaacatttttaaatatggaagtttatatatatagatgcactcttaataagtgtttaccgagttttctgaaactagatattaagtaaggttaagctaaagaaaattgtttaaaagaagaaaataacacgatttaatacgtggttcaagtattaattagtcatagtctacgaaacaattttataaacttttatcaatagagtttttacagctctagtatttctttcaaagtcgtgaaccctttgtatggaggtgataataccttatttataggtagtcctccttaatgggacggacgaggagggttttttttaatgaaatattagcctatagatggggtaaaatacattttttaaataatattttgagttattgggttaggtaggtgaggtccaattcttaaaagcaatctgtacagagtgtagtactgttgacaatgacaggtgcagacgtgcgcattcgttggaaaaaaaaatgtcagaatggaggtggacccctcaataaggtgatcttttttgttgtgtcatttttctaagactgatagaaggggcaaatccacagatttctcgagatcctatcagaggtgtaccacggaagcaaccaatgactgtcccgcacactctttcagcttccagtcccaaacgacccttgagggtactcttgtacactttaagattcttataagtttaagttaccatttgtggtatagctatcgtgtctgagaagtttatgaatttagaaaatcatatgggtttcgaacgctttctctaggattatctttattgatgagatcgactgttgttggtcttcttgggtggggtgatgggcctaaaaccggttgggccttagctagaggccaccggtcgccttccgaaaacgcagataacaatgaatattacccatatatgggtattattggaaaaaaaaattctatgcctttgttgttatcaaattaacaaaaaaaaaataataatttttacattatatgggtttgagttgttccatcggttgagagagatagaagaagttgagtttgcgttagatacttttgatatagtataaaaagagaattttttttaattaattagctaaattgagcatagaaactcaattattttttggcgaattttcaaaaatactatttttatgttttatttacagttttacaacttaaaatttatttttaattaattacttacaaaaaaaaaatacataaagttttaaaattataaaaatatgttttgctcagcaaaaaataaacatataactaaaaaataatgagaaatcaacctcacgacaactacaaataaattataaaacaacaaaaaataattaccataaaacaatctcataataactataatacaattataaataaattatataaaataaaaaaacaatttattattcttagtgaaaaagtatttttgtaaatataaaaatttaaagagtaaaaatgaaattttttctatgttgatgtatttttgtattttttttttcaaatttttggtttattgtgtaaattttttgttatcgactattgaatcaaaatctaataatttaatatttttaaaattgatatttatagttatttttcttagtaattatcaatggtaatacccattaccattaaaaaatattctataaatatagtgatgatactttggcaactaattaagctagctagttcttgatagttagttgctaatatcatataaatatataattaatttataatttatattagataatgctttccgtgatagttagtagctaatatatattttttgataagagaagttagtgacaattttttccaaaaaaacaaaacaaaagttagtgacaatttactattcaaattaagtgcgtgcacacacacacacacacacatattatatattattttcctttaaacaatttcatagctaataaaaaatatgtaagaaaataatcaacttaaatatataaaatcatatctacaattttctcttttgtaaacgaattgaggtatttatcaactttcattttgctcactagttcttagcttattgataaatgtagttaaaaaaaatacattttagttaaattatttatttccaccacatttctattttcttaaatagtttacaatactaaaattagagtttgaaatagtaaattacacatttataaaaaaaaaaaaaatatgtacaactgactattataataacattgttttcgtgtaaattattcaatattttcttaaaatttatggacatgaccgatcctaggttaagacaggctagacctgtacttaaggtccacttagcttaaattagaaaaaaaaaaatcatctttttaaccgttaactttaatagaaaaaaattattaaaccaataattttcattagatagagatagctacattttttttttttttgaataaagatagctacatttaatataagagatatatgtattaaaaaggtgaattataagtataatttcttcaatgccaaaaatagagggaaaataaaactaatgccctagccaatatatgattgttcattataaatattactttctttttgcataaatattacatattttgattaagtgcactagctatatttttttcccaatcggccttttagccagccacaactacattactatcactatcaatatcactaactatgcatgaaaaaaaaaaaaaaaagcaaatgtgtaataataaaaggctatataatagaaacttaactagtgtctctcctatctttgtattatatatatgtgcaaaaacctttctcataagtacaagacttactactctaattcaaatcattagtagttacaaaagaaaaaaaaaaatgttgcttccatgcacaaaaaacttttgtattgatgatcatgacttccaagaaatgttaccaccacttggagccacaatcaaccaaaaccaaactactcgactcaacaaatatattgtttctccttttaatcctcgttacaggtaaattagttcgctgagcttctacttttgcttttagtttttagtaagtttttcctcgagaaattctttcttttcttaagctaaaagctgaaaagattattttcgaagttttagaagtcttaaatagtttttaaaagcttaatcaaccaaccgttgtgtgacatatgttcttaattatttcttaatatttattctctcatgtaattataatattaatgtggtttgatgagattagggcttgggagatatttcttattgttcttgtggtttactctgcttggatatgcccctttgagtttgcatttttgccaaataaaaaagacgacgctttattcataatagacaacattatcaatggcttcttcgccattgacatctttcttactttcttcgtagcctatttggatagccacacatatcttctaattgacaatccaaagaagattgcaattaggtaagtatatattaccagaaaagatcatttctcgtcggttaacttctttaataaaccgacgcaataagttaatatgtctatttataacaaacgtaaaaaaaaaaaagtctttttttgatagtggtaaactaaactctagttcatcatgacaagattttttttcatctaattcaggtacctatgtacttggttcattttcgacgtgtgctctactgccccgtttcaatccattagccttcttttctcaaatcatcatggtagtgaactttgttttaaactccttaacatgctcaggctctggcgcctcagacgagtcaactctctctttgcaaggtttcattttgttctatttcattccatttcatcatcgatcatatgatcatataaatatttattatctttttccttttttcagacttgagaaggatatccgattcaactatttctggactcgttgtacaaaacttatttcagtatgcacctgcctaaacaaaacatattattatactatgttatgattatcactccattttctatttttttgagctttttaggtgacccttttcgcagtacacttggccggatgtattaactatttgatagcgaatagataccctaattcaagccaaacatggatcggagttgtgaacctgaatttcaaaagagatagtctttggaacagatatgtagcttcgatttactggtccatcacaacactaaccaccacaggttatggagatttgcatgctgaaaatccaagggaaatgcttttttatatcctatacatgattttcaatttgggattaacatcttatctcattgggaacatgacaaacttggttgttcactcaacgagtcgcaccaaaaattttgtgagtatatacgttgttatttgtcatcttaagatatttaatactctataaactatgttagaaagttttaattattatgaaaatactatttataaaattatagacaactctatttttcactaattgtgtggtgttgagcaccaagattactacttatataagaatttcaacaatgcataattttaagttgtcaacaatttttaatattacttattacattaaaatatatatagctatatttatttgtacaagtaacaacataacattttgtagtatatgatacatttgagcatctccaataaagtgttaaaagtttaatgatgatataaaattgtctaaatttagtacatgttaaaagttgtattaaatttagcatagaatatagtacgatagctaaattttatatcacaataaatattacttttttatttactcttttgtaatatattaatataattaataattttttacatttatttataaattaataaggttttttactcttaatgcattcgagtacaacctaaaatttgagataaatataacgttgacttattttttaagctgaatttaactcaaattatacaccatcaattaaagatggtgttatgttctattaggccggcgtagtttctctgtaataataatactcccaataagattaacacgcattattatgttattagatatcgtaattacttttaaataatactcatactaataacgatatgatattttatgtagtactggcgaccatacttttaaattagtacttgtgtttatgcagagaaatacgatgaaagcaacttcagaatttgctcggcgaaaccagttgcctcgcgcagttcatgatcaaatgttgtcacacttatgtgtaaggttcaaaacagaaagattgaagcaacaagaaaccttaaacagtctaccaattgcaatacgttcaagtattgcataccatttattcttacccactcttcacaaaacatatctcttccaaggagtttctcaagattttctattccaattggtaacaaattaaccctacatacatgactttaattggcatatatagtattttttatcccaaatcatttcttttaactttttcttcttattacattccaaaattatttgatttcacttaattagtctaagacaggctagacccgtgtcttggactctgaaattttgattaaattttagtaaaaaattgttgattaaatttttactttcagtaggtacatagttaaattgtaattttttttttgttagttatgggggatttttcaccaatttttatattttatttcttaaaaaaaataaattattaagaacagtaatggatctagaattaaaattgaagtactaaagagtaaattttaaatattaaccaggttttaacttttaatatgtgtaagatggtttaataattataccaaacatgatatactatttatacatgttatatataattataaatatatgttataactaatcaaatatatatacattttttcccgattaaaaatgatcgagatatatgtgagttcgcctatgattatgaataactaaatcaacatttaaataactaattgcacatttattttgatatttattcggttataaatatttatttacgagataataatatttgttttattttaattaaaagatttcagagatggaggtagagtacttcccagctaaagaagatgttattttgcaaaatgaggctccaacttatctatatatactagtttcaggatctgtagtaagttaatcaatttagtttcagtcctgcatggattcacaaaataatcctaatttaaataataatctttaatttctaacataaaatttttacttgaaaatatcatggctacacctgcaggatttcatatcaaatactactcctggccaagatcaagtaagtgtagttgttattcacaaaatatatttttatcaaatacataattatgtggagtaaataaattattttgtatttattttgttgatcgagattttcggcaaccaattaaatagtagaatgagaagagctgaagaaagtcaaacactctcataaaataacaaattcgtggactaagactcattaatgccccaaccacgtaaaaattacatgcattaaactttcttcagctcttctcattttactatttaattagttgctgaaaacctcggtcaacatatttaatacaatcatgactatatggcctagttaattgcatttataaaaacaaaattatggtcggttctaagattgggtggattttaagtagaaaaaaaataggctattagggatttttagttctcaattttttagttcgttgaaaatggtttataaactattcacagtattataaattgattattctgtcaagttttattacatgtggcaaacaaaataatgacattgttgcttagctagttgtcgcgtcaatgaatgttacgtgtgtaattaattttttttaaaaaataatttatttttataatttaattttacgtaatttttttaatcatgaattgatttttaatttaatatttttttaaaaatgcataattttttatttttcttaatgtagttaaattatacacgtagcgttgatgtgacaattggttaaacagtcatgtcatcattttgtttgtcacgtgtgacaaaacttgaggactaatttacaatattgtgaatagttcaaaaaccatttgtaacagcctgaaaagttcaggggcacaagaatacatatatcatagttcggagggtaaaaatcctaaatagccaaaaaaatattattgaacccttttttaaaaaagtgtttttttataagaaaaaaaaaaccttttaagggcctctaaataggtggaccgtaagtgcaaacctatctccctttaaccgagaacgatacctaaccctaacattctatatgtggcttcataggttattggaaaagcacatgcaggagacacatttggagaaattggagttttatgttacaaaccacaaccgtttacagttagaacaacagagcttgctcaaatattattgctcaacataacaccattgatgaatatcatacaagcaaatgttgaagatgggaacatcatcatgaataatttcattatggtaaagcaattcaatttatgagtgatatgtccactcactaactatactcaaatattacatgcaataggaaataatttcatgagttttggtaaagttcgggcttggattaagatggagtaggtccgtacttaggacccacccgat

SEQ ID NO: 14282 - DNA, 8104 bp, Cannabis sativa
ttttttttttattttttaatatgaacttctacgtattgtttttttctaatcaaaagcttctacgtattgttgatgtatcgatgtactgcgtaaatttaaattattattatttgtttgaaacaggttaatttaaattatttttctaaaaaatgaaaaatgaaaaatgaaaaaaaaaggttcacgtgaagtgaagggcaattaagtaaagtggggagaattcaaatttacaaatggcgcagtcctgaactgaggtgagttccagactaggccaggccagggagacagcgaaaagagtgaacaatggagaagatctgtgtagccgtccgagtgagacctccggtatcggacgattcttcctctggaacctactggaaggttgaagacaaccgcatttcacttcacaaagcccatggcaccccgctctccggaatttcttacgctttcggtacctatttatatacatgcctttgtatatttccttgttttgcttattcttttgtaccaatagatctaatttttgctttatgtgtttatgaagatcacgtattcgatgaaagttgctcaaattctatggtttacgatgttcttaccaaggatattattcgtgctgctttgcaaggttttaatggtatgcgctctctttatctctctattcttatcctttaatagttttgtaatttcatttttattattttcatatgatttatttattaatgttattatattttttttggtgagcaaatttgaaggtttatgcttacctgtctgggtttagtttggtctgtcaatttgcagagcgaatgtctatgtttggtttctaagcatcataaactaattaaagtgatgtaagaggttttgaacctttaaactatgttagaggaacgtttattaagctatgaagggcttttatccttcgctgggtacacttggcttagaatagagtaccagtatatgggttttggaccttttttttaatgcactatcagcgttttaatcatctttatattgggtggctctcaatgaaatattctgtcttttgagatgtttacaggaactgcctttgcatatggacagactagtagtggaaagactttcaccatgaatggttcagaaagagatcccggaattattcaacgagcagttgaagatatatttcagagaattcaaatggtagtactctctccccccatcctactcactcccatttttgttattatgctgatgttttgagtagaaaagtatatatgacctggtttctttaattgaatttgcagatgtctgaccgcgagttcttgattaggatctcgtacatggaaatctataatgaggagattaacgatctttttgcagtagaaaatcagaaacttccaattcatgagagcttggaggtgtgcaactggtagtgtgtcaaatttcacgagttaatcttagattcaactcattgaattacgtatttttattttaattcagcgtggcgtatttgttgctggcctcaaagaggaaattgtcaataatgctgaacaagtattaaagcttcttgaatatggagaaggtttgaaagataacttgataacccttgggattttattggctcaattttattaattgttatttttatattgtttgattttttttcctatgtagctaataggcattttggtgaaacgaatatgaatgttcgaagcagcagatcacacacaatatttagaatggtatgtccttcataagttcccacactagtattattacatgttgagctccttcagtaattgtattcaggcttgatttatgttatgtatttggtaccttagataatcgaaagtaaggggaaggagactaattattctggtgactatttaagttctgatgctattcgggtctctgtcttggtaagtgttctttttgccatggtgttaaaactattttaaatgttattgagttgttcaaccactgacactaatttttaattgaaaatcaccagcaagtaacactgttttatatgtttgatttgtatcattgtgctgttcttgtttgattgtggcaaatacagaatttggtggatttagctggttccgaacggattgccaaaactggagctggtggagtacgtctgaaagaaggaaagcacattaacaagagcttgatgattcttgggaatgtgattaacaaattaagtgatggtgcaaaaaataggtataaccttttttcttcttagtgtaaatttcatttggagaattctatatatttttataataatgacttttaatgcagaggacatataccttaccgagatagtaaactgactcggattcttcagcctgcgcttggtggcaatgccaaaacttcaattgtgtgcactatagctccagaagaggtagcatattatattataattattattattcagtttttccaatcaattattgggcttgatattaattatagtttttaatgcaacatcaaggctcacattgaggaaacaaagggaactcttcaatttgctagcagagccaagcgcattgctaactgtgttcaagtgaatgaggtaatgttctttttcatacattgctaaaagttgttattttcatacatgcaatgttgttttttattgatttgtttaataggactgcctgatattgaaactttccttttgttccttttctttgggctgttacagatcttgacagatgcagccttattaaaaaggcaaaagctagagatagaggagctccgtaaacagcttcaggtagttatgtaatgtttgtcacacaatttgataagcttaggctaacattgttaaacagcttcaggtaattattgtattatgtttgttacagaatttgaaatttatgggctaacattgtaaaactattctttagggatctcatgctgaggtgctggagcaagaaatcttgaaattgcgaaacgatttgctcaaggtagtttcttcttttgccgatatgcatcattttctttttttgtgccttaatcctaatagggaaaaaatcaaacaagctactcactgttaaactggtacacgaacacatgcacacacacttttattctctaaatctttattcttgtttattattatttttcagtatgaattggagcatgaacaactagagatgcaactggaagagcaaaaaaaatcacacaaggaacgcgactgttgtacaagggagcagcatatgaaaattgacaatctcagcaataatcttgttacttcttctgacattgacatgacctctagtaaggtatagctcatgaaaaactatgattatgcatttggttttctctaatctcaagtattaattgtttttaggtagggttggcaattcatgttattatgttgtgttatcaacgcatttatgacaatatgtttttttaacaggtcacacgacataacacgataataggtcacaaacttgaaattgatacatatgacacatgattaaacatattatgacacaatacaaaactgacacgattaatataattatatatgtaacacaaacattactcataagattcatagttttaatcttttttattaaataaagcgaatgataaaaaaattagaagtttttcttttctttatatagccaggttttttacagtataaaatatttaaagaacttgtattttttatacgtgttataatcgtgtcattttaggttaagcgtgttgatttgaaaacaatacgtttaataaatgtgttaaacgtgtacacaattatgatgtaaaagttaaatgtcacccaaatttatttattttgtgttgcatcgtttttgaattgtattgtcttgttatgttgtttttgaattgtgtcgtcatgtcgtgtgacgaattgctagtcgcctagtcctatttataggtgttgtgagaagtgtttctgaatgttttatgttttaacattgtgttgggacttgagatagctaggaaaataagaaagttgaacctgcaaagcatgcctatagttttgaatactgcgtcattgattaacgtggcaacattattataagcttacgtggtatagatgcctgttttggtgttttagcaatttttattaatcccactcgtagggacacgattctcgaagcgggaaccataaggaagaacgtaatgacagcaacagtatatctcaaggagatgccttttcgaccccttgtttcaaggctgctcccaatgcctttgttgcaagacgatctagttattcaatgttaccggattatagtcctcttccagatacattaagcaataatgtggcagatgaagatacatggttaaaaatgaatagaggctacataactgacctcgattcccttcaaattactcctggacgaaaagttcaatcttttccaccaattgagatgacacctgtgagtctgtgttcaattacattttcatgaattgtatttcagtaaaagttgacgcttatgaataatatctttcaatttgtttgttcatttagaacaattacttgaacttatagcatacattaaactcaaatgctaggtttctgaaatataaatggactaaggactgttgcataaatactcttacatgtcaattattttagtacaaaaaagcttatacaagtttttggttgttccattcaaatgttatcagagttcaaacgagaattacaggcaggagattgagaatcttaaaagacaattagtgtttaccattcaagaaagagaagagctcaaggttagtatatgtcaatttacttgtcgtttctttgatattgtaatctaaaaatcctctttcctccgtttctcacactatgagacactagtaccaactacatgtgcctatcatgaaagtcttgatctttcatattcctgctccaaaattgtctttatgattttgctttatgtgttttgctttgcatattgatgttgtcctgtgcttacaatttagaggaagcacatggatgaaatggtattgagcaatcaattaatgggtgaattatctgagcttcgacaagaagcgcggcttattcaagaaatccctcggaaactttgcgaatgtgcagcaaattgcaaagatgtttacgttgatgttctgtcaatgacacaggtcatatatttcctggtcaatttatgcatcttttggtgactattaatggatttttcttcatttaacttactatttcttatgctttatgtatctttacagagttttgtaactgatgggaaatcatctactgcaaaattgctttcaagcatgcgtgaaattggcacaagcctatttacaattctggaaacacatttttcaatggcaacggactgtgacacccctttgggggttgataaaatgatcaaagaacagcagaaaatattgtgtgagagagtgaagagcactgtcaaactattggtttcatcagaaacactacgccttcaggatgaaaacaagctgaattcactctgcagatgtgaacacaaggtagctgcttggtcacaattatcaagatatcgttcatttatgattttattttcttcaatattgctaggatgctttattttctcttatggtacctgttttccataaattatgtgtcaaatatctcttacatgtccaataagttgctaaatgttagatttccctatatgtgttcctttatacaataaacatactggggattagtttatgtcttacaacaattgaacactacataatttttataatattattaatatttcattaataaaacttggaaagctctaaatgtattgtggtttacatctttcattacaatttgtacacaaatgtttgctgatgtttcaacagaaagtagtagaacataggcaacattcaaactattatcacatatcataagttattttgtttcataatctcatgttttatgtctgctttgttagttttcctttacactattttgttagcttaatttttatttgatttttgacatgcttgactttcactcaagacatgccttgttttacatggacttcaagaacatgtttgtacttctggttcaacacaatgaccttttatggaaaaccttaatagttgatagtaagttaagagatatattaggaaaagtatacataaagtattggacatgggctcaatgaaaacagccatcacaactaaatttatgatgtgatcagcggaagtgattggagtgaaatgatttgattaacttgagattttttattaacttgttgaattcaaaacttgaacatctggtagccatttatatctgcaagtgagctgtagatattgtcaagttacttctaaattagcataaaaggccaaaatatttaggttattaggaaggtccatacatggttgactgtagaactgttatttcgtttgttttgcatctcatctttaggatttaatttgtgtgataaagggctgcactctggatggagaaactgcttctttgaaggagaagttgagcaatgaactcaacactatcactgaaaggtaccatggcctgctgaaagaattgagtcttaatagcaagcttctggaggaatcaaagcagagatacagtagtttggaaactgagtttcatcatctggctaaagaaagagacagtttgtgcaaaatggcctctgaatcgtctcaaaaacttggagttgttactgaccagaaggaaaatcttttgaaggatttgaatattgaattccaaagaaggaaagaccttcaagagaagatcaaacagttcagtgccgcttttgctcatagaaagacatcacttgtgtcttttcacagcgaattcaagtcaaaaattgaggaaataagatctcaaaatccagtttctgcacccaattcttttgggtgttaaaagttgcgtcatgactagtggcataagtactgtggtggtggtggccatccagtttcattataatgttttatcattgtgcattacctgttctacttgtatcagtcttgtatcccatattatacagctacaatatttgaggcttatggcttctttgttcgtttttttttttatttgattatatctccgacttatcacagcttaaattagaaaacaagtaaaatgattcatttattgtagtaataatatgaaatgagtgtgaacgaaccgaatatatcatgaactgttattctatgaagttagtggctagcagatatcaacttttgccattatagattagctaattaattaaccatacatatagatatagtcttactttatattggagaaatggattagttaactatacatatagggcttatttggaacgtcgtattatatattgtattgaattagattatacgttatacttttatataatagtatgttaaattttaatttatattaaaatattatatatttaagtatccatagaacttaatactacacataattttatataaaaatattgtataaaatacaatttaatataatactatacaatacaatatggtgtaatacggcaaccaaatgaaccaatagagttttactttgtattgtgtcacttggtttgcggtaggcaacttacttgactaataaattaagtattctttgaacgtaaagtggaagaaagaaaagaaagcctttgatagtagggtggttatgatatgaaggttttgcttcatttatttttgttggccctcggagcatgaaaaacgtcaatattattgtaatctaactaatgtaattgagtaatacacttctattacattttgggtctagaaaaatcaaatgtgtcgctctattattagatcttattaccctttcatgtcgggagttgtgacttgtgactcgtgtcgagtggctcccacggtaaagcagaacaaagattattcattcccaaaagttaaaagcataaaggtaagctaagcggaggtgatcaacccactaccgctaccagactcaaattaatgatgttatgtcaaaattattgttaattgtatcataatattgacacaaaaatagttttagttcaataattattataattcttttagggttcctttgaaacgttatattagatcgtattgtattgtattatattatattgaattggattatatatcatatttttatctaatactatatgttaaactttaatttatactaaaatattat

SEQ ID NO: 14283 - DNA, 9855 bp, Cannabis sativa
aaataaatgtttaacaagaatcttcctagcatcataaaagtaagtaccaattttggtagaagttcaaaagcattgaatggcagtccagctccatcagccatccatgaaggtgatccattgctgtgagctgttgctgtcttaacattagaagtgatgatctcgtttaaccttgcctgcaaacatataatgcaaaagagaaagaattactaaatgggaaagagcatatcacaaaaacatttaggaagattgattatgtacttctggaccaatgttgaaaatagaggaagagaagaacattttttgatattcaatacaacttttagcgctaaaatatgttgtaacacaaagaatctgatcactcaaataataaactaatcagatttgctttgtaaatctactctggattgctgaaaagcgctgccttctatgcaggttgaagctaactgaacaatagttcactgatcaaatccaagaattatataataacaattaaattcaaataacttcattacgtaatatttaacagcacacatatgtatatgtttttattttttctttttcacttttgctaagctctgaaacacagtgataatagtaatgagaataagcatagcaaccttggcctcttttatctcaacactggcattgtcaagtccgtccaacatagatgagtccttgcttacgagggagacctttaaaaatatgatacagtcagactcagttctaaatcctcaatgaccgaaagcaaatacagcattaagataaaagccaaccaggattggtgttaattgaccctctaaatcaagcaggccttttgcgaatgcagctgcagacatctgtttataattggattaaaaatcgggttactcattgaagttgccaagtttacaatcatcaatacaagcaacaaaaaattgatttaaaaatttgaaaagctgaacaaggatgtgaaactgctcgtgcagatgtacggtgtacctgcacacgaccctcatcagaactgtagatttttagatcatgacgatacgtactatgaaggcgaagcaggccagttccttcacctgcaattgtataaaagacccattatgaaaaagtaccttaagaaaaaaattagtaatcaaatgctactgtaattgaccttgaaaacataaaaatgtgtatgcctccatgacacacaatgctgacttcttctgaagttcttgcctaaatcaaaatcatcaggtatctagatatattgcaagaatagctgttcctctctttatctcactgaaactaggattcctgtcataccctaccgtattgaggaacatgacaccatagtaattgctacatagatactcacaactcacgatagactcaaaccttaaaccttatgagagaaaaccacctactcttgggtcaagggtgaccaatttaagatgagttttcatggacctaggacacatgttgccaaggaaaatatgttcaagaaagttttttgcataaattccagtaagtatgaaagtaacctggatacatgttgtttcggaaatatctaccaagttcttcagcctgaaaataaatgaaaagtaagataagtaaaaataactacaacataacaaacaagcaaggcataaaagtaatacaacagcacctgcttcctgcctgcatgtgtcaggacacctccatatttaagaaccattaaagcctcaactggccgctcctcctcgccttcaccattagcttttgctactttaacccactttagtggctttaattgaacctttctataaattccagagaaatgtcccccctaaaaattagaattcgcaaatgattagaagcagttcaatggtatattgtaatgaatttaggactcaacacacacacacacacacagataatctatgccattggatcacattagaactagctaagtaaataaagaaaaatgccaaatctcaaactactatggaacctcttcaaggacagctttaacttggcgaagtttttcagcatgctcaaaatcttctgcttcactgtcactctctcgaccaggcctaaacaatgcaaaaaataaataattaaaaattgagaacacttaaaaattgagaatacttatgctgttgggtatgcatgtatcttgaatggtgagctcaacacttgaatgtttatttttttaaaaaaaataaggattgaagaacatttctgctttttcatataaaaatcaaatatcaaactgttttatgttagccacaaggacttcaaatacaaatttgagaaagaaagaaaggtgtaaaatgatgtaaattatgataaacataacaactggcaagctagagatgcagttcatggagttatctggagactacctgatacgaggtacaagcattcgagtggcatctagcagatcttgcaactggatagcacttttcagttttgtctacacaaaatgaaccggcaactagtggttagattacacaatatctcgagcaagcaaaagtgaaaacgtaaaatagtaaaagtaaaaagagcaaatactaacttcagatctagggcgtcctccattgtactttaacatcaagtttagaagcttttcctcagtcactttcagcttcaccttttgtttgggagttctatcaccactgctcaaaaacatagcgaggcttagaagggaagggacaaaaaaaaattcctacataaaatcaagagagaagaaggaaaaatataacatactgacgaatgatagcaatcacacatcgtaactcctcagactgcccaaatgtgccaatgattccacttccttgacgagttaaaccctcagaagcctggcttggttcattacttttccatggtaaagttggtggaattactgaagaaagatgaggagctttggcatctaaaaacatcttcctaagaacacaagcagcatcatcataatacctgcatcgaggaaaaagaaacacttacatttgtcaagaaagatagagaagtgcctgacatcattaaacttaatgataaataaaaataagatctgccagtcagtaagttttaaatactgaatgcaacatgtttgagataattatatcattaactaggaaggattaagagaactcattgtcactaattgatgaaaatgataggagttttttaaatgaaaaataaaatctgtttgtccaccacatacagtcattacctaagatctccacatcttaagcagttttaggagggggcaaggggctttaacaacaaggtcaaagacaattcttctgaacatttaagatacacaagttttgaagctgaactgataaatgaaaatgtaacataaaagtgattgacgacaattgacaatattaaagccactacaacaacaatatcacaaaatttagttgtttgtcataaaagccttacttgtaggagtttttcacaaagctccacccgttcacatcacaaacataggagcgcccctcacaacgcaaaagatcaaatccacagacctgcacacaacaaaaagaattcataattggcccggaagtatttataagaaaatcatccgagtacctagaagtatcataatagcatatgagaattataaaataagtacgactttaacaatggaccaaagtatatttcatttcattagaaaatcatcagcatatctaaacatatgcatagtcatgcataggaccttttacgtccaaggaaactgtaaaaatagaatggttcaacagtactcaacaatattagtgtttctgaaaaattgatactcaatgactaaaaaacaccacataaaacaatattccaggagtctacaataaaaataccaagtgattataacatgaccgtgttttgtcaaagagatataacataccgattgtctgaatgcaatgcagacttctctcgccatttgtttttccataggtgtcaataagacaggatatcgcacctgtcaaataaaaataacaaaatatttcacaaatcacaattttaattcatacagatagtctagcttgaccattgtgtctagtcacaccagacattgaacataatagctttcaagaaacaaattcaaatatcaatattcctattgagtttggcgaaaaatattttctggatgtgtatgatactctcagatgtgggaaatggtgcataagtcacacagctacttgataaaacaaaatgactaataaagctacagattggaagaatattaaacattttggactagaacaaactacatgtacttacttctttgccatcaggatttctcatgacgacaccatcaacaacaggagacttccttgcctcagcatgcgcatattctggaccaactgtgtatacctgtagcaatcataaaagatgagctaatggtgtacttcaactgtaaacacaaaagcaaaaatatattccactacagtacagtagactcatcaattataaagacataaggtgctactccagatattcaatcatttcaaaaccgacttgaacatgctattcactatgcctatttccactagcataatttgagatacaaaacaaatttactatgcaggtaagagataccaaactatacaaccttgacatctgtccctccagttggcataaattcctcataaatgtaagagccctcacgtctcactcttctaacctcaggatgaaaatcactggatcgattgccaacctggagtgaaaaatatttgtataagtatatagcaataataaccgacacctattcatggatgaactgttcatagctttacacttcaattaatataacaatcattatgtttaaatgctttctctttctttcccgaatagaaacatgtttgattgtcataataaaaaagatgagtaaaaatatctaccgaacctcctcccaacccttaaagataaattcccatggacttgaacactgttacaatgtaccagctaataatctcaaacaaccacaaacctttagaacttagatctaatcaataacatcagaaaataaatagaactttagcaatagctcacctttctaaataattccttcattcctcctcctgctgagctggggtaatatatcattatactatgattatctccttcacaaaagaaaagactgacaatcattaataacattgttacaacatacagaaaaaacaatattacatactaatataatatcttaaaagataaagtattggggcaagcttaccatcaacaggcttctccacaaatggtttccaaaatcgctcattgtgaacctcaacaaaatcttcttcctcaacaaaatagtctaggtcttgataaggcttttctctatttacaagggcatatcttggaacgggaattccatacatttcaaggcgcttgaccccaaaagattaaggtgttaggatatgttgttcaacattaacaaaccataaatattgaaaagaacatgttacaaaataacaaaatattcttattaggaataattgcttttgaaataacaattattattgacatggagagctaaaccttaacctcactcacatcagaaacaaaaaccataacagttataattacaagaaccaatctcccagtcacttctaaaattttaaaattttacttggatcataaagtttgaacatttagaacaggtgtgtatttactgttacttctaaatttcctctgtggatccataattctttatgagttcacttttatgccttaagcaagagtgtacacaagcaaaaatgccaaggagatgaaagaatttgtgggaagagatttattcattttactttttgtatttttattggttgaaattatacatctgaaaacagctaccatttttgaaaacaccaaatagagggggaaaaaagttcacatacctcgtataccttccttctgtcatgaagaaggtgttgtggctccagttcattaacaagaaaaggcctatatcagagacatagcagcttttaatatatattatacacatgcacacatacatatatgcaagtaaaaatataaaaatccaacttcatgaggatcaggcacaaaggaaattttgaaaaataatgaataataaaccagaaacaaataataataataacatcccaagagacaagctgatagtcaatctccttattcagcaataattctcataacgctatataagagctacaagttcaagaattatttcaattcaaccaaatattcaatattaatcttccacaagttaattaaactaaaagaggatgtctatgaatcttttaacaacagaaatgcattcttaagacatagtcttcatcttgaatattagtgacaataataaatttaaacaaacaaaacatatacacagaattgagggttttcactacacggagacatcatgaaaataaattcttacttccttaaggccgcatatgcctcagccttctcaagaggatagccattggagtggaaggcaatcaagcaatcacatatgggccatctgaaacaaagaaaatactgaaacaacatgaataaagtcacaagttactgaaccaggatatcaacaatatctctacattgtcgtacatgttcacgtaaagatttcacaccatgagaggcatacttggtagatcacatttccattgaattgaatagattgtcacaaaactttatgatccactaaaagtacacacgctaacgtatccatgttttgaataatcattagaaaatgtacctttcaactggctcttcaagaatgaccttgtctccaaaatgaataatctaacaatatgcacacaaacaaacttaaatcataacaaatcctaaatgatttagatttaacagtgaaaacaaatatctacctcaaattctccgaatgcctgtaatctatcaagaatctgtttcattggtgcagagaacatctacattcaatgaacaagtcagatgcacgtaatccatgcacttcatgtgtgcgagtgtagtgtatgcgaattatagaaagaaagaaataaataaaaaaaaaatgtgttatgatttggatcatgagcaaaaatgtcaagacacaatacaaaaaacaaagacctcgggactactcttcaccttcttttccattacacatactccaacggtgactttctttcccaaaaaatctccatcatcttccatcgttctctcaaaaacaacacaatccgaatccaattgcatcctcaatcgtcacttcctactactttcacaactcaaatccaagtgctaacaccaaaaaaaaaaaaacaaagaaacaacaaatcaccgccattgttaaccagacaaagctctacaaaacgcatacaaacacaacatacataatacagagattcattattagcgaaaatgagaggaaaaagcaagcgcgtaccagagaagaaagagcaaatctcaggaaactcggttagccgagtagagaggaaagtaatgaaatgagtcacggttgataaaaatgaaaatgaaaatatctgaatgaaagaaagattaatatatatgtaagggttgtgttttgtggagataaacccaatcatattagttagattctagaatatacacacaaccaaaattgaggtgtggctttggaaaacgacgtggaaaggctatatagagagagagatttggattctcttagtaatgaatgtatagtaaccatctgtgtcagtttacctcaactccgaatattggttgtggtccatttaattttcttaggctattattattttctcacctctgtgaattgaaaactatggagaaaattaattaataaataaaaatgggtggtggtggattttgtttggtactagtttaaattatttatttggactaaataaatgattttatttggtttggaagtcttgctttgggatctatttatctgacgacagacactatggtggtcctatctatctcctatatatttttttaattatttcgaatggttttttttttttccaattaatttcattcttgtaaacaaatgcgaatcttacaagtacttttttaattccataaaaatatattttgagtatatttattatacactagtagtgtacaatatgctaccactaccttgaaattgaatcaattaggagataaattaataaatataaactcccacatgatggatttcgtttaatttgttttattaatcttattcatttaaattgtgggacaatacatctatttctttttatttatttgtatgccaaaatttaatgccgggtcaaatggtctaaaatgccttttgagacacgtgggaacagtctgattgaccgttgactcatgaaattgtagatgaatttttatttttagaatgaagttgtagatgaagttttagatgaatttaactactgattggactttgattaattcaatctttatcagataaaccgtatcaatttgttatgtgtcactttttctcattttgtttaatgatttagttttggtattatatcacccgtttccaaataatcatatgtcacttttcaactattttacctgtgattccaagaaaaatattgaaaaaaaaaacgattttaaaaaagacaaataagtagtacaatacaattgggcagttgggcagtttcactattgtttattgacaatgtcattcatgattgactaccatggtgaaatgtgacatctcagattgtttttgttttgttctcattttttgatatttcagttatgcaagcatattctctactcaagaagagagtatatttgttagtcttcataagaaattggtatgtacataatgtcgttattataccaaaattacctcacacacacacaaaaggtggaacaggtatgtcattacaatatccttatctatcaaaaaaggcagcagagaaagcaacataaaaataaactacccaaaagaggtggaccaggaccatacacaatataaaacacaaccatccaattaaaaagttctctcttataagtatggctttccttgtactcaaagatcaagcaaagccatgattcaagagatgacattctatacctattgctcaagctaatcatcacttaggcactatcacgaaatgggtgtcaaattgaaaacttgtataaatgaacttttcttaaaataaagggaatataagatttgacacaataagcaaatcttctaatgttaacaaagtttatgctaaatccaaacccttgagatgagcatcacttactcgtgtgccgatagtacttccagctatgtatccacctgaccaagcattctgcataaagaaatgaagtagtggattagctagagtttgctagtgatggacaaatcacttgcaatacaaaaaggaatggacaaaatcttacacctacaacttgggcatctaataatatgtgatcatataaaagtttaataaaatcacaccaatgaaaaggtttcatggcagcaagtttgtactgctatactgagattaagtctagaaattgattacaagggtgtgaattctgaagcaaaagtgttgttcactatgtatgtaatattaccaagttatacacatgtatttaaaagggactatgctgtttttatttacctgaaaattgaaaccaccagttaccccatcaacattcagtacctgaaacatatttcactttgtgtcaataaatggatacactatggtcatgggtttatgaacattgatattagtttgtaaatgttgatcaaattttcccatagaattagacccacaaagtcttgtatggatatttacctccccagccaagaataaatttgaatgaatcttgctttccattgtattcaacgaaatcttcagaggatgaacataaattcattaacatttgtacacagaaaattcaaatgtacctcagcaatagatacacgcccacacagatatatagtatacacataga

SEQ ID NO: 14284 - DNA, 7318 bp, Cannabis sativa
ttttgtaatttttttttttttgttgttgttgtttttatgtttttgtaaaataattcttattttttttaatggttagtaattttatatgctatttattaaattaaaatatgtgtaatttgatgttaaactgtacaaataagaatatactacctcttcttaaagtttctcttaacatttcttttagatgccaaataatattattatgtttatattatagtaatttattgacataaatacataagtttaactttgaattataaataaatatttaaatttaatttttagcgataataatatttaagttatatttttgaaatttcgtataggtacttgctattaagtatgaagttattttccaaaaaaaagtgtgaagttattattgtgttatttttgtattggtatatttaaattattttttaagaaaaataataatttaatgacaaactaatcagattgttatgtagtaatttacttaacaaccaagtatacttaaagaagtttcaaaattaacaagcattattatagtaaaaaaattaaatttaaatatttatttaattaaatataagtatttatactgtaaattatttttttagaacttttttattgttacactttaaaataagttttttttttatattttacagaattctacataaaaactcttaacggaacaacttaaattgcaatcaaaattcgtgtaataaatttaaaactcacttgtagagcaatttaaaactctacataaaaatcactatagaaactacttgtaaaactcaaacagtaaattttaaaaaaaaaaaataaataatatatgaattaatttttcaaaatttttataatattattaataataattgatttaggagaatgggatttggtaaggttggttgtttgattcactttctgtgaaagataagggaaaaggaaatattgttttttaataaagataaaaggaattgtggaactacctccacttactacgtatatataggtagacaaatgtcactctatatagtctccacttcattcctaacatttatgtgtattatggctgcgaaggaaggacttatctcacctttttttttcttgaaaacgtatatgtaacttattctttataaaacgatccaaaaaagacagtcctactattttatttatttatttcagaattcagcagataaggattgataaaaaaaataataaataaataaacataattcctaaaataattagtaaagagtaaaaaacttgagaaatatgaagtttctttttcaccaattaagaattttaaaaaaaatatatacataataatcagggccggtcctgaaataaagtgggccatagagaaaaaaaaaatttgggcccttatgttagaaaaaatgtggtatttttcaaaatcggtaaaaaaaaaatgtataattttaaaagaagaaaaaaaaattttgggcccttgggctgggtgggccctatgcacaggcctagcccgcctatacccagagtcgggcctgataataatattgagggtgcactgtgcattcatttttagtgcactaagcacaacggcatttgttaacctcgtttgtcgttatactgtacacctacttttagtgcacccaaacacaataacggcgtgcactgtgcacccactcttagtgcaacaaggcacaacaggggcgtctcttaacctcacttgaaggtgcaactgtgcacccactcttagtgcaccaaggcacaacaatggcgtatgttaacctcacttgtgggtgcactgtgcacccatgtgcaccaaggcacaagaagggcgtctgttatcctcacttgagggtgcactgtgcactcactcttactgtaccaaggcacaacaagagcgtctgttaacctcgcttgagggtgcaccttttagatattaagttttatattttgacaaaaaatcagttcagggtcttatttgtactattttgaaaaaacagtccaactggtaacttttgtaaaatacaagatcaaaaatgatatttagcctatattaaaaaaaaaatttctcatatttatatataaattatccaatataaaatattaataattcaacattcaaacatatatcatcaaaaatgtctttacaaacttttcaggcataaattctaacattcatgtcattgcccatatggcgagagaccaatacttgagtttggctaagtgttggatcactagggtgtgaacctcgcaatctacttttggttcgagtcattccctcaaatcttttaatggttatctcatcataatgtggcttaagactttaagtatgattgcttccatgagggggagaattaatgagtgataaaatagattaggtggcgtttggttgtgaggaataaaaatataagaacaggaatggaataaaatttaaaatatatataaaaaaaaaaaattgttacattggaattgtctttctatcatttttaattctactaaaatgatggaaagagcatttcattagaatgcaattttcaatactttacaatacaaccaatggaatgaaaattgtttcttttccattgattcattctatttcattatctccaactaaacgccacctaaaagaaagagaagcagtgtggaggaggagcggggagcggggagcggggagtatcctcatatggagaaaaaaggagagcggagagtgtcctcgtgtggagaagagaaggggatcagagagcatccccacgtgaaggaagatgagagggggagtagggagctaattatgttgtcaaagtagatagaaattatacaactctcatttgaataaatatatagcaaatataatttgataagaaaaacatgtgttaaaaataacatgtattacattcactctttctttttttagaaaaatattacattaagacttgaaaaaataaactagaaatcataattgtcaagaaatcgataaaagatccagagttatattagacaatccataatcaacctttttctattaaaaagaagaaaaaaaaaacacaaataattacttaaagcaccttaagaaattaatcaattattgttttctatattaatgatggaaaaaaataataataacaatagctttttaatgatatataatatatcatggaacttttggtttgtgctctggcttgtgagtgacatcaaagtcaacatgaacaaatgctctctcgacttctggcaatttttcaattttgtcttgaagtgtctctccaatgaaatgtgcattgcttagagacatttcaccaggtaacactatatcaacctcaacaaaatattcagttccaaatttatatgctttcacagtctcaatttgcttaatttcttcatgatgattccatattaggtatgtaagctttgctagatactctggtggtgctgtccttgcaatcaatgaccaaacattctccatcactgtatttgaccaattacccattgtgtataatgcgatctgcacgtataattaaacataattaataagaagaattgtaagtagttttgattggaaattatattatcaactatcaaattaatttggagtgttttctctcttccaatcctgatttctaaagacattttcttttttaaatcagggctcgttgcttgaatggggttaaaagcacgattttgtttgggagtgaaagttattatatgttgagaatcatgaaattccatctatctcaaaaccaattggcaatgagtggagtagtccatgttcttatatatggctcaattctctaccatttattccatatgggacgacaatgtcacaatattatacaacaattgcaatcatggacagtatcatctcatgcttccaggggtaattttgttttttattttaactttatctttcactttatcctttcagggtcaggcttgagctaaagcaggtcacccaacacagagcccaaaaaaaaatatttttcatttaaaattagacatatttttagtaatttttgaacatactacacattttttaaataaatgacgcaataattttctttttcttaagcccatctaatttcagagccggtcttggattctttcagttgggtgaggttttgttctaatgggttggctcctgtttggcgggtgagcttctacgtgttgggggtatgggtgtagtgtcgggataattgtggtgattaacgagtttagtgtggttattcggcctagattccagtcggggtggtgttttacaggcttaagcatatggagctaagctagtagttgttatggctttgacccctattggaaagttcagtctaagaatggttaaagtcattgctttgttcttgtacataatgtctaattacttatcaatacatttttttaagctttttacaaagtaaagaactatcataatttcaattttcttttgaaattcattcataaaatctttaaaaaaaaaataaaataaagaatagaagtgtatcaaaatacttgttttagaataatctaaattataagtacttacaagaatagcaccgaggggatcgatccaccaatagaattttatagccaaaacagcagcaccaaggccaattgagttggtaataacatcaaagaaatggtcttgggcatatgctctcactatttcattactgaatcttcgacaatataccattaacacaaatttcaccactgtcactgataccattatccctatcatccatttctctttcactgagtctctttctggttgtgtctacaaatttatcattaataataattaataactttctgattttccttaaaaaaaaaattataatcaaatttatgtttaatgtatgtgacacttaacattaatgttaaatttatagtgtgtttagtgcgtacctttgttagaagttctcgacctgattcgaacagtatttgtagcccaagagtagccattactgatgcaaaaacaacaattccctatatacatttggtactatttcatcagtaagaaaataaaaagtagtgaaaaaaagaaaagaaaataaaacaatagtgatggaaataaaagtgaaaaataggtgacaaaaggtaaataatatttagggaacaaaaatatatgttttttttttagcattgttattagatattacactttttataaatgagatctcataattgattaaccatgtttggtaaaagttattttctttatagtctatagatgggtgaaatctaatataattttattatttttctaactttttttttatataatttctaaattatccacatattaaaaaagtaatatttttattttcaaattttattgtaactaaaaatagtctggcactaataagtgtttcaatgatctaagtttaaggaagggtacttacgacaggttgcatacgactcttgccaattgggtaataaaactcatttggttttctcattgaataagaagtgaaccaaagaatgaatccagacaagagatctaagagtgagtcgagagtggaagctatgactgccaatgatttactctcaacagaggcatacactttagccaagaacaacaccaaattagccacgttcgatgcatagattgccaacctctcatttctcgcaagctccttcatttcatcctaaaaatacataactcaatcaacatcttctttcaaatatctaatttccacaatataattagatatcttctatgtcattataaagatatcttctaaaagtgccttaattaggataaggtcacaactcacaaggcaataatattgctgtagttattgatttgccataatcatgcctcatgcctgcccctatatggcatgattttattttaagaataaaattaaataatatttaaattaaataaagtcaaatagttttcaaaatattttagtaacatttatgaagagagtaaaatagaaaagaaaaacaaattactcttctttctcagtttttacgagtttgttctctttttctttttaatttttttttttttaaaatcattttaatatagataatgttcttaaaaaaaagtcagcaggaacaaattaatgaaaattaaatatttatatatccgccatattttgatttttttttttcaaaatggaaggcacattaatgaaaaaaaaattcaaaatgaaatgaaggcatgatattaattttgcaggtgaagaagactcactctgattaatttattagtttttacattattactattatctcttttttatgtttaactgtgtaaattattgggaaaaataaaaataaaattcacattcatgttagaaaagcattttatcattagacaatacatatatgaaaataaattgtagggaacaaggaagacaaataataaaggaattaattacctcagttaaagttccaggcaaagttcctaactcagtaaatgaatcaacttcatcgaatccctcaagaagtttaacctgcctcttgtaatattcagcaatttttctttgcctccctacaaaaaaaaaagtaaaaatgtaaaaggaaaaaacaaaactaagaaaaccatttttaataaaattatgaaaactaaaataattatatatagtattattggttattacttaatgagttgatgaaatggcctatgccaaactgagatgaagtatggctctccggaagcttgtactcatccatgctaagccgccacgatggttcggttggcgctatgccgttcgttgctgctcctgcaggagacagcaactctgtcctgtagtcaaatgaatctgttcgaagagcatcgtcacttgtcatgttattaattaatatgtttttgtatgtcgtaataataataatagtagtagtaataatttcgagaaaattgatgttgattatttggaaaagaattagaaatgagaatacaactttgtaaactcaacatgttgatctatgtataaatacaaagtaggaaacttgtagtatataaacaagtgttgtttaatttattaattaattgacctattaatcataattaaagacacatgaagcgtgggttagattgactaactgcccacatcattgttaaaataaaagcatggagaatgttgtttttctttcttattaatttaaataacaaaaaactgttattatacattattttaatttttaatgtgaatggaatcttcaatatataaatatatatataaataagtaatattaaaaataaaaatatcccttagaggagagaaggaaatatcgcgtattaattccaattaagttacttctaattaatgtcactacaacaaatataagaattagaggcggaagggtccgccggtaataattgaaaaatccgccggtaaagatctttagaggcggg

SEQ ID NO: 14285 - DNA, 21328 bp, Cannabis sativa
  modified_base (3350)..(3351): a, c, t, g, unknown or other
  modified_base (18464)..(18466): a, c, t, g, unknown or other
tgtgtttgaatctgggttttctggcttgaaatcgagcaagttctcaaagaagagaacttgctctgctagggtttcgattcgtgagagtgaaaggctgagtgtttgagtgttagggtttctagatccttctcagagtatttaaaactctgagaaccaaacgacacaagattgagtgtcgtgttggtcatacggtgccgtttaagtctaaagcataagtcagacttggaaaggtcgtttttgaccttgaaactgatattaaaaagtcttgttggtgtagggcaaaagagtaaaaatcctacaaaaccaaatggtaattttttttttcaaatgagcttatcttttgcaggctcttgagaaggaccaacactgtcgtgttgctcctttgtggaacaaactttggagtagcaaaacgcatgaatgctataaagttctctcgtggagcattatatccaatgcgcttccaattcgattcatccttagagaataaataaacattgaggactcctcttgcccgatctgtgcgggagaggaagaaactgcgaaacgtatttatctttattagtaacatggcttctcatctgtggagagcgtctccttgaggtctcagtcatgtataagaattgaggactagaatgtgagattgggttaaattcttttggagtttgaatgcaagcaacgtgaatactgatgatgtgttcttatatgcgtttatcatagactcatagttttgtttttttttttttttttgaacaaaaggagactttttattcaaaagaaccaaccaaatacaaaacaaaagctggcggcagtagccaaccaactcaaaaaactaccagctatttacaacatttatagcatagcaatcttttttcttagaactaagacaagaagttgacaagcaaacagcattaaaaagacagtcatttctgtttctccaaatgtgataaagagtagctgcaaaaaccgtattcatgatctgcacggctaagtttggttttgctacaaaaaccgtattctagtcttgaccgtattcatagactcatagttgacactatttgaagagcaagaaatgatgaggtacacaataactatctatatagcatacattattatattaattctattgttcattgtcatacagggtatgatcactctcttttgtctcctttataaccttctcctgcggtcactgagtgggaacctctatgtgtcggccggatcaaacttaactacgatgtggagattagataagggctatgatgcttgcagtggtggctcaagatcatatagggaagatgattttgggttggtaccaagcgactgcatttggctaatgatctttgtagggaagtcacatcttgtctattagcattggaacttgcaatagagatagacttacaatttgttattgtaaaatgtgattctgacatagttattaaagttttcaagagattaaagctaaagtggaaaattgataactatgtagctcattgtaggagtcctatgcctccttttttgtgttgtaattttttgaaagtttttaaatcttttaattttgttgcttcaatttcaaagtgggtttttatttttgacaaaaagagatgcatcttattcacgactggataaatcatctaccaaaataacttaaaaagtagtagggacaagccccccactatagccacgacttgggaaagaacaagcgacagtcgccaaccaattagctgccttgttcgcaaattatttaacaaaaacacaagaaacattgttaagattagacattaaagtacgacaatcagaaataactaaaccaaaaggtgacaataaaggagacgaactatacagagcatcaatgatacttttacaatctgactaaacaacaatacttgatctaggccccgttctttgatccaactcaaagcttccttcaacctaaatgcctccgccaaaagaggagacacacagtcaggcaattgtttggaccaatgatcaatgacagtttcatgatgatcacgggccaaccctccaatcacaaaataaaaagccctgaaagtgacagaggcatctacattgactttaatcatatcaatactaggaaccaaccaatgctccacacgaacacaagaactggaatccattgtgtttgcagaattttcgtgagcaatcttccactgattaaagtaagacaatgcatcagccaccaccccatttgcagtagaatttttactttgctaaacaagtccattttttgctttccaaagagactaacaaatcatcgcaacatgacaaaccaatgtcttcgaaaatcctatgaccagttgataaaaccatcctgaaaaatttatggtcgaaaggttgcaaatagccctatcaacccgctgccaacaagctttggctaaagaacactcgaccaaaatgtggagattgattcattaccttggcacaccgggcaaatgacaaccacatcaacatgctgacattttaactgggtcagtgttggtaaacaccctgtacatgccctccagagtaagtctttaaccttaggaggaattttgagttgccataatgccctccaaaggcccgaattattatcttccaaccacctatcatgaagaacctagagaagcttgtaagtactcttcaccgaataaacccctgaaatctctttaaaccaataccaatgatccgatccaacattatcattcaacacaatactcttaataaaccgtgaatcaaaagtattgaacaaattctcaaaaatttcatcatcccacacccgagtccctcctaccagaatttgattgacctttgtcccattagtttttatttttaatcaaaatgtaattaggggaattgaggctttctcaatatccaataacattatttgtaatggtcatcaaacttaatttgcttacatatttacttcttttgaaaaaaaaaagtattctttttattcttttaacagataaaatagaaacataagacaagaaatgtatcatgtcggatagtaggggtgttcatcaaactgctcaaatcggccgcaccgtaaaaaaaaaaaaaaacggtttgaaattctttgtggtacggtcgcagtttgaatgtttcctaaaccgcgcagtgcggagcggtttgcggttttgaattgttaatatgtggttcaaaccgcactgcaccgcatattataaacatactaatttttatatttatttaggtccaatatgtaaatcccaacctaagcccacaaattattgtattgttgaaacttgaaactttttttttcatatttattttcaagccttacggtatttttgacaaagtgttgctcaagttttgttgtatttgtgatagtttanntatttagtgatagtccaaaccgcaaaaaccgcaccgctccgcaccattatttgcggtgcggtttttacagttttttaattttacagtgcgggtgcgatttgaaaaattaaaaaaccgttgcggattagtttgaaaaaatagtcaaaaatcgtaccacccgcaaacactatctgatagtattaaccattttcattcggagtaccgttgatcatcaacaaaatatttcgtatttccggaatttgagacgaaatgtcgttctgaattgagtaataattgatgagtgatgacgtatgagaaaataaacgacagtattttgagttcaaactcaaaacgacatggcgtttatatgataaacttctaaaactataccgtttttcttcctcgaagaaatatcatcacaaatttgaaatttaataattaaaaatataaatataaaataaccgttgcgcggtctaaatcgtttgaattttatgcaagtcatatactttaacgagtcaaattgtcgccatctccaatctatattccattccatactcactccataaaaatacatttagcaaaatttctctttgaatccgtcactgcatattgcacacacaaaccctagcgaccccacactcaaaaattgatcttaactcctctctactctactcctgtacccatcatcatgaagaccaagacgccattgaagcaactcaagctctctgttcctgctcaagaaacctcaatttcttccttcttgtaagttactctttatgatcttttaattatattgtgttcttgatttggggttttttctttctttcttctattctcttgccttattgctctatttgattgctgagagtatatgggaaaggaaaatggcattggtttaggtatgattaagaatacttgaaagtttgaaacttttaattgactgcgagctagtgctttgcagataaagtagagtaattttgttcattttgggacattttattaacttgggtataattctttacgtgggtaatacaattaagtagcttccttacagtcttttcttttttcatgtttctttgcaattcatttctctattttatttacttgttaaccagatggtggtaagaaattccctctttaaagagttggatgtgtttttaattttcaggactgcaagtggtacatttcatgatggtgatttgctcctaaaccataaagggttgcgtctcatctctgaagaaaaggaagaccaagtaagatttttattcatatcatttcttgcattgatcatctaatcatcgtttttccatttaatcataaatttgaatggacaaaacaatctccatgtttgtgtcttcactagttctcgtggcactgtatattaatgaaagatctctcttgttggtgtatatattccttctttgtaaactataaagattttctttttcatttttctaattcaaaaacttcttttgcaattgaacagcctaccaataataaggagattaacatcgagttttcattggatgaccttgagactattaaggtcattggcaaaggaagtggtggtgtagtacaactggttcgtcataaatggctaggagagttatttgccttgaaggtcagcttaccaagatagtttttttgaacttgtttatgtacttttctatgtatttgttttcttttcatctctgaattcaaactgatggtaaccactgatccaccttaaagtttattctctcttatcctcaactgctgtttcaaatctttttattgtcacacataataggaagtctacattcattttgtttttccctaaatcatgtttttaatttcagctcacatcttgacttggaacgaacttagttaatgtagtgacattcacacttgttgtataacttttctaaatgaccagttgttgtttttgaacttcaagctatataggagcagctttattttccatcctagatgaccaaatttttggaaactaaaacaataatcaatagtatattctattgttttggcttgaattcaacttgtatcttcttctataagctctagcttcagagaaaattgctgatctcagttaagaagtcagctgttggtgtataacttagaattattattcttcctacaggttatccagatgaacatccaagaagaatttcgtaaacagattgtacaggagctgaaaataaaccaggcagcacaatgcccacatgtggttgtatgttaccactctttttatcacaatggagccatttctcttgtattagaatacatggatcgtggatctctagtagatgtgatcaaacaagttaatacaattcttgaaccatatcttgcagtcctttgtaaacaggtctatttttttccccttttgaacttaaattttatgatcagttgcttttttttttgccctcatttgcttcttttcctttccataaatgtatatattacttgactgaagatttgcgcttgtatttcaggttttacaaggtcttgtgtacttgcataacgaaagacatgtaatacatagagatattaaaccatccaatctacttgtaaatcacaaaggggaagtaaagattactgattttggtgtgagtgcaacactagccagctccatgggtcaaagggacacatttgtgggtacttacaactacatgtcggtatgtaatttactacttttcttctatcgttaatcccttatgatgaattttgagttggtttacatctgtctttcctgtttgggcttgaaatacaacactttatcttgatttcttaatgatcttacaaactcgaatgaaacataaagaaaggctgttttaatttctttctatagccagagcgaattagtggaagtgcatacgactatagcagcgacgtttggagtttaggcatggttgttctcgagtgcgctataggacgcttcccttacatgcaaactgaagatcagcaaagctggccaagcttttatgaacttttggaagctattgtggaaaacccgccaccaactgctccatcagatcagttctccccagaattctgttcatttgtgtcagcttggtaatcttttgcttgcatgttataatcagtttattgaagttccattgttagtcttgacatccaacttacttcttattctgatatttgcaataatgttagtttatcttattacatcttctaatgaatttgcagcatacagaaggaaccggagaaaaggtcatcctctttggaccttttggttagtaaaataatacatgctcttcttcaagttctttagaaaatcatgattgttgacaataaaaaatgatttataattctgttttttgcctctccagaatcaccctttcataaagaagtttgaagacaaagatatcgatctcggaatcctggttgggagcttagaacctcctataaattttcctagatagatagatagattgatagctctgtattgtaatgttaacttgtgtggataaacagtttgttgtcctatgcatcagtgttcagttttgatcaaacattacttggatctttccatgataacttaacagcagatccttcatataatatcataatttgtttaaagagctataatttcattttcttgttatcatttagcctttgattgttagaaagaagagccacgctaattttttacatttctttatacttgttctcaacttgtattataatttttttttctttgaataaatcatttcttgtcttcttcaatccttatctcttgcaagttatatgtagacttttttaatggcaaatattcatcatattaaaacttcctgcaacgtttttggaaagaaaaattcttgctaattgtggatgtgtctaaactaaaggagttttagattatatatggaactaaatttgagctatttctattggtgaaactgaaaagatcaaaatgctctagtagaaaattttgtcaaatatcaccaatactatctaaaaactgtcaatgtcaaaaatttatttccattatttatctatggttagaacttgtgaagcctatgccaaaaatggggtcagacccactcattctgattcatttctgatgtctgtgcttttatgtatctacacacttgaaacacatgaatgatgttatgtttcactgtacaaaatctacaactacaagaatatatatacatgttatataataatattataataacatatccattgcatgggttggatgttgtggaagacaaaacaaggcagagccctctttttcctttcctacctattttttttaatgaaattccaaaagataagatcatataaaaggaaatgatatgaatccaaaattcaaattcagaggctaactaatgaatcggtgcgtgtccacctatgattttcttatgaaggatccaaattgaagttacttgatgaacaaaacggtgacaagtttcaaaagcccataagtgtagtgatgtcagattcagagccattatttttattttgtttgaaaagaatttttcttttaaattaattagaaaaagcgtaatgtggtgggacaaaggaaaatatgcagatctgtgggtaagtaaaaccattaataaacaaataaaataaaaattattaaaaaaggccaacagaattgggcaggataagattagaataataataataatattaaatacatgtaaataacatgaatatattatctacaataaaatatgtggtgccaaatcatctaaattgcccatctaaaactccaacactattatatcatcatgacctgtgccttagtcaaccttcgtagtccttatccttaaactcatacctagccttttttcttgccttgccttctctaccctaccaacccaatctctacctatttgaatttcatcattaaattttcattttatattaattttgaatatgtattaatgaataatgatttttaacttcatctataagaaaacaatatttttaaaacaaacatttcttagattgaaaatctctttcttattttgaaatgtattgggatgagtagcaagtgagactgtctaattaaataattttctttcattccaagaaaatatatataaattaaattacgtagattaaggaatgaaattagtcttcctttttttttttttgaagcactaacttaaggccatctttctattgatctgagtggatgatttttaagacatgattaagtacctatctaattaatatttcttacccttgatttaaaccctgttaaactaaattaatttaaagctacgaacaagataatcaatgttgtgacctatttcttgtacaagagaataaaagcaagcaatatagaccataagaaaaagcaaagtatattctgaaccagagttgacaaaaagccccatagtataaatgttgtcccggacaaattaaaatacttatcaactttaatttttaattttttttttaaaacacaaatatttttattttatttagtggcccaagatttgcacccatttcaactatggtgtaaagaatctagacaaattggaatttttgtaccattactattttaggatgtaaagaatgaagagtgaagcctctaaatttgattggggaaggaaaaggtttaggaagaatctgagaggaatttaaacttgagtcatcatttattttttcttttttatatgagagatgagtcatcacttttaaactcacctaatataattagataagagataaaataagtaacaaaagacatgcataagatcatatcaaaactcaaacaacagtgaaaaatgaatgtttgagatgttagttacatattgtgattaagttcataaattagcactctaaaagttcacttagatcataataatcatcaaatcattcaatttcaacgattctaattaatgtgattttggacaaccaaaaacgttccatatcatatcactaattatcttttctttttttttttctttttgtaaatttaaaagttcaaatttttataattaatttgaatatttgatgatgagtgggtcattgaaagaagtaaatatgccaaagctgtcatggctttacgaggcaaagttggcaaagatagggaccttagttttacctccaaaagaaaagagaagacggtgactcagatttggatatgccttcaatatttagaccttatcctctcactactatagtactcctactactactactactactactctatagaatagcctatttattcattattattaggccgtaaacctaaaaatatgtgataatgacaaatttataaggataaagtgctcttttttatacatataataattaataaaaccggtttaataacgcaataataaagtagtcataaaaatccctttcaaaaaaaaaaaaaaaagtagtcataaaaatgttatccatttctttattggtataataagcaagcacatgttgagccacgtccttttatccccaaatatagtttttctccatttatttttcattaattaaattattaaaagatagaaagcatgtaacgtgttcgagtatatatataatatgctccccaaaatacaacctttcaaatatatcatcatattttacaaagctcttttctttttctttcttcttcttcttctccgttataaggttgtgtatttttgcttttcttctaagctgaatattcattcataatgaacaaagaagcagagaaaatcatttcagaaaatcaaagagttgataataaattattattagctcaaaacgacaggtgggttatgaacatggaaagctgtaataataataataaggatattaatattgagtcaagatctatagattcatcactagactccattgaatcatcatcttcctcagagttagtagaggatgcttcttcttcttcttcttctaaatcaagttcatcaacatcaatatcatcattttcttcttcaaataatggtccactatacgaattatccgagctcatggtccatcttcctatcaggtatatattttttctctacaatataatatgtgaccgattgagccaagttcttttattgttctcttctgggtattttacatattttgattttggtgtattaaatgtttttttatatatgtgcagaagaggattgtctaagtattatcaagggaaatctcagtctttcacatctttagcaaatgctgtaaatgttgaagatcttcccaaaaaggtttcaccttacagaagaaaaatgatgatgaagtcatgcaagagctatggagggggattagatagcaaattacactatcccaagggtctcatatcaaagaaatcaacagcaagaggatctttattattttctaggcacctttagttaattatggcttttatcctcatattataacaaattcaaattttgcacttttagttttccttactataaaatactatgtcatttcgagcactagtttcttttttttcttttttttattttagtttctttcttgttttaaatgatataactttttttttaacaatacttttgagatggtttaaaaggaattgagtaatcaagctgggtaccctttctgtttcatggtttgatattgtgtttagtatatatttgcaagtcataaatagttttgtgtgaaaatgtgagtggaactggattaggatcatattatgtacaattttatcggatagaggcagtagaaattttgttgtgaagttttttttgtggaactgtttatggtttgaccgtttttgagtagaggtggcagatggatcgcagttccaacttccaacatgataaaccttccctatctactagactactactatacttatccccaatttatatttatttatttattttaataaaaataattatttgggaaaaaataatgaaagttgagacttgagagcacgtctgttgaaataaataattaaaaattaaatcgaactttcgttcaccaccattgattgagtcaggcctcaacaaaaaaacaaaaaaattctcaaaaaagcacttgatgtaaagacaaaaaaaaaatattaactttaattgagcaatagtcgtctagcgattatattgtgtatggcataaatcttcactagtgataatcgtctttagaaattaattcgttcaccaccattaagtttgcattgcaactagggcttttaaaagaaaaattgagtaatatcacacataactaaattactgtgcgtaggggttatgagatcagagtccagctgacagagatttgaacttgaaactaacttcctctttatgaggagaagtatgaaagtaccacaattttactttttttataaaaatataatatttaaaatttttgaagaaatagaaaaaagaaaactcttaatttacatttaaagagctctctttccattcattaacattttctttacggttgaaactcatcaagtacagctggaaatgccgtttgaacaatattactttagtagttcagtgcagtaattcaaatttcaaataaccacaacactataaacttgttaaacatcattacatgagaaaatcaagggtttgatattgagcagctatgtaatatattagaacattttcggcggataattgtgggttgacactagcactagccatcaccagctctgaaatataaaactcagaaaaaaaggaggggaaaacatgcccacctccacagttcgcgctgtgagaaatataaccacgagggcaaaactttcttttcactcaaatgaggtgtacatatttcagatgagtattagaaaaaattgtccagaacaaatttaacgtatcaaatcttgtaaaccggctcaattccgagcaaataaaagcattttctcatcactatggctgttgcttcacaaagcaatagtctgcttgtttcttcggcagagccaaccacctgacccagttgtatcaatataattagtataggtgtggatgaaggttttacaatttggacaattacataatagcatattattgcttaatgtttatgaaacagcgtatgattgaccgtacctgacaattagaataaaatttcttagtgaagatttctgacaggttataaagatattcacacagaacgtttggcaagagattggtgcccgcttcttcaacaacctgtaaatttagacagcaattatgctcgctactcttgcaaccaaacatgtagatcagagggcaacaatcaaattcaccaatatggatgcacttacctcggaaaattgtagcaaatgcaggcccaattcacgctcaccagcatgatccaaaacaatcaccccagcctgttcaaaacaagtagttaaagtattaatataataaaacctttttccacagaagcagtacagttacaagaatttgtcctagtgtcaagtgacttcaattaatatttatttacgaaaaataatgcagacgaagaaagatcataagatataaggtttagcaatgacaattacgaaagtagaaataacttactttcttcaactcgtctatgtctttgccagacttcctaatgattgaacagatcctagcatgagcatagagcaagtagacagcagtattgccctgctcagacatttttagaaagacaaagaaaaaatgtcatcagcaactagtgttgctgcattgtgcttcggagaaaacaaaaaaagtaactatcaagtggaaaacatatatgtccattttcactaatgattaacaaatttatttagtattctttcttcaattaaatattgacaaaagaaaactacaacagaagtcaccacaccttatcacttaacatctgatcaaaatcaaatgtataattggttagcctgttattcttcaggtcagcgtacctgccaagtacagccacatattaaatgagagtttatgaccaaaaattttgaataaaaatataattaatcttgggactgtaacagcttttgataaaaatcacagcacactaactgttaaatcatttcataaacaagaagctcaagtactgatcacttacttaactgcaccataaccaacagcctcagcagtttgctcaagctcctgttcagtccactctttggccttgcctgattaatatttaagtttgacaggtaaggaaggattaatcaatgagagacagaaaagacatgagacacattctcaatcatgaacataaagtaaatgatgaaagtaagatacaaataactatgccacattaataggtacttgaacatgctcttaaaagtacataaaaaaaaaagtacataccacgctcaataagtgcagttttactgcggctcttggcttcatcaagtaaatcaactaatcgaacaacctctgagctccgagttctaaatcgtttgccatcttctccaagaaccagaccaaaaccaacatgactagcttttggatatttgctatcatcagcaggaagccaacctgcacgtttagcggcctggaacaaaagaacaagatcattttcgcaaaactagtattgtacaatgtcatgcagatcagggacacgtatctgattggattctaagcacactcaaagttaaaatctctcaagcaagcaagcaatcataagtcgaagaacaaataccacttatctaacaaaagaaatatataattaactaaagaactaatgaaggaccatcaacacaagatataatggtaaattttgatactatgtacataccttgaaaaacatatcaaagtgctgttgctgaccaacgtcagtaacatatacaatccactctgctttctcttcattaagtcgatacctatgcattgcaagaagcaatgtcaaacataagcttcacaaatccaatataaaacataatttcatcaattacatacataatcaacacagtatacgtgccaatcttgcacaaatgtaagtgcatcttcatgcctgtgaaaacacgctgagttgcagtgcatcaacatgcacaatcacaatgtccagcactttatgagaaatgtcaaagacactttttttaccctctcttatatcattgtttagcatgtggattttagtaattactttcaatattattaaaacatagaatacttatcacatgtcacgcgttcaaataagaatgtaaaagagcgtgctagataaagtgtagttagcactttccacacctaatttacacattcgcgatgcaagaatataactgaattatacgaatactaggagatacttggactaagtgaaagaaagtgaataattaaagcatttggaagaataaacttgaaatgttaacacaaacatcaaataaacaactaaccaaagagctgtgagatcagttgaagcatagttgaaaccaccgtcactcttcaccacaataaggggaatgttagccccttcaataaagatcacacgagcaccctcactttcctcaactaatcctagttcgctcaattcctttataacgcctggaatatatggattgtaaaaactttctccctgtaaaagaaaacaaaaccaatgatgacaaaaaagcgaattcaatgcactcacagtatttaaagacttatggggaaaaaaattcttaaattataaaagtttccactacaaaatctaatatttcatcttttctaagttttcaaactgtaacagttaccaaataatttactaccacagtagtagtatgtgctagtaactgccccaataataatcataaagtaggcaacaaagcagctaaattgtctccaaaatctctacgtacagaaagttaagctaaaactaccttttcttccaatttaactccaagacgttgatacaccttatcaaactccttccggctgatttcacatatttttgaccatgccttccggtactcagattcaccaccctgttttataaaattgaacaagtagaagtagaaattcaacgaacaaaacaaaaacccccaaattaaaacttcaaagcttaagcaaatgaaatcagctttacgtgtatcttctacaataaataatagtaacttacctgaagctttacaactgcctgttgtgccctcaacttgaaagcagcatcatcatcgaacctctgttttgaagctttatagaaagcctacaaactttcacttaaattaatattgtattttgtatcaggggtgtaattagccacaatatacctcaccaacaaagacaagcaaataaaagttattaaaaaaaaaggtgcaaattacaaaaatgcttttgctcaaatttacccttacactaaaatatatgatggcttttatgttaaaatctggtacaagtttactcattattttcaataaatctctctcctagaactcaacattaaaaaagttaaaagcatcatcaccgtcatcataagaacacagctcctcttaagcactatacagaggaagttattctagtcaacacaaataatctatattgaataattctaatttaaaacacaaaatatcaactccctctccatgacattagccaaaaaaattaataaaagaacccatacaaaagaaaaataaaaatgcttgttcacaagatgtaaagagcaaaaaagtatataaatgtttagtgtaaatttcactaacctgcaagtctccaattgcagtttcactaacatcttctaaatttggataattctcaaagaggaattcaatcaacataccaaactgaaaaacacagaatatttctcatcaggaaaaaaaaaagtgaatgatgatagtagtagatttataacagatgacaaaatccattctttaaccatgaacgcctagataatgctataaagctagtagtgataaagtacaaagcagacaactcagccttcaaccaatttgcaatcatcaaaacatgtaatatcatgcgtgtaattacatctcaatcactatagtactactaaagagcagcgcagacagcagtaagctggtgctgcctgcaattagctaatgtcatccaaccatgtaatattacaactgcaattatgtttatatgtaagtggatgtgaatatgttgccaaacataaaaaatgcaggaaacaattcatgaagatttacaacaagaaacacctcccttgagaactatctataccagtcaatgtcaatatactgtttacaaaactaacatctacctgtgttccccagtcaccaacatggttacgccttaggacatcaacatttgagaactcaagcatacgggctagagcgtccccaatgatagtagaccttaagtggccaacatgcatttcttttgctatattcggtgatgaaaagtcaactacggcccttttgacttcaagttgtggtgcccaagtttcaataccatcgcgaagcatattttgtatagtctgcagcaccagcattttacaattactaatccacacatgacagagctataatcagtttccatatatataaagcaatatgaatatacaaattgcaaaataaaatatatgtttcatatgaataaacaaaattaacaaagtactattcttctaaaagttcaggtaaagtttcaatcaccaataaaattcaaaagtataccttagctatccaactctttgataatacaacattcacaaatcctggtccagctacagagcatgattctacaatttctgatggcggaagatttttcatgatggcctataatattgaataaccaataaattatccattctaaacatgtgaaattccacaaccaaccagaaataatcaagttcagacgaagaaaaatgtacaaacaaaaaaaaaacagaatctttacctgtccgacagatggaggacccctaaactcagtccctttgccttttattttagaccagaggcccatggcattattacttcaccaaagaaagatatctcaacttagaattcaaaacatacagaagtatacatgaaaaaaaatccaaatccacaaatatgtccggtaagagtactgaagaagatgttcatgtgttaaaaggcttgctgcttaccactgatagtcgccaaattttccagtgcaaggagcgatcaacggctctacatcggactcatctgggactattgctctaagcgatgattcaaacagtttggccaactgccgcttcacatttccaactctttcttcatcctatatcaaacatatccaaattaatttcacaaccatcccaatgatcaacacattgattgagcttcatattgaataaattctattacttccgaaaaaaaaaaaactgacacaaattaaagttaaaaatggtaaattgaaataacttacagttgccatagtcgaaagcggttgtgtctttgttgcaaatacgagttttttagatgccgccttcaacaaatctgtctagtttacataccaccacattaaattaactaaaaattgtaaacacaaattggaaactacatacatttctaacaatattgtctggtccaaataaatcactcgcaaccgtcgaaatatatacaaaactgaaattttcctcccaagaaatgcatgcagcaaagtaagttaagaagtaaaatgaggaatccggaccctcaacagttttcagcaaatttgttttcaaaaaataaaagcagcaacactaactaacttaacttcaatttctcttactcactcaaaattttcccagtgcccaaacagaagagaataaaagcccaaacatttagagatagagaagaagaagtaaatagatgaataataagttagagcttaccagaggaagatggagaaggagaaaaatagaggtgagagaggcgattgagggatatgaaggatggtggagatatcggcggcagtatcaggtttatagaacctctcatcactctattatattttctctttctctttcttttttctttttctttttctttttttaattttaatttcttttttatgagctgggaattgggagaaaccctcagccccctccctcactggcttcactctcccactagtcgcccacgccacgaacctttgtgctgcaaggctcactcaccttactagggctttgactttatttatttttagctaattaggatttttgctcccaaattttgacctgtagtaaattatgctacgtgtacttttgagattgttaacaattttccataaattattaagattgttagacttaaagacatttgtccaattttaataagaaaagtctaacatgaatcaaagttcaggggacatgatttggtnnntgtcaaagtttgaggggcatgatttggtagatattaaagtctggggagaataatttattacatggacaatcacaaaattagtaaaattgaatgaaattagacaaaaattcttaaatctaaccatctccataggagaatttttaacggtcagattaattcaatggtataatttgatacatatcaaagttcaatgagtaaaaattctaatcagcctttattttttaaaatttaagataaaatgatttttttgaaggatttggtaagataaaaatatttgtggcataaatactatgtgctttcagtttcatacacatatttttttaaatagtatatgctatgtttttgttgcaacttttaatttcaaattcgttaagtctagttatgtaacgtcctaataaaatgcacactactatcaaccaataaacataacctaatcttactaaactgggattactagaaataagagcggggatctaaatcttaaatcaagtataaagtgaaaatataacttgtaactatttaatttacaaacaagtccaaaagattacacatgttttgggatcttgtaaaaatctttgcaaaacattacaagttattttacgtgtcgacctaagcgacagaagctgagaatataaaatacaacaactggtagaattcgcgtggtctggtgtggcccaaacatgtacaatacaccgccaagccctcacactcatggctgatctaatttaccctttcttacacagtagagcacccgcgagtcaagcccagcaagaactgtaaataacaaaatatgcaatatattatcaatacaaataaatacggatgccaccgcatctgttgtttatttagcatagacctacgtgttgcgctaacacgtctatttacaataagaccttagattagtttatctcaattctgattatcgagtctaacctaattatgccttacccacataattctttatctcacatatatagcatagtattgcattcaaaattatttaaacactagagtaataaccctagatcgtataaccgctcactttagggtaataactttaatttcgatttctcacttaatcacaacataatatcaaacatgagcaccacaacgcttaactctacgtgctaattactgtcttacttggtatcccaagtatgtggagattctaaatcctcaagtgttcctgagtaagcgacggtagtcctagtcacacaattttaggatttcacaaataagattaatcccgaaattcaacttcataatttacattctaatcacagataagcgtatagagcgcaaaacgagctttccaacgatatcaagaacgtcccaaatagagtcccgagtcaaaagttatgccgaaaacaaaaacccaaaaattcttagggaaacacaaagcctcaccgcggcgagtaaggccatggccgcggcgagcagctacaggtttctctcgccgcggcgaacccaaaaattaccatttttcacaacttcaaatttttatcccaaaattttaccaaatcaaatccaaccatcccaatcatgcataaactcaagttcaaaactaaaacaaggtatccaatattaacatcaatttcaaacccaaaacaaaacttaaattcatcaatatacatacaccacaaagcatgaaacacaaattactctattacacctaattcaaaacttgaacttcaaagccttcactccttcaaacaaaccccagaaattcataatcaaatccatattttcaaccctaaaatcatacaaagcactcaagatgcaatccatatacctcaaaattacaacaacatgcatcattaattcaagaacatcatgaacaagttcttgaagctttaattaccagaaattaaacataacagaagaaaaattagaagcttaccacaattacttaagcttcaagcaatgattcacaccaaattcactccaattcaagaatcaaatttcaaaattggttaaaattaaaaaagatgagaaagagagagggagaggatcggctagggctaagaacaaaccagaaaataggttttctaatttccaaattttgtttttgttgaaaatgtaatagttggtcaaatgatcaaaatgcccctagggccaaatataaacataaccttataatcaagggtattatagtcattccaatcacatacacataacatgttaattcatatttttcccatttattatataataccaaaattaaattccaaaaatgtatcttgggccctgaacccgcttcagtccaaaatactcggttgtgactataccgcgctgacttgtcagaaaatacctacagatagatagaatgaacatactatataataatatagtctataagcacgatataacattaaattacgattttacccttctagggtcaaatttacgaaaatgtccctagtacaccaacaaggttttaaaatacaatttatcaatatagtttcatatattaaattatataataatatatttcctaattaatacatatttaatctagttataaatgctaattcagtctcataaaccttaaagtacaattatccctccttataaaaatttcgtcctgaaatttacctgaataactctgaatatttctgttgcatatccgtctcgagtttccaggttgcctcttctactttactgttcctccataacactttgatcagtgcaattgtcttgttccacaagactttttctcttctgtctaacacttgcactggttgttcttcgtataaaagatttggctgaagttccaatacttcataactcagaatatgagacgaatctgagacatatttctgaagcattgaaacatgaaacacattatgtccagctgccagc

SEQ ID NO: 14286 - DNA, 18755 bp, Cannabis sativa
  modified_base (18702)..(18710): a, c, t, g, unknown or other
catgccaaattatgtaattacctccaattacacacaaatccaattacattgtgtctttccaaacgcacccttaataattaatttttttttctatgtaaaaaaaccgatcttgggcaaaaaatttgttgaaattaaatcaaattttttgtcaaagaaaaaaaagtaaaatctattattattatgaagaataacaagaacaacaatgagtgccataatggacatgtaaaacggatggttaaaagtttcaattctctccgtacaagacgttacctttgcgctgtcgtactgtaattccccgtactgctccgtgcgtatggcccagggtagtggcctgctgccctcaagcattgtacaaaatgctttagggttttataccctgtcacaaaaggggaataaggaaaggtattttttactgaatccttctgcgccgtattgctggttttccccttctgtgcactggttttcttctgtgactttccaggttttcccaatctccttgctctgtttttcaaaggatacttgcttcttctacgtagttatggctggccctagtcttcaagcggtggaagagctgatagaggaaacgaaaaatttttgctttgatgatttttccattcaagttgaacccgataatgatgttgctcgtgatactgtggcgaggacggtggtgggccagttttttgccaaacgcggggtctctttgggtactctgcgacgggctctgtccgggatgtggaggctctcaccggggtggcgtctgcaggagccatcgccaaagatctttgtttgccgattgaatagcccgagggaggccaagtcggttctggaaaatgggccttggagtccgtgtggtggtttcctgttggtgacggccctgcccgaagatggagattggaggtctgccaatcttgagtctctagatatatgggttaaggcctttggggtgcctatgccgtttatgacggacgcctgcattgctaacatggcttctcgtatggggtccctcatccaatccaacaaagttcgacgaaatgggatcattgcgaatgactttttacgattccaggttagactcaatattaaagtttcgattcttgctggggtctctctaactgatgataggaagaagaaatggtggtgccatctcaaatatgaatgtctcccggtgttttgtttcaaatgcagagttattggccatgaggaagaagcttgcacgggtcggaaaagaacggtgacagttcaagatggacgtacagtcccgctttatggcccttggctcagagatggatcaaagttagagaacggatttgcgcttcttgaggttgatgatattagcgacattcggagattggaaaaatccgattgtattgcgccggggtgggtgaggctaatggtggtcctattgaggtggggtccggtagtcgctccggggcagtgattccctcttctcctgttgccgtgactagagtggagcaattgggtatggaaggtgtagttacccagaactccaaacaggccttttctgtagcttataatgactatgttgatctctccaaattccccaccaatcatgtgctacatgttgctaatatcttcaaggagaaattgggccctattaaatttggtgcgatgcgtgaaaatgaggaggagccgcggatcaatcctctgccgattcagaagctcaaaaaacccaagcttgttaggccaagaggtattcctaaaccccctatgtttggtcgtaattttgacccgaataagttaagtggttccaagaggaagaagagtgttggtaagagcactcggcggagtgagtttgtggcggaaagccagggagggtgttgcatccaggtggttgataagacaggcatccctgaggtctttggggaggttagtggggtgaaccagagccttggtgtctcgaatggatcggaaggcgaggattcagggaagaggcatcgtattgatatggagtgtttgcgatctaaggaaggatcgtttggcttgaatttggagaatgtttgtcaacctatggatgagttcaccccgggtgacaaaatttaatttggttcgggtttccaaccgggtttggcaactgtgtctgctccggctttcttggcggccacggagatggaagcatagtcggttaaatatgatgtgagagctcctaggaagggtcttgcacaagaagttctgaagggttctactcaggatttttctatggccgaggaggcgggtcgtatcatgccccccaacgcctcatgaagctcctctcgtggaattgccgaggattgggaaatccccgggcaaaaaaagctctccggaaccttatccgcgatcaggatccggatgtgctttttctaatggaaactaagttggttcataggcgtatggatggtgtttggcgccggttaggctttgctggtggggttgttgttggctcgagtggagctgctggcgggttgtgcctttgttggaaagagggcattgagattgaggttgtttcgtcgactccttcaaccatcactgctcgcttctcgagggttcttaatggcccggtttggacctgcttttgtgtttatgcccccccttaccgcggggagagggtgaccttttgggagaatctttcaattgaagtggccgcggttgttgagccgtgggttgtggtgggggatctgaacctgattcttgatcaagccgagaaggttggaggctcccctccggcgagatctgattgtcaaatctttagggatttcctggatgtgtctggaggcgtggatcttggcagtgtgggaggattctatacttggtctaatggtcgagactttagccatcttattcgggaaaggttggatagagtggttggtgattcttcctggatcgtggcttatcctaaggcgggagttagatccttggccatcaaagattctgatcatgcccctattgttttggatctccttttagatcgtgagcgcttttctactcctttccgattcttagatgcctggacccgtgaccctggttgtagggaagtgatccgccaggcttgggagattgaggtcaggggttttaagagcttccaacttgtgactagactcgcggagtctaggagacgtcttgctaaatggaacagggaagtctttggtttctgtaaggaaaaacttgctctgttggataaattgctgattgaggttcaggggcggccaccctcccccgatagcctgaagattgaggctgatatccttcttgagatggaggagataaataagagagaccaggagatttgaaagcagaaatcccgtaagttatggttgaaggatggggatcggaattctagatttttccatgcctctactatcatccggcgcaaacgcaactttgtgggagcggtctctgataatggctcggatcgggtgacaggacgggccaatgtgggaaattacttttgtaataagttctctgaagtgttcacctccggtaatcccagcttggagaatgaggtttttgattgtatctctcgggttgtgtctcatgaggataatgtggacttgatgagggttcctactgtggaggagatcaaagcggttgtctggtccttgggtcagttgaaagctcctggtccggatgggatgccgggtcgcttctacagagcccactgggatattgtgagtggcgatgtcattgggtcggttacccaatttttccagacaggggagttcgttaggactcttaatcagacttttattgtgctcatcccgaagcgcggtaatgcccagagtttcgatgattttcgtctgattagcttgtgtaacttctcctataaaatcatctccaaacttctagccaaccgtcttaagaagttgttgtctcgccttatttcccctttccagtcggcttttgtcccagggaggtggattgcggagaatggtatcattgctcatgaggttatggactctttcaaaaagatgaagggctgtagggggtttgttggtttgaaactggatatgtctaaggcttatgatcggatggaatggagctttttggacaaggccatggcttcttttggctttgatgtcgggtttcggaggttggtggcgaagtgtgtctcctctgtggccttctctgttcttttaaatggcggcccgcttaagcagatctttccggaacggggtctcaggcagggagaccccttgtccccctatctttttatactctgtagtgaggtgctctctcggttgctcctaaattcggaacatcggggcttgatcaagggcttctctcactcgaggaatgggcttcccatttcccaccttatgtatgccgatgacaccttcattttctgtgaagctaataaggagaatgtgttggaggtccagcggtgccttgaagtgtattgtaggaactcaggtcagagaatcaattcgaacaagtctgctattgttttttcggacaacgtgggtgcggaccttagaagtgaaatcaaggggatgctggggtatagagatttaaatcgaagtgacaaattccttggaaacccgatccttttttctggtagcaaagttagggacttcgggttcattgttgacaagatggctcggaggatcgaggggtggaaatctaaacttctttctctcgcgggtcgcactacgttgatacaatctatggccttgagcatcccaacttatactatgtccaccttcgtagtccctaaatccatttgtcattctttggatagaatggtgcgccgcttttggtggaaggggtcggatgattcgacccggttcatggctttggctaattgggatactatttgtgttccaaaacggtggggcggtcttaacttcaagaagtttgaggaatttaacttcgcccttgtgactaaacttggatggcaccttgctgctggtactgattccccgtggtgccagtttttcaaggataagtattttcggcgattgaactccttctggagtgtccctaagtccaagtcttggtcgtttggggctaaaagcatcatgtccactagggagttcattcggaatgagacttgctttgtggtggggaatggagcttcggtggacatttgccactctccttggctgcctggacacaattgggagagctatgtagctgccttcaatccaagagtttgtgagaaaggagttatggtcaattccttggttatcccaggacggggtgattggaactttgaggcccttgagagttggtttattccaagtatggtgaaggatgttattgctgtccctcggctcaccatggatgctaatgatgaactattctggaagtcatctccggatggctccttttcggttaaaaaggcatatttggcttgcatccgtgacaggtgtcttattgaggagagaatgtggagtactctttggaaagataaggggcatgagaggattaagattttcctttggcgtcttgctagggacattttaccgtttgggagtaggatccaacgcatcttcggcaataactctcactgtgtgctctgtaattcaggtgacgattcaccaactcaccttttctttcattgtgatattgctgtccaggtttggcgctccggcccttggggttttcgatcggattctatggtgttttttgacactctggacatgactaagtggctactaaaaccatatggtaccccccttgttgatagtgaccttgccttgttctctaagtatgcgatctctctttgttatattctttggaggactagaaatacttccttccatgagggagtgcggcctgtggtggctaacatccagcaggcgatctccttgttggtggaggattggcctaatgaggagacttctgtggtgattcggcatgaggagcacaattccagtttgggggagttcttaagggagatacctcggagtgatgtctatgtctttgtggatgcggctgttcggggtgaattagggattgctgctgtcatagtctgtgatctttcgggtcaggtactcgaggcagccacggttaagaggagagtgtcgtctccgtttgaggcagagcttgcggcaattcacttgggctgctgcagaattctgcagaattcttggccgagggtgactattctgtctgactgcaagacggcggtgcagggactttcttctggccagtcgccggagtggagggttagagggcttttcgatgacacctttctccttctcagccagatgccgaaccaccacctgtgctggattcctcggagttggaactcgggtgcgcactccttagcagcctgggctgcctctgcctgttgttttaggcagttttcttcaagggaagtgggaactttggcttttaggcctctttggttttaaataaagtttctgttattaaaaaaaaaaaaaaaaaaacaatgagtgccataagaacaagtagctaggaatttttgaagggattattggcttcattttttggacacaaaaataataaaaaagaattattggtgaagttgcacttgaatggacagtctaacagtagttcacatagtggacaaatttctaatttcaattagtatgctaaatgtgttttaatggttttaattagaccaacactcaggtaaacaaataaaaagatccacacaaaaaatttccacgagctcatatgctgtttcataatctttatatgaactcattattattttctatgtgcaacaactatttagataacaaatcctataattacaactcccctcaatttttttttttttaaaaaaaaatcctataattacaacttattaccaaatttgactcaccatgattttgacccataatgacaaaaataaaaataaaacttacttaaaaagaaaaagacaaaattaacataaataaatgaaaaaataatatagaaaaaaaaagtttattaatataggtgaaatccaacaaaaaaaaaaaaccaagatatttatgtaaactaacaataaataagcttccaaaaactgtataactaaagggattcactgactactagggacaactctatttaaattgtcttattttacgtacattatatgagtacaattaagttccaattcatccaattatttcttttatcatctttttttctttttgttatgaaatggcttaaataccataaagggaaataactatttccattgatgcatatacattacaaagcttccaaatttttcccatatattaatacagatactgagatatattcttgttctaggagaaaaatatttacatgtttttatttttccagctataatattttttggaaaaaaaaaataagttaactaaataagggcgttaggtataaaaaaaaatattaaagaaaaaatgtaggccagtatccaatatatttttcacttttactataaagggagttcaactaatttcaatttttttgtttaatttgaaattagttgaattacctttagatactaatttcaaaagaattgataactgattttattttcattaaattaaataaaatttaaatagagttttttcggctaaattctttcaattattaatttacttacacttaactctctaagttcaaattttgataggaaaaaccttcaaagtacttaactgcttacaaattacggtcatatcaatatagactgcttacgtacacttttgtacatgtgtcaaatttattgatacacttaatattattattttaaaaatataaaaattatttcaaaatttataataattttattttttttaaatatttgatttaattttaatataaatttttaaaattatttttaaataataatattaagtatacacataagtagtccataatgagttaaactaagaacaccttaaatttactactaattcaataatttaaaagattttactttaaaatttaaacttaaaaaaattaaatactagtaaaactacagttaaaaaaaatttgctaaaaaaagactatattaatattatcatttgaaagttatacggtgataataaacatgttattattctctgacatttttctttgtcagcaatctgtccaatctaatctattctccaaaccaaagtgataaaaaaagttaaaaaacaaaaaatttctcttgtaaggtcattcagtttcaaaattcatgaaacaattttattactgcaggggttaattttattttccaattttaaaaagaaaattaaatcaggtagcggtgaaaatccgtgaaaatttaataattaataataatgaaataaagaaaagggagtttggcgttgagttttttttttttttttgtgagtgtcggtctggcgggtatggaggagagaagagcggtgggggtagagagagaaagagagtgtgggacccgtgtgtaatcagatgagagagaaagagagaaagtagagagagaaaacttcaacatcacgacagaaagaaggggaaaaaaatggaggagagagagagagagagagagtagtaaaagccagctagcaatgaaggaggagcctcacctaccattaccatcactactctctcttcttcctttttagcctttcttcttctcttctatcttctttcaaaccattccctctctcttctgcaactccaccacacctctctctctctctctctttctcattctctataatttgagttgctcactcacactagacaatttagttagggttcttagctacaacttacagcacactatacttacattcgtttcgcgcgggaattacatacgattgtgttgttagtaccaagccattttgaattacaggtttggctcttgattttgccttgaacttgttttgtttttgagtgtcggcaaacacacaaacgaagccattcattgtctaatttgaccacattttgaatttgaggaacagtattttgtactttgtacgtacaaattagcctactccattttcaatttagtaattcaatttcctttctgctcacttaattgttctcaattttgcttagttcttagctgaatattccaagttcaactttcacaagataatcttcaaaactcaatttatttctcaaagaataaaaatgagaagttgtaatacgtggtaattggaaccagctaagcggtagaatgggccaaacgtgttttttgcagttccattaaattattttctctcattttttttttcttacgtaatttagtgagttaagaaagtttttgaaatattctttccaagagaaattagagtgtgaaatatatagtaattcctttcttaaattagtgctaacatgcgccacacggtctgcttcccaatttgcccatattcgttttaattttcgtctctcactataaattcgaccccattataaagaatttttctcctcattttccttgtttctgaatattttttttttattttctcaggaaaatttcttatttcgagaaaatgatcggaccaaacttcatggacgagattgactgcggaagcttcttcgaccacatcgacgaccttcttgatttcccaagcgatgacgtcgacgccggcttgggtccaagcaccgacaacaaatcgttcccaagcatttggtcaactcaatcgaactcgctccccggttccgactcggttttctccggcaatagtgcttctgacctctccgccgagctctctgttccggtgagtattagtcagtagttccccctcacatggttttcatcagtttcccgttaattccgtgtttggcttaacaaacttttagtaattttttttttgtaaatgacgtcataacctgtaattacggcgtcgttttcaaatttccgattaatacaaaattaagccaggctggcaacccatgaaatcttcatgcccattgcccactgatgtcaacatcgttgtgtctctaatttggtggttttgtttgtttttctttttcaaattttggcttcatgtctaaatcaaaatgagtttaaatttcgaaatcggtcccttttggttaggggtacctttaggtaatttcactctcttcgtctagaagggtgctttctgtaaaatcacagtgcgttatcaatgtcggtggataacttgttgaataattgctccattaatggatgtcatgtgagtttgtcatgtgatagtttgaaagtgaattatggcgctctgtgcttttttttattattcttacctggctgtcctttactttgccccccttttttatattttatttaacttttatgaattaatacaatcatttttttttattaaatttcaatgttacattattattagaagaaggtatgaatggattgacaattgagtcataactgataattttttattttttggttataatttcagtatgaagacattgtccaattggaatggctttccacatttgtggaggactcattttctggtggaagtctcactatgaacaaagaagactcgtccactttaaacaaggactcatctcgccaacagttccaaacttctagcccggtttcagttctcgaaagtagctcttcttgctgcggtgataagagtggacctcgtagccccgaagccaccacccctggagggcggcgtggacgtgctcgcagcaagcgtcctcggccagccacattcaatccccgccccgccattcaactgatttcgccaacatcctctgtgattgacaccccgcagccatttgttggccttaagagctcatcagattctgagaatttcgctgagtctcgcccaatgattaagattcctagacaaattccagtggatcaaaagaagaaaaagaagatcagactaactttccctgcaccccctactgagatgaatcaaaatccaactttgcaagcagcagttaggaagtgtatgcattgtgaaatcactaagacacctcagtggagagcagggcctatggggccgaaaaccctttgcaacgcttgtggtgttcgctacaaatcaggccggctctacccggaatacaggcctgcagctagcccaacattcattccatcattgcattccaattcccacaagaaagttcttgagatgagaaacaagggtggtgagctgatagctgtgtctggaactgcgaatgcgatgactttgaacgaggccaccacaccagaacttattccaaatacaaatagcagcatttccctggattatatgtgaggaacaactagggaaggagttgttttcccagtttgggaaaatggtttctttactggccttccctattagttcctctattatgttatatccgcttactgtttatttcatttctttgttcattggttttttgtacagggatggaatgggggggttggcaaataggagcaaacatagatgaccatatatttttagctagtagagaaggaaggattgtaatgagagaactgaaaaggaagaagatatggtagaaaaaaggaatatgcaagtttaagagagtagagagtttaggtttagtttgatgattagtaaagtcctcgaggttatattaggtttgttaagctctattctgtgtttgtctctctctttttttctttctttctttgtattcttttctcgtgcacttccttttgtaagggaattctttttgcagttcatttgtagtagcaaaaattctgagacgagtaatggaatttgaaatttgttatacttcttttcttaattattttatttattttctcaagaaatgaggtagtattcttcttttttactttaccttgtttataaattgtaatagtaagtactagttgtatgtacccaatcgtattaatgggacagattttgtcagtagtgtctctttcagatgaaaagcttgtcttacttgcattatagattggcttagtagttcagtacaccttttgctgctttacaaagcaagcttgtataaagctcctctccaaagtaaaggtacgttccctaaataataaaagctattgggtgaatcacaatcatgcttatcatctagaacaaataacacactcttatcatttttttaaagtgatattgtgggcaaaattacataaaattttatgattgtaacactttaactctataaatttattttttgagggtaaaatttattctgttttggcatttatacttctatttaaaaaaattgttaagtgtcaaagtgaattgtctaagtgtactcaaatgtaaactgacaaatttttagttgaaaatgaacaagaaagttggagcttagcttgaaatcaatgtcaacaaaaatgtgttctttattgactttcaacacattacaatcagagttttgaactcaattatactcatcaatggtgtacaacactagttacaataattcctcacagtggggagtctggatcagatacaccagaaacccatttgcatccctccttcacacactaactgtctagaactgagtacaactcgagagaactaaatagtagagagagctcttctaggtgttgaagttgtcttaagtgtagggttgttatgtctatttatagttattggcaattgaggtagttggacataattaaaagccaactaacttaattgcctatcgagtacaaaggaaatagacagatgtactagatcgatgttgcagcattcggctagtggctagtttagtgagctaattcccatcatgtaaaccagtcatgcatggatgattcaagactcaacaatcttgaatgctcaataggttcaggatgtcatgaaacttgtctctgcaaacacgcttagtgaacatgtctgcagggttgtcatgggtgcatattttcctcacttgaacctgtttttgagagtactacatctcgaatgaaatgtaggtttatatcactttgttttgacttttcatgaaacataggatttttcatgagatacaaagtactttgattattacaatggacaattatgtcttctgaattaaatcccaactcactggtcaaacactttatagccatagtgtatccttgatggctttagttgtagccatatactcagcctctatagaggaaaaggccacaactttctataggttggatttccaactgacacaccatcctaaattgaaaaaacataccatgtacatctccttcttgtgtcaatgttggtagcaaaaattaatgaacaaagcctgtaacttcttctttgtattgacttctattgttgaatatcagaccaatgtttaaagttcctttgatacacctcatgatccacttcagggcttctcaatactcagatcctagatctaagatatatctactaagcacatggcatgaactagatcaggtctagtgcatagcatttagtacatgaagcttcccacacaacttgcataaggtattttactcatcttgtacctctctgcaccagtggttggggactggtatgcaatgagcttgaaatgttgtgcaagaggggtggagattccttacatttgttcatgccaaattcgcacaacaacacctataagcaacttttttgagacaatgttattgtgtttggtccaggccttttgattttaatgccaaaaattctcttagtagcccctaggtctttcatttcaaactcattattgagttttgcctttatctcatctattttttatctttcttttccaatgagaaaagtatcatctacatacaacaacaagtagatatgattgttgaaataaatacatgaatcatacatacttttgttgaagccaattttcatcatatgagagtcaaatctcaaggtctattaccttggagcttgcttgaggccatacaatgacttcttgagtaggcacacctcatatggattttcactttcaaaccctaaagtagtttcatgtacaccttctcttctagttccccatgtaagaagactgttcttacatctatttggccaatttccaaatcaaactttgcaaccttggccatcgttgccttgattaaagtttgcttgaccactggtgaaaatatttcattgaaatctacatttctttcagtgtgaatcccttaaaaactagtctttccttatacctagctttctcaattctaagaattcattccttctctctgaatatacacttgcaggctattagtttcagtccatctagtctcttgaccatgatccatgtcttattctccaacagggacaacttccattcttctattgcttacatccatgttacagcatctttcccattgattgcctcttgatagctcaagggttctgagctatcaacctctttagcagcagttagtgcataggcaatgaaatcaccatagccaaatctactaagtggccttctttctctcctttgtccgtctcttgctagttggcaactactaaggtcatcctgattaccttcatctttattatttcttcataatcttctagaattttagggttcccaagtccacgacaattctaatttaaagtactcataataattggcgggttcgagcaccaaagcccacctgcttcttgttttctaaatctctctcattatcatggttcattaagtccatactcaccattggcccatcacttatcactgaacctaattttcttttattattttccaagaatatagtgcctccttttgtcacactattactgattctaaggtttttcattggatagcatctaatgtttttaggcctatccacatttgatccaattatatattgcatgttaaattttaccatctgatctgatctaattaatttcaataattcaatcgatccaacatccattggatgttggattggatcagttctattcaatggatgtatttcatgtgttgacctcgcttttagtcaacgtcaatgagtcaattaataagcgattaagagtgtaattaaaatagagcaaaaacaacaaagtaataaagaacaccagattttaaagaggttcggccccgtgagtgtggtaatagcctactcccctagattgtattaactcgagagaaagaatgaagtgtttttctctctaaaagctcttacaatgaatctccgagtaattctcttagatctctctttctgaagcaattctttcgatccctttcatagtgaggctaagtcactatttatagggccttaatgcatgagggaatgtttcccttttgcatacaatatataaaatagataaatacatttattgcataattatgattcacgaaataggaaactggaacaggttgctatatctctctgattcaatctcacgattgtagggattgccttcgtgtctggacttcagaggatcattctgaaataattatctcctgataagtagtttggcaagccaaatttatacctgcccggataatttttcttttatcctgctcgggtaatcgaaggttctacatgctgacatacaatatggagtctattcagaacattcaattccgcccagatacaagaaatgcaggagacgtgtcacttgagtattagttcaccgcagttggcttcttaactttaggaataagaaccacatttgtcttattaaatggcctaatggactggccctcattcaatattgcaagacaaatagttgttacctgaggacccataatatcccaataatgctggaaaaatatatattgcatgaaacccatcagaacccggagcccgagtagctccaatagccttaacagtgacgtggatattatcttcagtaaaggacgagagcaaaagctcattatcagctgcggaaattctatgttcaatgctcataatccccgcctgaatctgactgaaagaaggcctattggattaaaaaatattggtaaaataattctcaatttccctcacaatatcttcctcaaccaccaccttcctaccatcaacagtaacaagctttgaaattttatttatttttctacccgaagccttgttatgaaaatacctcgtattacgatcgcccaaagccagccaatctgctcgagaacgatgtctccaatgacattcttctctagacagcaggtcggccaactttatttcaagttgcttaactttatccatttgcaccataggcgcatccacactcaataaattatcaagctccttttgcgactcacgtacagatttgggaattgatcaaaacttattcttactccacctacccaattccttgacacacaattgaagttgaaggcttttcaccataccatcctggcactccaatggtgcatcacaagagaaccacaccttggaaataatgtcactacacttctcatcccacaaccaatgttgttcaaaccgaaactctttttttttttttttactatcttctaatctccgatccaccacttcaagcaaccaccaccagacgatgatcaaaacctgtaaaatcaccgttaatcattttcacagtaagaaataactcctttcgtgcaatattactaacaaagtggtccagtctctcttggatatgggcaacaccacgccgtttattaaaccacgtgaacttatgtccttcaaaaccaagatcgacgagcgagcatacatccagagcttgttgaaacgcatttatagccaaaatactatgggcccccctccctcttttcactcatctgaagaatttcattaaaatcatcaccacaaattcaaagcgcaaagtaaacatatcctcatgactaattctattacaagttaaagttttttttaagccatcagttcaaatttgcgcaatacaaaatggaggttgtctgaatgttgatgtaattagatagttcttacattttaaaaatttgcaagtaaagggacacatatagagtttaaataaatatatgtatatgcatatagttcgaggcatatggggggcaaaacatagggtcttagttggcacaatctgtacctaatgtaatgtccacaaaaatcaaatctcatcacgtgttgtatcatcaattgaattatcttcatccctacttcttccaaatttataacactacttcagagtatcttaattgaacctaacatggttctttccaagtccctccaacacacaaaatagtccaatccagtatactaaatacttaattacccatcttaattttgacccaatatttaaatactctaacatgtttaccaagaatttaaggattaattagtgttttcttactatagtattataagtttgttgttagaaacatttttttagtcattattccatctcagtgtctttcggaatacaagattagataaaaacaatggttttatttgaaaacatgctttgacatgtatatattatacagaaaaaagaagaaaaaaagagagagaatatattataataaacaaatggattgggagcttgagtcattattagttatggttaacaaaagctaatcaagagagcttcacatgccacctgacaaaaaataaaataaaataaaatagagaaatgctaaaggtcaccaatgatgctgttatcaatattgctattggtccaactaagtatcgggtctcatatagtttagtataatagctcttagatagtatcgctagctaatcgcaacggaacatgtcgagaagatagtaggcaccactagagtctaatggcaatgctgataagtactttgcatgctcaattttttatttatatttcattataatgtggcattgtatatttttgggctaagcattttgtaaaaagaagggtacccaaattggcatagttgaacctgacccaactctaattgaagaatttattaaaaagttggtggtgttagaattttacgttcattatttcatgaaacagtcctaattgtggctacgattgtgccaaaaaactttggccacacgtctcaatctgtgaccaaacgtaaccaagtgaaagaaaaatggcaactttattataaaagaaaacaattaatgaaaataaatatgtgaattaaatgggcacataataccaaataatcattcattctagttgatttactttcattttcttacgtctcacttggacttcgaatcatatgatatgataccatctcaaagacatgtttttaagttatgtttgattatgatcatttccttgaaagtgactttaaaatcaaagtttaatcaaatataattaatttctacttttttttttgtttaaaaagaaaaataaaaatggaaagaaaaggcaatatgattgggaatgatgtctatttcaccattgcttgaaaagcctgctcaacctaaattcataatatgcttgaatttagcaaacactttgtgtatctgttgggattacaatctaatttagcaagtttttatggcattttttgccctttagtttagcaaaatgagttaaacaaattatgatagacccaagaaaaaagaaattaaggacaaaaaataatacatattatacatgtttatgctatataattatacattttcaacgacaattaaattggaatgggtaagaagagttaaaaattaggggatttttcaattctatacataatttttgattttgtttacaaaaatactttcaaaaattttattcacacaaataccgattgttacgtcaaaatatataccaaatttcaatataattcctactgaaaataaaaaaaactaagaaaattctgtttctcaaatttttttcgtttttctaagttttaaaacacataattacattaactttattttaaaataattttatctcatacatatttagttacttaattgattacttaattttgaaaatcatgatttattttttagatttttaagctatagtatgttatttttaggaaattacactctatacnnnnnnnnnattgtcctcttttatttttactctcttttttaaagtctattattt

SEQ ID NO: 14287 - DNA, 5297 bp, Cannabis sativa
  modified_base (26)..(36): a, c, t, g, unknown or other
aaccatgcaatattaaatgttatttnnnnnnnnnnntaataagtaaatctgattatattggaatgagttttatttaggacataaaacccaacagtatgggtcatcatacaaacaataacattctcatttgctggatttgtgcccaaggtattcataggatgctcattttctcctattataggaatgccaagtgtcggtccagctgtccctcctccaaaggaatatttcgaattttttgtacctgtatccttcgtaccaatcgtacaatcgcctgctgcgttcgtggtagtggccgcaacgttcactcctgtaccatgcaattcactgggcccctcaccaaccgcttggacctgcgaagttccctgaatatttgccgtccgattattcccgtcctggagaagagcaggcccggtatcaaaacaattttgaataggaacattgaccttgatccatggaccatacaaaggaaccgcctttcctatgggagggaaagcataagcacgttccctagggcagacactcgaatcatgggcaagatgaccgcagttaaaacagattttaggcagtttctgatacttgaactgtatccatttttttcttcctctagttatactcaggtaaaaccctgccgggagacgttggtctatctgaatatccacctaagccacgtctagtaatagtgcagttatcaactccatccgattctagaaactcgccaaccttagcacctatcacgctagagttttggaaagcaagatagggagtagggaagccatgaatctccacccagaatacagacttgttcatcggaacaccataccagttcccgtccagaggccactccctgatattcagaagttgcccggcaataatccagggtcggcggtttagaacctcttccttatcttccagcttatcaaagaagaaaccccatgtgcctttctccagagttttcattctccatttacctttcagagtccacacccccgtaagaatctgtttgactcttcctttggataaaggacgagagcctaggatcttggccaagaccccggtctttgcaacctcagtgttaatttcgaaattggcctcaagctccagagaggcttcttctatgaactgtaaatggagttcctccatgtttccttcagtaatctgttcagaactagtatcgtccatggtagaatagttatcgaaaaacgccagactcacgacctaacaaaaccaaaaaagagatatacaatctcaaagttgggcagccaacatctcattcaaggagaaaattcgtctcgtcacacaactttgattggctttagtttgattgtgtttattgaatgctattactgcagtaacaattgtgttttcagggtattttttcaacacatactctttcagcaatagaagaggatgaaaattaagagccaataaattgtatataagaagagatgatgtccaaattgattgcaataataattttggatataggccaaaatcataacttataaattactcatatcaaaaaacaatttaaccaactaaaatttaatttgttgtatcaatttgatcagttttgcaaaatataaagttcaaattattatttaataaacatggaaccaaattgaaattttcccttacaaatctcacaccatagaaagatgataaagagaaacattatattattgaaatactacacagactcaaataccatatgacatcaaagattgatgtcatttattttttggtgacaataatcttaagttaaatattagacaaagctttatgttgcaatattcaataagagtgccatgtcatttttcacttctgcaactttggacacataacgatcactataatcttcattttgcagttgtattttaggaaaacttccatttttagaattctgaattgctttcgaaagatttttccatttattctcatagcttataatatcacttttagggaaaaatccggcttcaaagcctttccattctattttttgttgaatatacttagatctcgcagcctccgcaaccatttggataacaacaataagaatttgacaaagctcgttcgtaggattctcgctatcaaatcttttaaatccttcgagggaattgtctaacgacttaaatcccaaattgacattttctctctttcctaattcattataatttgtactgagattaacattgactcttttagtactttttttgaaaagtgaagttttcgcttcgggaggagcttctttaaagaagtagcaacgcttttcagcgtctacttgataggcaattacataagagttgagagtggatattgcaaatgtgattttgaaactttggttttcaagtctcacatagacgaattgtttgtctttgaccgcttctgattctttacgcaataagggtatgtcatagctcgtggttccgctagacaattctcttcgtagagattgcatgaatgtttggtatgatcccacactcacatcattgaatttagtgttgaaaactacagtgctgtagcttgcttgcatttttcaaaacctataacaaaaatgatttcaaaaattaacatcacttttttcaattctttgggcaaaacctagaggaattgccctaaagaaagattgaaagagaaagagtgagatcttgaattactagtcaacttgtgacttagaatttcacaccgttgatgtaattcaaggttgattatagtgtaaagagcaaggtgagctcatgtaactatatgattgtgtttggtctctttatttttctactttcattgttatgtttgtccatgtttgaattcctaatcttaacctgttttgaatgcaaattgatccctcgaagtttgatcaaatcatgattattacttgtttgattgtgaagatcaaccataattaaccttgatgatctaatgtgcatgttgagttggtgtagggattgaataaatgaatcccaacattatgtttcaacaattcagcctattatcataacactaaataatatactagtagtcattcaaaaaacaaataaataatatactagtaaccctaaatcaacaaatataacacaaaatatatatctatatatttatataaaaaagttgctatgtaagattgtaaaataaagaaaagaatggtatttcatacctaatttgacttgtttactttaatgccttggtcgatcaaagaacctgtaagcttacgtaattacattagcaaaggaaaaaaatcatgtgttatttttgtgtatatatatatataagatatcagatcattggtttaagcaatgaattacataacactatatatatatatatatatatatatatataaacttctttgataaaataaattgagtctcaaagtaagtcttatattataattcctttttcaataattctccatgaaaaagacttcaaatcaatcacacacagacaatattttatggtggtatcagataccattccaagtctttatctactttattatgaccactctcaattgcatatatgccaaatcaattcatgggattctatccaacaattccttatctagataaatatcacaatgttatcacaaagataattccaagttatatttggatcctttccttttatcctttaaaatcacaaaaaaattattctctattttatctcacacatttaggggtgtttgttttgactattgagttgcctaaagattttggaaaggttgggatagaaaggcatgtgaaactcaagttcacaaaagtattgatattagggcttttttatgtaataattccttgatatgatctattaaaattctatgggatccaccttattctcaccaaaaaactgaaattgaccatcaaactaactagactgtaaggtcggtttcagttttgtttttttttaacttggcggccggtttcggtttttaaacaaaaatggttaaatcagaaaattatcaaaactaccgaaaactgtcaaaaacagccaaaaaccaaaaactgcgaaaaactgaatagttaattttatacggtaataatctctaaatggttggttataaaattggtaaaactggccataactcaccgaatttcacccctagtgcacttcatattcttacttatcccaacacttcttacattatcatacatcaacttttactatatttttttggaattatctcatatactattttctaactttttttttaaaaatttataatttgaattgctctggtagtttttattaggacggtacataaacttttataaaccgcccaacctgaacaacccgcccaaactaaaccaagataatctgacgaaaaatacaaactgaaaaacccgaagaaaatataatccgctcaatctttatattgggcagaatgaaaataatatcaactcgcctaatcaatccgaactaacccgaccaacccgatttagagtatatatatatatgtttttattatatataatctatatataatataatatatatatatatatatatttataagaaatagaaagttcaaattactatattcttttatggtggttaatatttgaattttgaattcaatctatatatttatctcatcatcataattaattaaaatataataattgaatgcaaaaaaaaaatattagtgctcagtttgggcgggttaacccgaccaaaccgactaattcattggacggcttaaaattttattttttcttaattggtcaggttgcacttagatttttgtaactcgattgttacgttagtttgaataaaatgcaacgtaaaccgaccaatatacacccctaatatctatgtggattgctatgtgacttttgattgcaatttaggtcgctccgttggttgtatgtgaattgttatgtgaatttttgaagaaaaaaaatatatattttgaagtataaaaataaaaaaatattttttatattaagtttaaataaatatatttataatacacaaaacatattatatattatgtaatatttatttattacagagatacaagtaaacacaatatataaaaaaattatagctaaatactaaaacaaagaatttgtacatttaattaagcactatttatgaggtaaattttgaactatttaaactcatctatttgatatatttttttgatattttttttttactcttaacgatttttctttacttctacagctattttacattggttattgtgattgctcttaataaatattgttcacgttccctttcttaccagatcaactttctgatagtttttgaaaaccggttaatagttttaattttaatttttc

SEQ ID NO: 14288 - DNA, 2361 bp, Cannabis sativa
aaaaaaaaaaaaaaaagccaaacaaactcatttctacccaatgcaaccatgtaacgtctgaggaactaaaacatgtgcatgtactgtagcaacatacctcccatcctttagcaaacgatggtatgcactgagctgctctgaagtattatttttgctgtcaacgtccatgccatttaggtgaggcacaacttggaagttattctgagccaaatgtccttttcttataatccttgtatctcctctaccttttcccaagactttcttactataaagagatccttctttgtaatttgcaaaaggaatttttccttcatcattacctgtataaagaaaaccctttataaagtcagaaaaatgggaaaaccaaacttatgacaccaccccacaaagaatctccacggcattacctgttgtaatatggggaacctccatagatttttcagtaccctctgttctagaaattgtagaaaatgcattgctttccagagcagaagcatgtgaagacaacgttttgtgaccattaacgttcactttaaattttccgtctaatttgctttcattgtaaaacatgtgaagctcttctcttacggaatcaacaaggaaactagtgaaattaattgtttctccctctacactaggttctttcttttccagttcaggttcataaacttctacaagtgaatccttttcttgaacagaatcatttctaaactcagactctatttcctcttgtaacttctctatttgcaagccattcaacttctctgcaaagctaatatgttctagcatagctgattccgaaagcagaggtgaaagagactgatccaccactttagattcgtttataaatgttgaattattagagcccgaaacaaggacattggaagtaggcgactgcaatgcgttagtgataacagtctctttgttcatcatagcagcttggtgaaactgcaggggagcctcattacgaatggaagcgtgactattctctatgttctcatccttcaacaattgcttaacttccatttcacgaaattcacctaaatccatcatctcattctcaatgacatgatttatgccatgtcctcccaactgatgtaacgcgaaatttgcaggcctctgaacctattttcaatttcgagttgaaattttgtcaagaaagaaaaaactacataaggataaaattccatcatcttaaagcttactatttctaataactcaaccactaatttcctcaaaaaaaaaaaaaatacagataagaatcaaatgatgaccaattttcacctccgaacttgcccatgctcaattaacgcacaatttctcaatttaacaatatcttctactaaaatgacttaaatatatgtacaatctacacaggacgcatatatcttacataatattattcaaattgagtacaaacctctctggaattcttcttaggcctaaagagattccagtaaacaaaagaagcagcagagacagtaacgacggcgactacaacgaggacggagtgtgagccaagagcagctctgaaaaagaaccgggaggagtgagagtgagaccatgactttctatggcgtctacgatagcgaagaccacctggaggcctaagattatgggcacagccaaggaattctcttcggatggatcgagagcgaggtgaggaagaggaataagaagaagaagatagaggtgtgcatgagataagagtgagaatttgaggctttggtgagaagctcacatccatggaagaggaagaagaagaagaagaagagaagagatgttgggtttgaggctttgagcggttaaggatagggaagagaagaaaggaaggaaggaagaagaggttgttgagtgagtgactgaggaatgagtagagcaaaataacgttcttccttttaattgctttttgtttggttcttatgcttttctattctctgctcatccatttctctgcttacgtggcatcattcttctgttttcgactttcgatgagctattgtcacctttctttctttctttgtccttttccattcaggttggcccccatagtaactcaaacggcgccgttttaatttcatttgtcttaatgtattcatttttaactgtagaaattacaccatgtatagaaaaaatttaaaagttaattttttatggcataattaaaataaataatactttcggattatgatttttttttttttacattttttttgtgtgtatttttatacaatatttttgtaatgaaggttaagaataccatattttaaatttttgcattattttcttttatatcataataataaatttataaaatatatataaaaagggttaggatttttccaatgggatactaaaatc

SEQ ID NO: 14289 - DNA, 14215 bp, Cannabis sativa
  modified_base (126)..(130): a, c, t, g, unknown or other
gagagaagaagagagtggggaggcggtaatgtaaatgggggtattttagggatattctaaaatgtgtcatatcccacaaatattaaatgttatgtgttttaaaaaaaaatattaagtatatgtaannnnngaaaatcaaatttccctttcatataacctgtattcgattccttctactgtttctttcttttctactaccattttcagaaagcttcacaccattatcccaaactcaattgcaattttcccgaaaccaaagggtattttggcaaacttatctgccccaaaccaaaatcttccaactctatccacttccattatttatttttttaaaaaaaatactttgtctgggccttctagagactctggagtctggaccacgatctctttctttcttttctaaaaaaaaataaaaaaaaaaaccaatctgacattctttcccttttactaaaattaaatttaggacgaaaataccctccgttttgttctcaaataacggaagactccaactctggctttagattctacttctcacagtcaaagatcctcttccaactactgatgaagaagatgatcaactacgatttttctctctattaacaatttgattttctcttctcctttttccattttcatggaaagctaggtaacttgtttgaccgcgaagcaatggattttgccgaaggagttggggagagctcgtcgccgcccagaagcttcgggagtttcagtaactacgatgttcggaacgatgtgtttaatcgcttggtggagaacggtcatggcgcagctttgaccaatcctgagtttcgcgaacagttagatgctcatttcaatcgcttgcccgctaggtaaagttgtattagatttttggttgattactttctatttttgaatcattatttggtttttagttgaattttgctcggttttgatagtaaaaaaatcgcttttacagagatataggctcataaatgcatttagtttctgaatgtttgattaagcattttattgtttgtgaatattattttaaattatattaacttatcttcttgtttcatgaattagctacttttgctttcttaagtcggtagcttagctttatttattgatttactgttttatttatttttatatatatatattttcattattttacttgcttgatcgtaaagtcatacttctttattgttgtcttaattaatttttcgttttaaatttaatagaaacttggggttttaaaattagggattgaaaattgatatttcattatttaacactctattatgaagatgtttgtgctgagaagtagatgtagtagtttctaaactttttttttcttcacgaaattgtattaaattctttttcttccattttagttcaagaatatatcaatatatttatatttgcactaaaatagctatggatggtggaatattgagcttgtacccttgtactatttgatcactatgagaaatgtgttttttttttccaagtaaaaaaatcaaagtctagaaatgctattttcagtgaaccttttcttcttcgtaaagtatcaaacagtattggataaaacatgttgttcttatcttagtggaatcaaacttatacctttttctttatcccctctctctgtaccagttatggacttgatgttaacatagatagagtggaagatgttttattacatcaaaagcttcttgcattagctaaagacccagagaagcggcctgtatatcacattcgtttcttggaggtattacttatacttgatttaataattaattaatggttaggaatgttgagggtcttcttgtggatgcaaaaccagaaaaattattatcaagcaaatactgttcaactagatgggaattactttttatttaattatcataaaaccaaatgaaggagataggatttttcagaagtaaacaactctgtgtatagtaaatatggaaaacgcatatatatatgtatatatatttttttgcttaaggagagtattatgtgaacttagactgcatatgtagtcacatggagtcagacaatacagtatgacactctctaaatgacaaacctttatatgtttagaattgtaagagtaattaaaaaaataagaacgactaattttgtttgcttatgaaatccagattctggtatatagtgaaagctaatgtggtcataaaaaatattaacgtttgttagtgtccaaactcaggatgaagggagacatttagcctagcggcatttttgtactctgcttctgttctgctatgataaaggttcatctatggtttcttttgaagaagttggtcatattatattttagtcagaggaagatttttttccatgatgtctttgtattttcataagctctaaacattcttttgtttgttaaaagatcacccaagttttccttgtcatgtctttccatggatcaactgtgatgaaagttaccttttttttatcatatcaacaaacatataggttattctattctatatagatttttacaaacaagggatgggaagttttttttaataagagcttagggcacaataagatttaagaactcatgagatccactttattattcactagggattctatacccgtgaaagcactatggtagtgtttcatattgctttcggagcttccctgcagtaaaagaataaaaaaataattattcaaaaaaatcttcataaatttcttactttctacactattatatatgcttgttttaatttgttgcttgttatttggcatttttcttttttagaatatttctaggacagatgttaatggcaatcaagaccttccaagtatacttacaaccccaggacaatcaattaatggagctaatatagaagctctgtcacataagaggtattcacatggcctggccttcttttcatccatgttctttacttttttttttctttcttttgttaggatttcagcaagtgttgtttgtctgaggattgggaaagattatttgttttgtttggataatacccaacacattgtatacatataaatgaaaaaagataagatataatccatgtgtacagcctaagatgccagctattggctataactcacggaaagagttctacccttgtcagtattattgcttcttgatgcctttatttatgtattgtttctgaaactagaacaaggaaccacacaagtgactttgaaccttgctccaagctcgaggacctaaatttggatgttggagagaagaattccaaggacacggaggaacaatgtgcaaagaagatgctttccagaaggtagttttagcatttttatctgcatttcatgtgggttctcttttttattttgaatgatggtatgaacaaattgctgttcatttcctttatgcagtttgggttgaaatggtaaaaaacttggatgaatgtcattataatttatatctgacataaatatagcaatagatcttatttcacagtttcgtcactgtgtgaattgatttttcttatttttttcatacgtaagtgtccggtacatatttataaaaatgttccagtttgcagttacaaataagctagatgtgaatatttttgtttctgacaaccaaaacttatggaataaatcaattggcacactatcagcttcatccctcttgaagaaaccagaagaaatgttaatgtaaatatttcttgaatgattcgtgttatttttaactttttttttttttagaaaaaaatgttattttgaactttttggttaactgttgtttatagaaaattcatccaattgggagatatcagtttttgaagttaagtagacatgttttgtttttttaagtaaagatgcagtgaattcatatggtttaagttgtaattaatgttggcaacggtatttctttaggggataggtgtccatgccttttagttgttggtaatagtcttttactgtggtagtttatacgtagtgtacttctacagctgtgctgatatgactataaaaccctaaatttcgaagatctcttcttctcattttcaagaacccacatgtgatttagggagattcttgcctttccttgtttactcatttccagaacaagtatttcaagattttaattatgtatgcatataaaagtgacctttggctgtattattgagacattgctcttatcttcacaatcgatgcagaagataagttgaccagttcgcaatgtataatgcaggcaagaaagttttcctatttatatccacgaagtaatattctgcaccgttgataggcctaagcttcttagccaggtacacttcaaaagagtagtgtgtgtttactgaagagtttgtgttttaagtttgtagtgtgtgaattttacaactggtttcttcttactttctttcaactgattactttttccaagaactcagtctcctattcatctacattcgaatgattttggtctgggtttcagactttagtgtttgtttattttcctttgattaaattgaacttgattttcctcctcaaaaaagaaaataaaaaaatgttgaactcaattttggaactcctagaaaattaggaaaagaatctagagcattgatcctatttcagagttttctttgttcttaatgtggatcatactttggagttatcttttacttaaaaacactaatttgtcatctttagtgttgaatgaagcccctagtagttgtgcacacaaaaaactgtgtggatcttttcttaaatcgcataacattgttataatccttgtaatattgtttatagtgatgtcctaacattattttgaacacagtgccatgaacacaaatattttggatgcaagggcaacttaagaatcatttactttacatgaacttctacccaaacaaagatttgaacttaatgttttatgactattataaaatttgtttatatataaatatgtgcctaagaaaatttgatttctaatagactttcatttttctctagctctctactttactttctaatataggactcaacattcgtgaagcacatgtgttctcaacaaccgatggcttctccttggacgtgtttgtggtggatggatggcttgttgaggtactacttgactttatatttttaggataatctacactgagattatttacatgttattgctcctttcagttgatgattgcactaaataaatacttgctttaggagctactagacaagccttctccttcagttgtgctgctgttgtacatttttcgaacttaagatattacaacagtgtcttttgttaactatgttattgtgtgatcaacactttttatccagtattaattttgtgcttctggtaatctgtattacataaggagggacgtgttaggcttcttctagttattgcatttttcaagttggggctctagataatgaaaatttgcaatcataacaaaaaatgtcatgctggtttgtagtatgttacacaattgaaaatagtaagcaaactgcggtttgtctgagggcagtaatcttatgttatattaaggagcatttttattatatttctttcatgacagggatctgtgctgagtccaagtgttgcttactttgcaatgttgtggtcaggatacagatggtttgtatgaagctatggaaaaggcaattgccaaaaatgaggtaaactatctctcaatcctgttggatgtcatttcatggttgtggaatggtttatagtttatttttagctcttccaaagttcattgcatctcaaaatcttattgcccctctactgcaccttgtattgtggtattaaacatattaaatccagttataatgcccttatctatcttagaattttcttctgataaatatatattttacatcacacatcatacatcatacattggatattacttgtttttgcattccgtatcctagtttctgcttgtaattgttcagtagataaggaaattattgtaggggaatcctgtatattatcaaaatttgacagactaaatttttttagtatagaagtcctctactataagatgactgaaaaaagaaaggccatttcttttttctttcatttatcgtggtaaacaaaaggcaccaatttctgtaccggtttgagaagagcaaagagaaaggggtacccaaagattcatagtgaactttgatgggtgttatcaaatcacccctacacaattatgaaatggggaaaggttattcaaacaggaaaatgtgtcattagttaaaacttttaaactacattagtaaccaaataaatacaaagaacataaaaagagtatgtttttcttcatttgattcttttttttttcacactcattttgatttttttttaagtctcttaaaagtatatatttttcatagttacgactaataccttgtgtactttaggttgttgtttttaatttggcagcaaatatgtactttattattcttttgaaatggcagcaaatgtatactatagattgtaaagacttgttctttccatttttttttttttggtttaaatcttctataaaagtttttgctttaaacacgtttggtatgaggtttagacttgattggaatgggaatgtaaaatttaaattaattttgaatgacaagggtgttgtgtttccaagttggtcttacttttttaattaaaataatggtaatgttaattctctcaaacatatgagtttcatatttcctctaagtctactccctccaagtctactctctctaactcaaaactcacataacaaacaccccattaggtggtgtttggttagaagaaatgaaaaacatagctagagtaagaatgacattccaatactttaaaataaaaccaaacaaagaaatagaataaaaattgtttccattccatttcattccctccaaccaaacgccaccatactgttttctttccaaggctatgttctttttgttgttaagaataatgttatttttggaggaggatatttgcaccccaagaatatgtatacactaaaaaaaatcaaataaatttatttttaacactttttcgcaaggaatttttattgtgtgtgtgtattttcattttttttaatcttgtcttcgtattttataagaataatatataatgattttaaaaaaattacttaaacaaattttcttcattttttttttaaaaaaatgttatgtctaaatatttaaaatatattttatttatatttgtaggtcttttagaatatgaaaaggaagttattcaaaaaaaaaaaaaaatgaaaaggaataaaaaaacagtaagcataagttaagaaatatattatgttaattttcaataaaattttggggtgtcttaataaagtctttgggtgttaattccatgttcttttcatctaatatagggatcatggtctaaatcttcacattgtcattcggctacagagaaacccctggcgacaccctccaaacttggagactgggaaatagatagaagattactgaaaataggagagagaattgcatctggatcttgtggagacctgtaagtttggtttcagttcttctcatcagtaatttcagttgcatgttgctgtgttttgttgctcgactttttgctgttggctgtcacaaggtatcgtggagtttattttggtgaagatgttgcagttaagattctccgatctgagcatttgaattgtgcacaagaggatgagtttgcccaggaagtcgcaattctaaggtaaattattttgcagtttcttatataaatgaaatagtttattttttaactgtaaataattggttcaagaaaaacatatagtaatagttcaaaatactagctgggccatggaaactacaagaaagatataagccaacattttcttcaactctagagtttatatattcacttccaacagtaccttgggatcgtgttttggtaagcttgaaaatcagttgctttggcaagatggactatgtttattgaaaatttgaatcagacagtacttttggattcaacatgaatagacaagacgcctaccaaactaatgaaatcccttaaacaaaagttctccctacctgacaaatatttaacgtttttttttttttttggatttgtcgatcctacaaactacacaatcatgctgattccaaagttgttccccttaccctttccgttctcttgaatgacaataattttttggttttcatactactaagtatccctgcctgctcaaatcttgtttatactcctgtagctagtccaaattaatttgctgttatttatatcctgtctgtcttaaatattgatattatttcatgggatctgtatttttatttatttatttattttttattatagggaggttcaccatagaaatgttgttcgttttattggtgcatgtacaaagtttcccaatttgtgcatagtgacaggtatgtagttttctgattggttgaggtttagcctttgcaattttatctgaaaaatattgtcatcctttgtttctctttgtagctttgtctttgtagagtgaaaaatcttacaatcaagagtatatgctaatgcctaatagaaccaatgtgatgaggtgtgcaaatttattcctagcttgctattaggctgaggggccagccaagcagctttttttccccttaaggaaaatgagtggaaagagaagcgtaggagttctaatattgagtagcttttctgggttctttgattcttattctacctgtgtcttaatgtcttttcatagtatatgctctcattttttggagtcagcaaatgttcatatttaagccgtgtgactatttggtccacatactggaattcatctgactcacataggtttgcttattgttttgtgcatcttctatcatttgattaaattgattagaaaactttcaatttttggctgctgtgcttgctcacagaatttatgcctggaggaagtctctatgactatttgcacaagaatcgtaatgtcgtgaagctcccacaattgctgaagtttgcaattgatgtctgcagaggaatggaatacctgcatcaaaatgacataatccaccgggatctgaagactgctaatttgcttatggatactgacaatgtgagaattcattaatttaatttaattgtagttcaatgcttttgttttcccaagtacaatttcttaacacaaaaaacaattacaagatataaaaaggacttaaaccgctctaaattatgtcttaacattagttttatttggagcttaggtatcagtgatctcttttatgatcatgtatgaaacacactggaacttccatctcttacatagatagaggttttcagtatcgctggttgcttagttttaaataattttccacagcacatgatgaggttatagataatgatttgttaaatatgggaatatatttgtttacctatggatttatcagcttagttagactaactttaattataagtttagattttactcttcacttgttatatttttagttaaaagttcaatttgtttccttgcttcttctcttcaggttgttaaggtggcagattttggtgttgctcggttccagagtcaagggggagtaatgacagctgaaactggaacatacagatggatggcacctgaggtctgattctatctattgatatccagatggatgacagtggaaaataggggaaataataggaggggtaggcatgttggttggtttttataataataataaaaatctcaatcagcttactagtaattgaaaaatatccagcttaatcagaaattttgtagatatcattaaataaatccagtgttttaattgttctccaaattgatttttgtaaattcaagatggaagaatattaaatttcttttgttttttaaaatgctgacataccagcaaccaagtttttgaaaattcaggcatgctggtttcaaacttctgtttgatttgtattgtaacactataatatacaccttgtttaatgaagttgctaatatttgtttgcctcaaaattaaaagaagaaaaaatcagaaaaatatttatgctagactcttaattccatgcttccattatcttttgcctatttttgctacgttaattaattttttcaataggagaaagccactgtatgaatttacttgttacaatgttatttcaatttcttattctttcttttctgttcacaaggttataaaccatcaaccatatgaccagaaagctgatgtattcagtttttcaattgtactctgggagcttgtgacagctaaggtttgtcctaaagttaacagggatctaagattgttatattttcgcttgcctctttctgaaattctgcagtgacaaggatatggaagttattttgaaaatatgtatcttgaaatttaaattttgcagattccatatgaatccatgactcctttacaagctgcactaggagtgagacaggtatgatgttgtagttggtctctcattttttcaatttgcaattaactccactacctcattgttccttgattatgtaaaacagttgctgtttatagttttattttggtatatagctttattctgttctaaatatttatgttgaaacagttattctttatcttggtcatgtagtcatatgttttcttcaaggaattgtatgaagatgtgccaaaggcttacaaatttaacccatgtatttattgttttaagatcttgtaaagctttaccttttagcttcttagaaagcaaattaaaaaaatcaaatgaaatatcacatggattagagattcagtaagggaagaaaagacttttgtggtatatagaaggcttcaaacttcatacaaattgtataggaactcaatgttttaattctacactgcaatgtagctttagtttcagttgaacttcttatatgaaacccaaaatttctaagtgcgataataatgtgaaaacttgagattttgggagaagcactagattaattttttttttctaaataatatggaaagaagcttaaaacaaaacacaggttgttagtaaaaaccaactgattagatactgttttttgtttttttttgtctcaagtaattatggacattttaatttcagggtatgcgtcccgagcttcctagtgatgcacacccaaaactgttagaactaatgcagagatgttgggatgaaactccatgtgaccgtcctgcgttctccgatgtaagagctgagcttgaaaatctcctcatagaagttcaggtaatctcattcatctttcacttaattttcttttcatccctttttgtgtaagttttaaatcccaatcctgatattcatctcaggaaaattcagaagtaaatcgcacttaaaaacaccgtacacaaaacacactcccatcggctcatttttaaacaacactcagatgaggatttgctttcctaattatcattttcttttttagtttttccacataattatagaggttatatgtaatagtaaaaaagcaagggaagtgaagtgaaaaatatagaggcgtttcgacacgggaaatatacggtacgagtataatacatactactaagttatgtcttcccaaactgtattaggaaagcaatctcccagtcgaattcattgtatattattgcttagctttcaaaaaccatatgtatgtatatttcattactatctatagtatatatttgtaagtgggcatagatagatgctgttgctgttgttgattgaacgtgtttagttgtctatcatgagcactttatttaccaaaactagtattacccaccattcaattcgtttgagagttagaaatataagtccacctaaaaaaaaaaggcgttgtgagaataattgaaaagactaataatatttacatgtggtcatagaattagaatgtggtgttgagctatgatgaaagattggaattgctgatttttattgtatagtctgtcatattattcttttttctgaatagggttgtttatttatttgggtggcgtgtgggtgaggattttttacttcatgtagcttgaattttacactattttgtatatttattatttacttttggttgttgtctggtagtaccgaaatgcagagttgttcagaatcgtatttattattgtacacagtaattaattgttatcgtatgcctttcttctttcagttttggttgttttttgtttgggtgtgatcactgatcagtgatatttcagggtaggacagggctataagcctatagcataaatagagattttttttttatatatatatttttgtttttaaaaaattaactataaaggcttgattgatataatttttgaaatccggactgtattgtcaaaaataaataaataaaaaattcttaggggttttacttataaacttgttttttcttttcctcattgtaaccattgctaaattgtctattctatagtattgtttattttctgagtagtgtatggacaaattttgaggatatgtatgtgcacttagttaatatttgcaagtttgatgttaataattttaattttaactagtttcagtttatgacctgtgatgtgatcacatgagcaaacatcaaaagattaacagaatacaacagatagagcaagttttcaatagttgctataatttataggagatttttatcatgtaaaaatgacagggacaaaactctacaaggacaacagtccaaccacaaatcatagataaaaatgctgtaattccaaaataccacaaaatgccaaattcagtaaaattagattcatgaagcatttagtccttgagtaatattaattcgtccatgtgaaatgcattttggtttattgatatttggtttttttattttattttattttattagtaatagaggggaaatttttaaatagtgagcatggagcatgaaatccaataatgtatttcattgttgtgagaccagcaaataagtaacttccaaaatacccattaaagtgtttattctgtcacgtttaaattttcagtaatagccaaaatatccagataggcaaagcacatggaggtttgttatgtgaacttcttttatggttatgagtttatgaaaaagaaataggaaggtagaggaccaaagggctgttttggttttaaagatgcaaccatacaaataagttatcaactaggtctaaaagtctactttactttttcatccatccttgttacaattatggtgatcagtaaagtcactttctttcttctttcaattcaaattccacctggccctttccaactatgtatatatgattttaagtaacaaagcttttttggacaagaagaagcttagagaagaaggtagacctgttgagactatcatttactgtgtcctttatacttttggtcatgttccactaacatgagccaagaaagaaataatatgtttgatcaccttcataaagttaattgatttattattattattattattattgttgttgatgttgttttatgctaagcaaaagttaaagtagacacatcaaaaagagtaaaagagtactggtgattccaactctaatttgtagaagtaaataatattttattatttttcaactccaactctaagaacaataagacttttgtcatccaaacttttattactaacggattgcattttcttaaattttttacgttattttaaatttttcttgaacaattattatagttaaattgtgtcattaacatgtactattttacaaccctaaaatatattacttttaaacttcttaaactattaccactacaagattgtgctctctaaattttgatagaaggacacaatttcataattataaaattaacagtttgataacatgaaaattttgaaaacacgatatataataactatagttcatgaacaaaaattattccattaatcatcatctgaataaccatcatatatcgtgtgctaatatatttttgggtaaattagactttagtgtccattacattaatgttggtgcaaaattatccattaaaaatactgaaaaataaaaaataaaagaaagaggttgagtttgaagaaccatcaagtgtagtggagaggagaataataataataatggtacggaaaaacctatatatatattgggggctaatacaataggtattgtaatttttgttaatcaatagggatagtaatttgtagcttttgatttaatcaaatggttcaaattaacccttgaaaactaaaccatcataaatatatttttttaatttataatt

SEQ ID NO: 14290 - DNA, 12170 bp, Cannabis sativa
  modified_base (74)..(84): a, c, t, g, unknown or other
  modified_base (905)..(913): a, c, t, g, unknown or other
  modified_base (10686)..(10698): a, c, t, g, unknown or other
tagtacaatatttaaaaaaagaagataaaatgatagattttaaaaaaagaaagtaaaaataaaagaggacaatnnnnnnnnnnnatagagtgtaatttcctcttaaaataatacatttttcttcaaaatttaagtagtttaacttagaacgcggaatttgtgaatgggcctatgcaagcccaattacatggatcagacgaactaagtccttggattttatttttgagaaaattttattatatacctcttttaacttgatgtttttaatttttactctctttcaaaatctaatatatttagctcttttttcaatcattttactaattttacccctatcactttacaataattttcgttattctttaattaaaattttgccccaactttcccacaaacttacacattcatctacaaagaacacaaatctattatgtttaaaattatatcttagttatgtgagtgtgtgaggataatttggataatactcataaaaaatatatatttgaattaaattttatttgaaggtaaatttaattaatgtataaaaaaagtgagtatttttcaacttctcctttcattttttgggcttaattgtggattcaattatattataggaaaattttctaaaaaaaaaattattataggaaaattatacaatgaaccctattcaaaggatatactgatgcatcatttgttttggtactcgaaataaatttttagtcaaattttttttcatggtcatgtacgttatagttatttagaatattctgaatttttttaagaagttcgaaaaaaaaaatcgcgttgaaaatacgattcaaacaatgtgttgcatgcgtgattatttaattttatatgcgtgtgaaatagactgtttgaacactgctttctatattgtaaattannnnnnnnntctcaaaattttataggatatcttaaataactataacatacatgaatataaaaaaaataaattaaaaaattcttctaaatatcgaaacaaatagagggtgcatcagtgcatcccttttaaggggtgcattgtaaaaatactcaatgttataataccaaagagggtgtatcggtggcctccttttaagaagtacatttttgaagtattcgctttttgaaaaattctataatgtacccatttaaaaggggtccaccgatgtacctcttatctgttttggtatttgaaagatttttttagttcaattttttttatagttgtctacattgtaattatttagaatacccagtaaaattttgaaaaattttaaaaattttaacatatcgaaagtgaggtccaagcagtctgatactcaacaaactatacaaagcactaaactatttattagagaaacatagagaaaataacaaaacgatgcatttattccaatgttatttcaacttgaaaaaaagtgcattatttcatatttgaagtacactacaacatcaacacaaatgataaaagcctagctgcctctctcttctaaaggagcactaattaaatctctccttaactctttttgcttggaaaaggatgaacatgattttagaacatctcctctccaacaataaacatacattaaacttcataacaacaacattaaaaagaagacatcaattaatctgaaaatgatgacacaaattatcataggacctaggcaaatttcttctacttttttaacttgagacacccattttccaagagagtgcaaagtttttccctacaagcaatgacaacccattaacttcaaccatcacactcttgctcttcccttctccattttcatcctcatcttcaccttggacatgaacttgatctgataaagtcatctccacactagaagaaccgggggtaacggccttaccgtcaatctcaaccgccgaagcgccacctcctcctaatcccaacacacttactttcccaacaatccaaccattatccaaagcaaacttaccctcttgaacttctgaccaaattttaacataccctttactcacactagcatagaaatcaacataactagattgaccattcccaagtttcatctcaggaagttcatcatcatcaaggaaaagttttccctcagcttttccatcactttccccagctgggaaagttacaacaagtgtgaaaggtgttttcctagcttcctttgaaatcattccaccttgttgcattggtagaattgtgttttgatacaaatgaacattgacaacatgtaatggtgcatcaagagtaacatattttccacctttagatacaatggtttgtgtcatatcaaataagctgtaccatgaaccaggagggaataaagctttgacctttgacttaccctgttctagaactggtgataccattaaaccacttcctagcaagaactgagtactcaatccataacactctgtgtatgttgggaaagagaaaaaaagtggtcttgcaattggggcaccacttgtatgagcttcatatgtcaatgtgtaaagataaggaagaagcttatatctcatccccaaagcatttcttgctgattgagctacagagtcccattggtaaagttcttgtcttggtgagtagtaattagcatggtctcttgagaaagggtagaaagctccaacctcaatccaacggttgcagagttcttcggttggttgagggtaaaacccgcaaatatcagcaccaaccattggaacaccaaagattccaaagttgagcatggttgatattgagtacctcaaattttcccatgtgccttggttatctccagtccaatgagcagcatatttgcccgaaccgacataggttgagcgtgacaatatgaagggtcttttcccttgaaggccttgaagagctgaatgagtagcaactgattgagagaaaccatagagactgtgagcatcgtattccattactccattgtagtgaactgcactagtggcaatggttttgaatccaatgggaacttgcaaacccgaggcgttgatcttgtaaggtggatcatcccatcttgtgttggttatgttcttgcactccaagcaacatatccagccagggccggtgccagtagggcattggccctttggcattttacattttcccgagcaaaaattcgaggcttcattcatgtcaatccataggccgtccactgggacaagttcatggaaacgacggatctcatcaccccaccacgagacagtttttgggttgaggaagtcagggaagttgacagcaccgggccaaacttgagctagataaggctcattgtcatacttgatgaatacgtcgttagcaaggcctcgttggtatacaccataactcgagttgacagcgattccaggatcaataatgacaatgtacttcatgccaatgctgtggattttgtctaggaaagccaagagctttggacgaggatagttgttggggttaagggtgaaatctttgtgtccatccatgtgatcatcatcgttccaaatcacatcaagtgggatttgagcctttttgtaactctcaacaacttcttcaactactgatagattgtggtatccccatctgcattggtggaatcctgcaataccaaaatagcagagtttttaactcaaatcagtaaagggaatgcctttaaacactctaaattgacttgtcatagacccttttagggaaagttgataactttggtaggtgtagcaaaattaacatgcaaaaaacacatgtgggctacttaataaaatagtgatcttggaccaaatataacctatttgatcctttctcccaccgacacttaaaatagtaaaattaaacaaaaagacacaacattgacatttgacactgtagagacttcacatgaagcattgccccaaaattgaggaaatgaattgggcaatttccaccgagtattgaaaagatgatatttttagggttaatgatacaacaatttcaagggtccacatgtcattttagaaagtaatatgcaataataggagtcaagatcttagctaataaagtaacaaaaagagtagatcattttgatataaagccataataataataattgtagcttcccaactttacaaatggccttgtctttaatggttacctaacaaaagactcaatttttaaagctattactaatcaaagaaaacaactttgtagacccaaaacaaagatcaatgttaagagattgataaaaaggtgttttttttaataaagtaggtaaaggaaaaggtaatgagccaaaccacccaccaaccaaaattaaaagaaagaacaaaaattaatcataagcttaaacaatatgcccataatcacggattgaccacatgactacctataatcccaaaactcaacccatcaaagctagtcttttcttcttatctaaataccatatctttagtccataaataaaattaatcacattctaaacaaaatcaaaacacatcaatccccaaagcacaatacataattgaatcaaaaattaaatataataattaaccaaatcaagaatttgggaccacaacaacaaaaccaaataataataataataaccattaaatatctaaaatgaagataatgtaagaaaaccataccaagagaccagtaaggcataggagccggacggccgataaatgacgtgtactgatcaacgacgttaagaggagacggcccagaaaagaagtaaaagtcgaaaacacccccaataaccttataagtcaaagaatttcctctgtaaaaaacgtccattccgttactgttaagtaacagaacggcgtgagagtaagcttttccgtcaacgttccggagatccatgtacaccgggtgggagccgtacagatcggtattcagattaatcgccgaggcatcggttgtgtacagagtgtacggatcgttagggtacagcttaataccgtggggctgcgtgttctcgccgagtccgtacaacgacgcatctttgggtaacctagttgaaatctcgagatactgatctttaaacactaaatcgccaaatgggtctgatttttccgagctggtattgaagaggacctgaccgtcggattttcttttgacggcgaaaccaaatgggtcggaaacgaagctgaaaataagctccgagccggaatattccgaaactgtaatggggtttttcagtgaccggccgagggtcattctcgaaaccggaggcttttctctcggcaagagatcgtacggaacttcccatctttgtttatcggcgtcggtgatatgaactctcagacggtcctctgtttcatgcctgagacaaaaaacagagcaaagcttaggaaaatacaaagaaaaattattaaagcgaaaaacgacgtcgttttataagcttacttaacgaagagctgtaaatttgggatatcagaaccgtagacatcgttctttgttttgacttgaagatgaccgattaaagcgccgtctggggtttcttgtacggcgagtaaacggtaaccttggcctatcttagttggagcagtagtgggctttttcttggacttggaagaagtgactccatgaatggatagaagtagagatagaaagagtatagagagacataaggaagaagaagaagaagaagaagacatagttgagttgagttcactctcttggaactgagaactattcggtgttggaacttgaggtttataaaatacgcccaacacctttatttttattttgcaataaaaaaattaccacaaattcgattttttattttttagagttttatcccttaagttattattattttttttttttgtaaaaatttatttgaactgttaaaattgttgtttatgtttatttggtggttatgagttacaaatacaatataattacaatataaatataagagtttatgatttaggtttattactttgttttttcagtaatttttatgtgggttgttatatgaattttagttgtgatttaagtttatgttagtttctacaagagtttttgtatggacgtacgtaaaaatacaaaaaaaaatataataaatatttaattaagtttaatttttaacaataataatacaaatatttacgtatttacgtgttacgtgttatttttttattagtatatttaaataaatttttaaatcaaaaataaaaatttaattagttggatcaataaggattcttacggtgtcatttacttaatattcaaaaatataatttatgtattattacggtgagaaattaaacttatttatttatttataatcaagaattatacttatatatttatggtgcaaattattttttattattatttagacttgtatcaaatttaagttaccttaatattaaattaatttttataattcatgatgaacttttataagataaaaaattagcggtgttcctataatacgtattacggtgtatcaatgtatgtactctaaattgttttggaattttaaaaaaaattaatttaatttttttcttatagacatgtgtgttataaataatttacaatataaaaattaatagtgaaacaatctattttttaaactttattttttatgtgttaatttttttaaaaaaaaaattaaaaatattttaaataattataaatgaccatcaaaaaaaataaactcaaattttttttttcaaatactaaaatatataaaagttcatagttggaggtcacccctatttagtctgaaaaataaaaaataataattatcgagagagagaaaaagattgggtacgtgtgggggtgcctatgaccgttttgtgcacgtgactatgatggggtgtgtggggttagtgggtcccatctattatacgtaatttttagcgtgggtgggccccacttgtcgggctttgatttacgaaaaaacggtatggttagagcagaggatccttctgtggcgctcatcgaatgggttacggtaaaatcaagatggtgaggtgtgtgattttgattgggtaagaatatggggagtatttaagtagagtaaggtttgagcgtagaggagtaatttgaagtgatttatttaagtacacgtcacgtcgtttgaggttaacgttggatgagaagtgaggagagtggaaaccgtgattggcggtgtctattaacgtttcatgccaatagttcactcacgtgtaagttgctcatcggttgtaattaactagagaattgctaaaatgattacttaatcatattttattagtataattaagtgtcgggtctcatataatttaataaattaaacatatacatgtccgaacgagggtgctatcctcatctctatcctatttaatatccgaggatcaaaaattatctccgttcccgtttcatttctattttcaatttaggtgggaaatctgtgtcctatacaggtactcgtggggcccattatactcatggttaaatttctatccctatatatacgtcacacaataaatggagaatttttttccatttaaaaaaattcattgtctatcttaatgcaggtattcaagaaaaattaaacaataaaatattaatataaaaaaataaaatttttaacttgtgatgttcaatctcactaataaaattcttacaaaataaaaaaaatgattaatattaaatatttaataaatagtgtaactattataatttgaagactttatatcacttaattgtgatcctctctattgctaaaagtgtctctattaattatatttgatattttccaaatattaagtttggaaaagactcctttcaaaattaaattaaagcagtaattttctttttgtttgtagtgtgggataaataattaaatattctcattttttagtacgtaaaaattcagcctaaaattcaattacaacaacaatgccatggcctatttcatttgacataattttggcttcttcttctttttctttttttttttaacagaaaaaaaatgcaatatattatagttattatgtattaaaatttcaaccacagcaaaaaaaataaaataaataaagtattaaaattttgaaagaatattttgaatcataaaaacttttgcaataatatttcactttttttttttgagaaataatgaaaacagttacttattttttcaatatcatttattaggtttaatagaaaacaatattttctaaactaatcctgacaaaaatatatatataaatttgaaactttttttttcttttgtccagaataagaaagtagtaaatctaaattatacgatatatatatttacttctctccaatatacaaatatacaaagtagtaaatgtaaattatacgatatatatatttacttctctccaatatacaaatatacaaagtagtaaatgtaaattatacgatatatatatatatatatttatagaatagttataatttatttattttacgtaaataattataatatttaagatatgtatattggtgtttaaatacgattttcattggtagcttattccattattaatagacccatcaacgattcttttttatttttattattattaatgtccaatgtattcagtcactctttatctatgtcggtggtaataattaaacctaattaattctggtgcacaataatataaataataaataaaatttacttttttttatatataattatttaataaataataaaacacaagatctcagaataattttttcattttaatgtatgttataagtttcctaataacatatatatatttttttggtacttaatacttatcttattatagaagatgtagaaatatggtatatgttaattagtttaaatatttgtactcataaacctttcttaataagaaagccaagtctaaaaggcctaataataccagaatattattctgtctatagattcgaatctatgcacttaagtccatacagattacaaaatcttcatgatcgactgttaatatgagctaagtgctactaacatcattgattatcaaaatagaaattcaagtatgctgatatcagtggccatgtgatcaatccattagggcaaagtgaaaaatttactaatttagggtcccaaatgctaataatcgttgagttggttacattcttaccaactcaaatcatttcttgctttccttataaaaataggtaaaatcgagtaagaaaggaggttgattccctctctgattcaatatcttgttttcattttctcactattggattaaaaaaaatgttattgtgggcatatatatatgtataatgtatatactaaagtgtgatacaaaattaagtgattaattatgttatagatatatcaaaaaggcagtaaattgtcatgaaataatgtgtagaaatcataagctaatttataacttattgaggagtcaaattataaataaccaaaactcatattatataatgagcttataaataggtagtggtcctaagaaacgttttttgtattctctacttccatatcagaaaaaatactttcgaaaaataatgtattcttagaagatcataactttttctgcaatctccaacaataactttatgttagtgttttcgctcatctcgttatcattttctttttatttaatttaacaaaggttttataaaatataatttaagatattttatatattataacatttttaaaaatataattaaatatatgattatttgtatttcttgagtatttaataaatattaacactcactagaactctttctaactaaagctttagagaattttgttcaggaaaatcatactcgctcctattaatctaaactctagaatgaagaaaaatcaagaaaaaaagaagaagaattggcaactagtcgcggaactatttttcatgtagaaaaatagagaggactacttcttaccattattttttcatctgactattttattgtatacttattacttttttaaattgtctcataaatggtagaaatgaatttattactgaaattgaagcatgtatataaagaaaaaacacaatgaaaaaggtgaattagttaaaataagattaggggtacagacaagaaatacataataataataataattaaagcagtactgaaattgaattcaaagatcgataaaaagggaaaacgtgagtgtgttttgacattatacggctgtatatatggaccatattatatatatttttgtcaaattttatctctttctctaatttccacatttctcatttatttccacacttggctacagtttttaataacatgtttcctgctaacccatattccaattcaacctttcttaattaaaaatttagtcatttaatttcaatttaattcatattccactcatattatcgaatccaaatgaaattttttcactttgaaattttctagaataaatttgaaaacactttttaagttttagaaatctgaagaagaattgcataagtctaaaaaagaattaaatttcatttttataatttttaaggcacaagtttacaaagctgtagctttttttttctcgtatgggaatttttttaaaagaaaagtaaaaataaaaatatagaaaaaaagtgtaaggtaactagttatcctaaataaaaatattaaaaaaaccatattttgttagaaaaccacataaaaatataatttcctaaaaaaaagtaaaggatatgagatatatcttggatggccaaactcaattcttgctgccttgtaattaattaattaattaattnnnnnnnnnnnnnattaattaattaattaattttgtaatacaattaattaaattgtactttgttttaattaattaatatttattagtgattcgatgcgaatgatggaatcaataagatggtgttttaaaaattcgtacataaaatatattttattttttaaaatatatctcaggagaaaacagtgtggtctgctgctaaagtgccgttattaccactttaccagttaccaatatccaacaaaaatttaaaataataacaaattacaatatatacatactacataatatctataactatatattatacattattaaaaattaatattacccatagtttctagctctctctttcgtgaaaaaatcaacatttgtcactttcaaaccaattaattataatattaatattaatctatctaaaaataagtggttaatttgtggaagaactgtaaaccataattgatatttccattaaaaatagctataactgatattgtcacacaattactcactgcgatgttaaagttaggagtgggactatgtgtgtggtggttttggtaagaatttttttaagaatagttttgtgaattactactgatattctggatttcactaattttcttatcaaaaaagttacaacttgcttacttgaagacgcaaaccttttgaaatatatatgattttgtgatgtttgagagcaattgtgagattgttattaattcccttaatgagattttttctaattggagaattgataattacgtgcaccattataatatgctctcatttttgtttgcgtagtaatttttttttatttcgagactgtgtaatcaatgtagttaattggacatttgttaataacttaaatggtagatatctactatttcgataaatattttttctaattatatatcatgaagtctaagtttttttacttattaacgtaacttttaaaaaaaaaaaaaaaactaatatagaaaatatatttttaaaaaaataaataaaatagtgatgagggttggatgtggcccaaattaagaaggtatattttgtagatttgtggtcgtaaattaatttccacgtattgaatgaaatgcttcaaaaatacacaacatgcaacgtggatagatatcttatttattcacaacatataatatttattattaatgaaatctatacactgagattcatcgatctataaatataaatatatatatataatggtgttgtttgtatacgttaaagaaaaatcacaagccccacgtactacactcagaaaaaacactaaaaaaattactatttattagcccataatgaatttattcataataatacaaaaaatttggcactaaactcaaattaagctctttcaaaaaaaaaaaaaaaactcaaattaagccatttaattttattttattttttctccattactattaatttctgtttaagaaaaaataaaaaagaggagacaaaattttgttagacaca

SEQ ID NO: 14291 - DNA, 5089 bp, Cannabis sativa
  modified_base (4867)..(4868): a, c, t, g, unknown or other
aaaaaaaaaaaaaaatcaccatgtaattttagatataaaaataaactaaaaagttgtaataagagtttaattagcactctctttatgctataattgagaattgttctaaggtaagatttaatatttaattctacaaatataaaatgtgcataaatttgataccttaggctaaactgtttaacatttatcatgtaaatgtagaagctagttgtcgtcatttgaaattggttgttgtagaagttaaaaattggaaggcaaaactatcatgttacatgcacgtgaattgatatgataatggagagaagagaatgaagaaaatagctcttaagtagcgtggtgaaatcatattatggtcagtcaaagggccatttttattaattccttttcaatttccataacaaataaacataaataaatatattattgatgtgtgtattcattcccccacatcgctcacgacgtgacttattttgttggctccacgcgccagccagctcatcaaccgggcacgttattgcattttctaaacacccttttcatgaggatctacctaaaaccctttgggaatttccttcttattatctttgataaaatagaagaataacaaaaaattaagaatcataggttagcgacttcggacccaatattaagaattctatgacccaatattcttcttattttttgttaatatttgtcaaaaatagtcgttcaattgatatgatctctttatttggtttggttattagagattgtaaggaaatgcttgctcctttgagaaatatttctatttattttgctaaacggtcagtgaactcagttgctcacgcttctgcaagagcttctagtttttatcctaattgtgttttcagtttggggatgtcccaactgagttgctttctagtttggttgctgaagttcaagttttataaaaataaatttcattcaaaaaaaaaatagaagaataacaatcaaaatacaaataaaatattaagggtactgttaagaaaattttagaaatggttgtaaggtactgttaactctagtatataaaaataaacatatctttacaatattttaaccaaataagttgtttgaacaagtgtctttttttatttatagaagtcactccaattttaatatgaataaccactataaaatctttggcccttattaatgataaattggacgtatattgaattaaaaattattagagttgttagaatatagtacaatatttacaaaacattcaaaaatgcacgcagatgaacctttaggcagggtatctatataacgttccctgtccttgtatgtccaagatgtaggcaggtattatctccaacctctattcaactcctagataaacctttcatacccatctccgccacctgactgggctaacaatggtgttgtacggtaaactttgaggactctgacgaatcacttgtcacctcccactcatcaaaacttaaagttgatgagctcttgcttaatgacgatgaagttgcatggagcctgggctagggctggtctttgtgaatagctaaagtaaatctttatctatccgatgcttacccctaaaaattgtcccgaatcatctacaaaaggaaggagagaaaggtaaggatcggatagataaaatgtcttctccaaaaaaaaatcattactgatgctccaatcagatgaatttaaagatcaaaggaaggaacttctaacctgatgacgaaaattccaaagcaaacaagctcaagaacataggaagaactcaagaaatttccagaaatgtcgaacaaatatttttgaatgttttatagcaaagaagtttggaattaacaaaaaattaagaatcataggtcatacgcatacattcagacccaatattaagaatcctaagttctaatatcaaagaatattttaatttgagcctaggttttacaaaagagatccaagcaaaaaataaaatgtagaaaatcgaaaaaaaaaatgcataaagattataaaacttgctcattgttggaagtttatggatgatgagttgacttggtttctagaaattgcttcggggttctttgaagcttcaaagaagaaaaattaagaaattctgaagagaaaaagaaatttttgctatggtcttcaagtttgaaaatgtgtaaacaaatgggaaggatacccaaacccccttttgtagtttactgaaggggtagtttggtaatctcaagttttaaaagttggatttccccccaaaaaataagtacaatcattacttgtcggaaagtacaattgtgagtgtgcagattaatgtccattttcaaagcgaggtaataaattctcaaaatacaaaagggcagctgaatctttgtacctcgtgatccgacctcatcagaactaggcaaacaatgggatccagacatgtgtcacccattcaagacctcagaagccgcataagtccacatatgagcaaatggttcccacgcgaacttgagaagtaaatgttatctcaatttctgcataggattatgtggtgttattatgagtgacacatggaaaaaattctcaaacttggacgggtagtatatactttactgtattgttcagggtgattcatgtttaagaatgatagtttgaagaccaacatggaacatccggataggttaaatgtgaccatctgagaagcttccagtgtgatagtgaagccaagtactccatacagggtgaatgcggctgaagcacaagttttagggatatttcccataaatatctcccatttaaatccctactttgatggagttaacacacatcattgagggatccgattttggattttctagagagtcgttacgctgtctaaataattgtaaactttttctttatgattattaagaaactcacttgtcagctccttgtgatattgataattctttgaagtaatacaagtaaaaggagagtaggctattactataatcaggggtcgaacctctataaattatggtgttcttattgcttaaatatattaattattatatattatcttattattttaattgactcgtcgtcattagataaaagtgaggtcaacaagatccattagcgaagtcaagccttccatatgttggacagatggcttgtccagaaaagatgcacctccgacatagcgtatctctagatggcatcgaatagatctttcagattagtgattaatgggcatctggatatccagctccgtaccataataatttattgtcaaatcccacaatagcacaaatttatttacaggatcatgttcaggattcgtatctttcagataagaaaataaagtaattgtcaatcaagcatttatgtgtctttattatccacaaaagtatgccacaatttgacaactatcaacaagatatggcatccacatcatcagaagaacaatgcctcatgggttggacttcaccaaatgagcccgaagtcaatgtattttttgtatttatcccatcagtgggcaatgtgtacatactagaatcctagcactataaatataagaaaactcattcatgcaaagggttagaagttcattccttaagtgctcagtcaaatcttaggcttcaaacacgtgtgtaaatcaataagactttttcaatcttatcataataatattaactcgtagactagaggttattaatccttgaatcacgttaaaactttgctcttattctttgtctatgataaatttccttaagctttattatattttatcaggttttaaaaatttcgataaacaattacattaaaaatgtaaccataatggttacattttttataacttgctacaacaagttgccaataggtttttttattaaaaaaaaatatttttaaaattgaattaattataattaactatgtacataaagtaaattaacttttttaatcaaaatattaaataaaattcttttagctattaatatttttaagtccctattataacatttatttaagtccttaccacttagctaaaatgcttcattttcttctatttatacttaataaggatcatattttgtagcaatttcaaactattaggaagtgttaatgcaaatatcttaattgttaacatatgaaaatataataccagatgcatgaattactcttctaattgttaaaaaactatttgtgaaaaaaaaaatggtaaatattattttagaccatgtattttgtaaaagttaaccttctatttgttaaatgactaaatggacccttattttttaaaattgtacaaataaaaccctgaactaattttttgtcaacataaaatttaataataatccgttctaaaagtattatgacaaaactgtttacattttttgtatctattcgtattaagaattgtcttcaagttgattatattaaaaaaaaaagttatcgaaaatagatgatctaatcggtaacttttgcaaaatataaaatctagaatggtatttactcgaagaaagcttgtttagtagttaattggaaaatttaattagtaattattaatagatttagtgttaaaataaaattagtcttaataaatattttataagaaaataagatatattaattaatgaaataaaataggttagtattgaattacaaataatttgttaattatttttaattcatttttaaattcttaataataattcaataactaaaattgtagttagatggtaactattaaaaattattggcattttggcaattgagttgtatttgtttatttattttttaaaattccttaaacaatatatagaagtgaaagggatgtggatgtagctagtagtttactaattttaaatgaaaccacaaaaaaaaaaaaaaccaccaaaattaataataataataatannaataataataataataataacccacaagacatggggaaatttaaccatgcttcacatggatatgatttctcagttacaatattttctttcaatggttcacagctaatgctgagatggatgttagagagagagagaagaaataaatctaaagagaacagaataatgaaagaatcttatcaaacacctaatcagagtaagaataatatttaaaaaaaaaaaaa

SEQ ID NO: 14292 - DNA, 2928 bp, Cannabis sativa
tcctagagcttaatcttcttgattatgtgacagaatgccactcagaaaagccaaaagatttttgttcatgtcctttcagaaattgctgctcatgaggttgaggaaataggtatatggttacaattacatgagtagttatagctagctcacacaaattattacctatgcaagttgattttttttattagttcttttcttaaataaactgattttatgtacactatatctgataataggagtcgaacatttactaagagatgtgaaggatacaactattagcacacttgcaaccgaggttttatctttagtttgttcttcgatgtgttgtgactgtctcagatgcccatggaattaatattttgtcatgttcaggttaccggaaaactgacagccttgaagggtttggatgcacgcttacgagaaatacgtggttatctagatcttgttattgatgagaagcttcctttaaatcatgagatactttaccatttgcaggtactcttctctactatttcttcaactcccccaccaaatgacacgtcttgcttttcatattctttttctggaagtgttgcttctgcattttgcatgattttgttttgagtgtaaaaggtttactgggtagaaagtaaatatgtgtaaatttcaggacgtgttcaatcttctaccaaatctcaatgttaccgaactgatcaagtcatttgcaggtattttacactaaattaatatgctgcatttgctgtatgctgtgtatgcccatctgattatatattgaaagtcgttttattaatattgttctattgtcttatgcagtgaaaacaaatgatatgatgctagttatctatctttcttctgtcatccgaagtgtaattgcactccataacttgatcaataacaaggtaggttactctttctttttacttgttatgtcagctatgtcatgcttactgaagccgattagataattgttttcgtgaagtttgtatgctcttttgttgttcaagctccttacatcctgtaggtttggctaacagtaaatactaaattgtgggtgaaaatcttaagctctatgcaaatttctcaattagttttcattaaccctttcatgtatacatataattggatcaagcgcgattatccttttctatgttttcaagagcgttataagaatttgcaattggaagataaaatgagttatgatgtgattacttgttaagacttttgaattttcttattttcggttacttgttttcagatgctaaataaagaacatgagaagacagaggatgctaagccaacagcagttcccgcggtgaataatagctgaaaacccatcaccggtttcgtactttcgattagaacagaattagctttaggagtggcggaaggcaccattttatcttgatgcctttgagacttctgtttgagaatatttgtatattctcctcggtgacagaggattctggtaacctcttccaactgggaaattaccttatacattatattgcaaagttgtttggtttttgttttttgaaatttttgaggtttataggcctaacacgtaattggggttatttatttcatttctttatcaacatcccctcactctatatttatttttacttacaaaattgcttcttaattgtgtcaacaatgggcacatgtcagcatccatctatgactttatttttacaggttcatttatcttccttccatttattttataatattcaatctttaaatgcatctgctatatcaatctggatttcagtaattgtataaacatagcccattcactacattcaatagaaaatgattaatttaaattggactttatgtgctttggtcatgagtaaagtttgtaacccttttacccaaacaaaactcaaatggtgaaatatgataccacttaggttttaccgttttagaaaagttatcactgcttactgaagtgaaggctgaaagttgaaaaatttataatttatttatttatgtatctagttgattattatagactttttgaaatgatgacacgtaataataaatacgaaataaaaagaaatgataataataaatatgaaatttaaattacactttattatatatatgtatatatttaatattgattgattttagtaaatattaggatttttacataaaattttttttatatgtaccaatctatgattttagaatttttttaggtgatttaaaattttttttgaattattgagattgttatatttaaaaatttttgttcaattttattagcaaaagttgaaagataattcagtagcttttacacgattgacaaagctaccaaaaaaataacttataaattccggtacaactgtgcttgataattggagaagaaagctcttgcagtatggattatcaactcaaagtaaaccacaattttttaatttaagcggatttgagttgatgttgttttattaggattaagtctttttaaattgcattgatttatctcaaaaatttcatttcaattgaaatatgattatttattatgaacagggaatctgagaattatctatgaagcatatttatatcggataaagtgtttattttattttttttagatgaaaatgcgtattatattaaatcaatcattcataatacaataaagtgttcaatttagaattggtaacattagggtttcttcaataagacactaaaattttaaaaatagtgaagtttagatataaaattgtttcaatagaactctaaatgccattctatatatgtgagaatctatagtgttacactaaaaataatgggacactatagactacactaaattttgtttttttgtttttaatattaaaataatgtgtttatgattaaatttttatatttatataaatattataatgtgagatagttaaataaaataatataataataaaa

SEQ ID NO: 14293 - DNA, 8558 bp, Cannabis sativa
  modified_base (27)..(34): a, c, t, g, unknown or other
  modified_base (887)..(911): a, c, t, g, unknown or other
  modified_base (3476)..(3483): a, c, t, g, unknown or other
gttaaaccaagaaatgccgttagatannnnnnnntaatatataaagatatatatcattatttttcaagataattattaatgcaaaataagaataaatattaattaatttcaatgattttaatagtaaaaataaattaataaatctaatgaaatattattaagaacaaataaaatttttgcccctataacccttgtagagttttgtccttaaactataatcctggtagaattttgtctctctaaaattttctctactacaaaaattctctacgaactatacaaatcattgcaaatacctctctttagttatattttgttcatcttttaaaacactttgtttatgtgactataagttaccgatataattgtaatacaataacttatttaataactttaagctacttggaatttactttattgacattaaacatataaacaataactctaagaattcacatacatgctctcataattcatcattagactattgtttatgcatttatgttttgtctggatttttaaactgggttagataaatgttatgttagtgtatatcaataaattatttaaagaaatgagcagaatgcaactatatgggatatttgtaacgatttttatagttcaagggaaaaactttactagggttatagttcggaggataaatcctatttattctattattaataagaaagtatttaaaaactaaaataataatttaaaatagagtaatttgtggtataaatatttaaatttaactcacaactgtaaataaatacctaagtttgatttttgacgataataatatctaaattgtattttcgaaacttccgtaagtgcttgggtgttaagtgtacaatcattattcacgtgtcattttcttattagtnnnnnnnnnnnnnnnnnnnnnnnnnaaataaaaatttaatgacctgaactaatcagtgactgccacattgacacttagtggcgaattacttaaataaagtttcgaaattagctatttgaggagtgttactgtcaacttcttgttacaacttctttgtcaatctccacgcctgaaaacacatgtcggaatattttttttcaattttttttcaagggagtgttcgttatgcttacaacatcattcatgtaaatttttgaaatgttttgaacagtttacagtattgaaaatacgtttgaagttttttgaacgcgcgtggtaaatcggaatatcaggaactctattttcggtactgtaaactattcgaaatttttcaaaaatttacaaggatgatacagtaactataatgaataccgctataaaaaaatttgaaaaaaaatatttagacatgtgatttcagacgtataagttggctaagagataataggaggttgtaattaacatttttatcatgtatttatttgttgtgatagttaaacttagatacttattcggaaaattaataaaaaaaataatacttttatttttctactcttccctatttttatttatttttcaatctatttctgcaacaacatttggtcgccggcgacgagaagagaagaggctcaagtcacttcacgaccgagatcttccttcttcttcttcttcaaggctcttcatcatcatcttcttcttcggtacaaagatctagggcactaatcattagcaggtgatcagaggaggaactgggcataatcagagcctgggatgtgtagaaaagctcatcgaaaaagatggggaatttgttcgtgaagaaacccaagatcactgacgtcgatcgagctattctttctctgaagacccaaagacgcaagcttgctcaatatcaacaacaggtataataaaactcatccatagttttcaaatgttttgtttttggcaattgattagggtttgtaaaaaaaaataggatttttgattgagagacaggttaactttcaacactaaataaccaaaagaaacaaaatttacagttgtgtagttttggaactttaaaaacccaatgcaaatctccaatacaattaacatttgaaattttgtatgaaaagattgtgtttcatattattggggcttcacttcattgattcatttagctataattgtgatatgaattagttagtgttagtaaaaatttgtacattgaattgttaagtgggaatgctattgagtttttgcttttattggctagaagaatagatattttatctgtgtgaaccactataataatgtctagtaatgatttaaatatcaccatagtcaaataattgagagggtaatagcctgctcttactttgttttggaagttttcatctaactattctagcaaattagtatcttcttggtttactttcattgtgtagagagggctgcacaattaacatttgaattatagttcagtctgcgaacataccgaagcaatcttttttagtaattcttagaaaaccatgattcctcatgttgtgttacacccaaaattatttgtgaagtgactaatagatgaaaatgtagtggattaagtatgatgaggtttagtgtatggtaagatgtatgtggttccatctcaaaacccaaaggagtagctcatgcatccattttatatatgttatttagtttccactcattatcaatgtgactctctaacatccccttcaagatggtggttattttttgctcaccaatcttggacgactcgatcacaggtggctcttttggctcaccaattttttttggttcattatcaccgaatcacaagcggttcttttggcttttctctttggaccgattttgtatttggatctgatactcgttagagtttagtttagctctgacatattatatctttttgataaaaatttgtattgaagtaaggaaactcagaaaataaaatgatcaggtattctaatgctggggtcttccccatttgtgtttatctttttccagcttgatgctatcattgaagctgaaaaacaagcagcgagagatttgattcgtgaaaacaaaaaggatagagctttgttagctttgaaaaagaagaaggcacaagaagaattattgaagaaagttgatgtctgggtcattaatgttgagcaacaggtaagcgagaacttaagccacaattttttacttctttctcattattatgattattattgtctgtttttttttttctcagtagttgtttgtaaggatcaaattgttggtctgttaagtcatgatgatttttggcttttaatagtttttttgggcatgtgtttttgttaagttggcagatatcgaattgactagcaagcagaacgctgtgtttgagagtttgaagtctggtagtgaggcaatgaaagctctacagaatgaagtcaaccttgatgatgttcaaaaactaatggatgatactgctgaagccaaagcttatcaagatgtgagtttaattttctctcttctttatgtttagcttggctcttttgtataggatctctctctctctctctctctnnnnnnnnatatatatatatatatattactatgttttcaaatattaaatttgtgatctctgttcgtgtacatcatgggaattacagattttatgggattttatactaactgtgcaaaaatatgtctttttgaaaagaaaaaggttattttatgagaaaaattcaataaaaagttgaaaaatatcgaaaaccaggctaatcaggtacccttatgatagtcattacctaatacagtttttttccatattttttgactttttttccccataaaataatttttttttttataataagttatattttgcgaacttataccttaattccataaaaatgaaaaactccccaattatatgtataggacactgaaagcattttgttttatattttgcaccagttgctagtgtacgggtgttggctgcctatttttctttatttctttagtttccttacaagagttgaggcctgctgccaaatcccatgctccgggtttgagatagaatttcaatgctttaaactgttatattgagttctcttttttattgatctctgttagttcattaaacttaagtaaaagttggtttggaaaaaaaaaatcaattaattgataagccagagcaaatcagagttcattcatgcaatgacattgtactaggtgaggatcaaatctttgttgttttgaaaacgagcatgtctatggtcttagggaagaagatccattcacaacagtttgttttttatttcttttgttgccattaagttttttctttatttaatttctgctgtgcaaagttttgttcacttgtaatggtatagattgtttttaccattattttccaaacattctgagtttataattggatatgtatcactgcaggagcttaatgctattttgggagagcagttatcagcagaagacgaagaagacatcttagcagagtttgagagcttagaaactgaggtttgtatttttctcgtcctgactatttgtgtaactagaattgaacgttcatccacttattgtctgcttattttttgtaaactaatattgcttgatttaaactttttaaattgaggtctaactcaatctgagtagttatttaggttacttttcgggtgttaatttttagtgtgcagtagcaaatgcctgtctgcaatttgtgaccattttatgtcatttggctttaatgcctttgaacttgatagggcctagtcaagcaaacttatgttagtgacatagttgagttttaatcgcaactaattctgctacgtatatcttaggaaattgagaggaaatataaatacagaggggtgggattaagagggtattagggatatagaaagaattgtattgtgaggttccaggcccttgaagattgtgcaactaggtttgcttaatattctatggcaaatcagatcctggttcgatttctcgactcattttctgtacagtgcagccagggtctcactgtggttctttgggcagggttgatagacttttccttagcagcatagagttagtgtgaaataaataaaaaaaaagaatagaataaatagagggagggggttcattttgtggtgtggggtaatccctaagtgggtgaaaacaggctcttaagttccaagccctcttaaatcctgtggggttttattttgtgatcatggaacaatttgtagtacaaaggtcaattttggttgtggatatacagttgcagttctgctctattctattgtctactactgctatgtgtgtgtgagcttatcaaaactcttataaacaattagaatttcagatcattaatcacattctcttgttaaaatacatacatgggacaatgaaatcgcttgtgtaatttgatttttcatgctatgtatttttttttgtcaaattaagaggaaaaaggctgtttatgtttaagaattcacgtggcttcggtatctttttatgttggattaacatatcgaaatctgattactcctatcctaattcatttctgtttactttggactatcttcagatgaatgttgaagatctgcctaacgtaccgaaatcagagtcagacaaactggaccttcctgatgtaccaacaaaaccagtaactacagccaatactactgatgaaattactccacctgaaccttcctcaaagattaaaggtctctctctctctctctctttctctcactcttttacactttcattcacagtaacatttcatcactattgattttattatggattttttaaaaaattggaacagttctggaggagccgttgccagcatgagcagaaattggaaagttcttatgggctgttttcggtggcacgcaacaattgattgatttggtgaacacttcttttacatttcggcttttctaaacacatcttggctaaaactaatgtaatcatcacggttacatatttaatgtaaccacattgaaaattcttccatatatataaatacatactgttttcgaaaacatcttcggtgatctttgtacaaaaacaaatttggtaactaatgaagcttctctttacgttttccttttgaatggttatttgttaaatggtcacaaatggcttccttcaaatatgtgacccaaaatttgaaattttggatttttttaaaaaagaatttatagaaatatgtatgacccaaaatatgattgtttatgaagttttggtgtgtgtatatatatatattttattgaatattattgtttaagaaagtttattaattataaaagagtgtcctatagtttagaatatgccttttaattaattaacttaattttgtttaaataaatttagttaggtcattattttttctattattattaattataagttcataaaaaaataatagcttaatcacatacaataacattatttagtataaattgcataaaatcagattttacttttgaattaatttatagtttttattcaaaataatttcattcataacataaaaaagaagactgttaatataacctaacagctttaactaccccaagttcccattaagtgttgttatactcaataatctcttacataaaaaagtgcaaaaacaaaataattacaaataatattttagcatttcctctaagcttttctcaatttctttatgggttgtcgatataacttttcttcttcttcttcctcattttttaaaaataatcccaacttctttaagggtgtcccatttaatatgttagaagaagaaaagatttcccatttggaatttcttggaacatatctaaaccaaggcttgtacccgcataacttttcaagttctaagtaatccttcatattttcaccagtatcttcaacttgtataacctgtgttaattatcataatacaattagtttatcatcaaaacaaaactttttatattactatcaattaagatactaaatacaaaattttgatagcaaaccttttcgattaaagctaagtgagcttttctttctctaattagtcgttgtaagttctccattttttctttttcttctctttcagctctttcttttcgttgtaaattggcaattctctctctttcttctctttctttttcaatccttgcattttcaaatgtttcgcgttgtctctttttcaactcctcatcaattttatacttcgtggctgtgtaatttgagttggcacgcacgaattttgcagcacgaattttttcttgttcttctctgtctttttgtcgttgtaagttgacatttttttctattttttctctttcctccctttctttttcaattcttgcactttcaaaaatttcccgccgtctctttttcaattcctcatcaactttatattttgcagctgtgtaatttgagttggcacacactaactttgcagcttgaagagctttcttcaaaggacattctgaatgaaacaacatatttattaataattattaatgcactaggtgaatgaaacatataatatagactaataaaatataaaaaagtgagacaaattaattacctttttgggaagatgaagatggaattacagtctctttctcagtcaaaaacacagagtgatgattggttttttcattctgtttcaataaacaaaagtaagtattaataatactgaaaagtgaacactaatattaagacatgtatagaaagaatataagtttgaacctcttgtaccgaaagaattgacttatgattatgatgataatccagtggagttttatatttgttggatggtctccttaagagtgattttctctcgttagaattttctgattcatattttgcagctgtgtaatttgagttggcacacactaactttgcagcacgaagagctttcttcaaaggacattctgaataagacaatatgtttattaataattatcaatgcattaagtgaataaaatatataatatagactaatgtaatataaaaaatgagacaaattaattacccttttcggaagatgaagatggaattacagtctctttttcagtcataaacacagagtgatgattggttttttcattctattacaataaacaaaaataagcattaataataccgaaaagttaaaaccaatattaagacatgtatagaaagaatataagcttaaacctcttttaccgaaagaattggcttatgattatgaagataatctagtggagtttcatatttgttagatggtttccttaagattgattttctttcggtagaattttctatttcatattttgcagctgtgtaatttgagttggagcacaccaacttcgtaacaggaagagctttcttcgaaggaccttctgaataaaaaagatatatttattaataattatttatgcattaagtgaataaaatatacaacatagactaatgtaatataaaaaatgagacaacttaattacctttttcggaagatgaagatggaattacagtctctttttcaatcataaacacagagcgataattggttttttcattctattacaataaacaaaagtaagcattaataataccgaaaagttaaaatcaatattaagacatgtatagaaagaatataagtttaaacctcttttaccgaaagaat

SEQ ID NO: 14294 - DNA, 3884 bp, Cannabis sativa
aatctctgggcgcaattcaattttctgaatgaaatactagttgggtgaggacaattgcatttgcatccctacctacctcaaggaaaagatttccgaaaagtattttatcaccggattcaatcagaagatcggcttttgaaccacttgcttttgaaataacagattttacacttggaactttactctgcaggaaccaattgcaattcataaacaatcagaaaaaagaactgagagattatggtggaacttcagaccaaataaggccagtcccagtgaaatgaaagtaggttgacaaaccttaataaggccagttccagtaacatgatcagcatgtacatgagtgttcattgcatacaaaaggtttagcctcaattcttgaataagagacagatctctatcaactgttttgtccactgggtctattaactgagcaaagaaaacaattttatgagcatgcatatatacacatagttacaaatttcaaaaacatgaaacataaacttgtccactgaaaagaatgacaaaaaaaaaatctgaggaaccttttcctaacattatgaggtgaattcgaagtaccttctggtaccaacaccaaacattagatgaattttttatattttctggtgtaataatgcaaaataaaaaatcactttgaaatagtacaaattcccaacttttagaaaaatccggtattgttgcatctcggaatgaattcagaaaaactaaatgagacccaaaactctgttctacagagaaaaccatttcttttccaagaagaaatttcttacaaactacgtaccttccaaccattcagagttatagctactgtaattatattaactaggatcagtgttcacaaccacaaatttccaatgtaatatagccatattgcatcaaatcaaattcaaactgaaactgaagcaatcccaaaaccaagtccaatttattgaagaaaaacaaaagtcaaatctcgtgcttatatatgaaaatgaagccaacaacaagaaaggtaagaacacgagaaggaaaaattcacgtaaattaagagaaggaagagaattaaggaccagagcgggtctatcggggtgagaaacatcggcgagaaggtaagtgtaggtggatgaatccttctcgaagagctgcctgaaaaggagcttttgagacgaaaacgacgtcgcttcgggagaccccattatttgcgacgaagaacacctccaccactgccttctttttggtgatattgttgaaggtagtacgtgaattttagtcaaatacagcgacaagagacctggttttgagattggcaatccaaattttctcagcattgtttttataattattcctaaacaaaaaaaaatatatattgttaataataacgtaatagtttcatcttccgttgatcatcgacagcttcgccactttagtatactatacatatattggttgcatattatattatgacgtggtggccactttctataagaaataaaaataagtttcgattagttctatacttctattattttgattgaagagaaaaaatgtatagtgactcactggataagatgcgatttgtcacaatactattttaatttattaaaaaaaaactaaatattttgatatattttatttggtaaaattatattagtgattgttttcctaaattttaacaaaggtgacttgataatatgatgacacgagaatatttaagattgagttaacgaggaatatgtaaaattattatctctcaaaacacatttagtggaaaggataagttggagtagtcacccggccctcataagtacttctatgtacgggggaatagaatgatcaccccttggcgtgagtgaggtgactactcctccaaagagatggataagtatttcccaaagggggttagatagtcatcattcctttagggtagatcatccactcaagggtgttaacatatagtctaggaagtaaacccttcaccccctgtaccctcatagtagttcatatacacactaagggtgatagcttagtttaggggtttaacccttaccccaaatacacaccctacctacatacatgtgtggatagtgtaaaacttgctacacgtatcaacaagaatacaagattacatacttctaagcattaaacaccatatgaggagcggggaggtgttgtctcgggggtaccacttcgaggtgagtactaccccccataggggattgattggtcaggctgtactctaggggttaaatccacacaaactgacacatccaatactctctcagcatcatccattaatcttgcatgaagttcaaaagtggttacaaacacatgaaatatagcgggatactaccgcaagaatcagatctcaaccacccccaaaaatcaaagaaatagatgagatattttagcatcaaggtcgtgtctcttgaagtgagacgcaccaatcctttccctctatacagggtcacacatgacttaggaaggcgatccgaaaattatcactcaaagagcaaaaattctatcaattttattctttgcagtcaagagtttgttcttaacctgcaacaaagattaataaaatacaaaggaagtagactattaccaatacttgggactgaatctctttaaattttggtgttctttatcaacatttattaaaattttagattaatttctcactccacatcagttgactaaaaatccaataacattttagtacttttattgagagtttcaataaaaatctcgaagcatttcacaaaaaaaatggtgtttaccaagagatcatctcaagaatgacctgatgaggaaggtgatcatgtccaccaagtcccgtcaatgagcaaccttgctggaaacaatagtgagtcaccaccacgttctattaatggtggcaaaccactactcaggccaccactggccaaggaacaactgggcaagctactgcccaaaccacggctggtcacgggataatcgaccaaactaccgttgttgggcaaacaattactgggcgtatgactaacatccccgccatgggggaggggctactggcggcgccgtcaaaagggacaataccaaaaatttcatctcaagccaaatccatatcactcggggtattggcatctttaggccaaggcgggaaccccatgtggacattgaaagaactgacccacaaatggatcaattagttgatgcaataggacaggtgcaaggtcgtgtccaaatcgtgtataccaagagcaaacccgagtcaagcagctttggctgaaagctttgtcaaccaaaagaggaaactcttgtccaggagcatgctcgtgagatgagaacgcgccaaaatgacttggatgtcgcactcaaaagattgctgacctaatacatatgtccaacaaaatacttaaggtttaagtactgacgctaacaactaacaaatatctcagaattagtggaccaaccaaaaagaagtatttacctctaggaatcaacaacaaagggtcttgaatggacccaaaggtacttgaagatgctcttagctaaaaacttaaaattatcgccaaagtgccaaacactcaccaatctcttctttctttgttagttctttcataatagctaggaaaaatatttagctaagttactgtgttggtttaaacttatttaattatatatttttaaataatgatggtgacatacttatattagttaataattacaaacactacatactctcaatgattttaacctcacaattatgtaatccttataaatatttaaattagacacacgtactgatgatataacataatacaaataatatactatattaatttatccagtaaattatatttgatcaagtaaaacgtggtaaggagtatactagacatcacgttgta

SEQ ID NO: 14295 - DNA, 7087 bp, Cannabis sativa
tggtgtcttttagcaattctcttttcgttattgttgtaattaagtatcgggttctatataatttaagaaaatagttttaaaagaatatcgctaactaatcataaggtgctacgtgctgggcaccaccactgtgtccaatagcaatgccctggatatatatatatatatctgttataaatgttgtttattctggtatggggctctgctaattcaatgccagtaaaatgtctttttatacagattgggtgtgggattttaactgtaattaactaatttgtgtttgtaatttgttctctgtttgtgcataatacaagcttcagctgattttttacccttaaaaaatgagtttagatgggcttaagagacgtgctccagcttcagcttcagctcaatgaactctatcaccgtttctctctcctctcctccatctctcccctctctctcctctccatctcttcaaaacacactcatctctcctcctctttactctcccgccgtcgacctcgccgctgctctctgaggaccatggccaccatgacctcctcttcctccagactacgaaatctcgttcctcttagcgcgattgccgctgagaatgccacccctggtggagcttccaatggttctgcctcctcttcttctgcagctactgctctggctgatgaccaaggtactgtaattcaaatcaaaggttttagattttagaatttgaagtgaagtgaagttaagtgatttcatggtctttgatgttgttatgtgtttatttgaaaaggatttgagttcattgaggagtacgagtaagactttaatgaattcaattgaaattctgcattttgggggttttcttgtgttattgcttttattaggtgtattgtgattgtgacaatttgagcttgagttaatagttcgacttcagatgagatatatagatgattccaaggctgatgttgaattttagatttttcatatgaaatgaagtgaagtgcttcgacgtctttgattttgttgagtctacatttgaatagagtttgagttcattaaggagtaagagttgaataagttgaactggaagtaaaaatttgacttttaggctttttggtttgttgtggtgaatttgaaacttttttttgcttttattaagtgtgttgtgttcgtaacattttgagtttgagttgatagtttgcattgcacaacaatgttgttactagataataaatttacgataaactgttgttgacattttccgggttcaaatgatctatagatgattccacagcagaagttggatatcgtcttcctccaccagagattagagacattgttgatgccccacctcttcctgcattgtcattctcacctcacagagataaaatactatttcttaagcggagagccttacctcctttggcagaactagcaagacccgaagaaaaattggctggaattcgcattgatgggaaatgtaataccagaagccgtatgtcattttatacaggaattgggatccatcagttaatgccagatggtacgttagggccagagaaagagattcatggcttccccgatggtgctaagatcaattttgttacttggtctccagacggtaaacatttatccttcagtattcgagttgatgaggaagaaaacagtactagcaagctcaaggtatgggttgctgacatagaaacagggaaagctaggcctttgattcagaatccagatatctatttgaatgcagtttttgacaattttgtttggttggacaactcaactctattagtttccaccatacccttatctcggggagaccctcctaagaaacctattgttcctgttggcccaaagatacaatctaatgagcaaaagaatgttattcaagttagaaccttccaggatttgcttaaggacgagtatgatgcagatttgtttgactactatgcgacaagtcaattggtattggcctccttggatgggacagtgaaggaatttggttccccagctgtatatacatcaatggatccatctcctgatcaaaagtacaccttaatttcttcgattcaccgtccatactctttcattgtaccatgtggaagatttcccaagaaggtggatctctggacatctgatggaaggtttgttagagagctttgtgatctgcctcttgcagaggatatcccaattacaaccagtagtgtgcgaaaagggatgcgctccctaaattggagagcagataaaccatctacgctatactggtatctattgcaaaacaatatgcttatactctgcatcaaacttgtatcattgttatgataacgtccaactgcattttcccaatttcatttgtagagtccacaaaggtctttagtagatttctgattattaaacaatttatgcacgcgctcgtgcttttgcatatacagacgattataactatttaactcttgaaatttagggttgagactcaagatggtggagatgctaaggttgaagcttctccacgtgatattgtctatatacaacctgctgaaccacttaatggtgaagagccagaaatcctgcacaagctagatcttcgttacgggtttgaatttcatctaatcatttcttttgttttctaaatggtaacccagaatatgtttttatgctataattgttttatctcaacagagggatctcttggtgtgatgattcactagcgctagtttatgaatcatggtacaaaacacgaaaaatcagaacttgggtaatttctcctggatcaaaagatgtcagccctcgtatcctatttgataggtcatcagaagatgtttactctgatcctggctcacccatgttgcggagaactcctgcagggacttatgtgattgctaagataaagaaagaaaatgatgatgggacttatgttttacttaatggaagtggtgctacaccagaaggaaacatcccattcctagatttatttgagatgtatgtgttttttaaaattaactcgtatcttttatcgacaaaaactattactggtgcaacagtggtctaaaccaaattctttcagaagcacaggtaacaaagaacgtatatggaagagtgacaaagaaaagtattttgagacggttgtggccctaatgtctgatgagaaagaaggagatctgcttgttgatcagttgaaaatattgacttccaaggagtcaaaaactgaaaacactcaatattatatcatgagctggccggaaaagaaagcgcatcaaattacaaatttccctcatccgtatccgcagttggaaacattgcagaaagagatggtcagataccagagaaaggatggtgttcaacttactgcaacgttatatcttccacctggctatgatccgtcaaaagatgggcctcttccatgtttgatctggtcttaccccggggagtttaaaagcaaagatgctgctggccaagtccgaggctctcctaatgaatttgctggcataggtcctacatcagccctcctttggctagccagaaggcaaggattacttcacttatattgcaccttataattataatatgttttctgacaacttttttattgctccaattttgcaggtttgcaattctatcgggaccaactattccaattattggtgagggtgatgaagaagcgaatgataggtattttgattttcccttaatgaataatatggatgtgattagtggccaataaggaaaggcataaaaaagttcaatgacgatgaagtttcctctgctagatcatttgctttcaagaatttgtagtacttaagctttttgatttattcattccattggatatcaacaaaatatgttttgaccagatatgtggagcaattagttgcaagtgcagaagctgctgtggaggaagttatccgtcgtggagtaagctttacattttatttcctgctctcttacattgtgatttgaagctcgactctttcaaattaaactcttctggtactatgcttattaggtggcacatcccaacaaaattgctgttggaggacattcctatggtgctttcatgacagcaaacctattggcacatgcccctcatcttttctgttgtggaattgctcgctccggtgcctataacagaacacttactcctttcggtttccaggtttggacaccagttagatacccaatatgttaccattgtttattattttgcagatgactgtatacgtgctttaaaatttagtcatgtaataatattttcctaagttttatatttctttctctctatggtctgaattcttcaatttattgctgtagaacgaggacagaactctttgggaggctactaatacttatgtagagatgagccctttcatgtcagctaacaaaattaagaaaccaattttgctaatccatggagaagaggacaataatccaggaactttaacgatgcaggtaaaaggatcctgctctcttttttttctagaggataatctttgagctttcgctgaatgcacattatccttctttttcttttatcccaattgtaagcttgacatttatcctgtatcttcatcctcatgcagtcagatcggttttttaacgctttgaaagggcacggtgctctttcccgtctagtaattcttccctttgagagccacggttatgcctcacgagaaagcatcatgcacgtactctgggaaacagatagatggttgcaaagatattgcgtgtccaatgccactgatgtaaatgtagatgtagatgggagtaaagaaaatgtgggccttggagcagattctgaaaccaaagcagtcgctactagcggaggtggaggatcagaagagtcgaatttcgaggatgaagtgttcccctcaagacaaaggtcattattatggtaagtaagttattcatcaaaacttctttcacaatttcttaatgttattattatcttttctgtctctaatatctgtgggagtatatataaccaaccagtgagcaactccaagggactccttatattttagctaaattcgaactaaaatagctaacaatttaattttaggaacttttattcatctcactccaaccatactccttattttaagtagtaattgtgcaatatttggaaaaatgaatagggagagctctccacatatagctaactctttagccacttatccaaaatagagagaatcaatttgatagtggttggagcatagtttttccaaatgagctatagttacagagccactattagggagccccttggagatgctctcttcttcttcttcttctgtttagaacaatattgaaaatcatttgtgggttataccaatctcttgttattcttctaatataataatataatgcagaataagctccaagatcaagtatatgagcacagacacaataacttatgctagcaaagataacctttgctaccttgggaaggggcctgctctatttttcttcttcttttttttttaataagaaaaagtgtcacttgtatagttgactgactattcaaaaggtgattttcttctgaatatgtaaattggatcttgtatcccattgatattgatcaagtttggtgtagaataacaaaacatatgatgatgataatggcttacccaataatgaagtttctcaagggaattaattagagcattttgttggattgtacttgaaatagctagagttttcaaaatattacactcttatattgttaatataccttttagtgataataagtaagtgtactaaagatttttcaaaatacatgttttttcaaaaatcaaaatatcttaaaattgtgtatttaattactaaatactaatactatttattgtttaaaagtagaatattttaaaaaatgagtacaaatgtcaacctttaaggaaggtttaattttatcaaataaatagtcctgacatattaactttattataaatatgccattacaattaaattaattaacagtatttatttattagacaaggatttttttgaaaaaaaattaagaaaaaaataatcattttttagaatgagaattagaaataactattaggaattaataagtcattatatttttaacttatattatttattacctaattaataaaatgaaatggatacctactttttttaattcattacatagatactaatttaataattttaaattcaattttcttagtttatagtttttattttgattgaaattgtccattatgattttttttgtttatatggtatatttgtggtgtaatatttctatataattattatatatataaatatattaactttttgatttataattatatttatgtacatataaatattttttgaagttgtgaaaaaatcacttataataaatatgggactattacaaagtaattttttatttacattttctaacaaaatctataaaaaggaagaacataattcatcatatgtataacctttgaacttgtaaaatactcttaattaaatatatgttaggaaaatactaatttgattcttaattagtaatattaattataagtaggattgtaaataatcggacaaaatgaaaaaaaaaaaaaaaaaaccaaaaaatgcaaatttctacctaaattcgatttctagcaaaaaaaaaaaaaaaacccaacaaaattcactaataaagcacaaatcaatcatctaaataatattctcaattatcaaaacaaaaaaataacaacaagaatcaaagaaatatactaaatccattattttcttgaaaatggatattggctccctccaattctttacaatgtcaacctacttgttttcttcaaccgataaatgtatttgttacaagattttagtgccaaaatcttgtacaattgataatttatttgagaagaagagagaaaattagtttggggcatgagaatgcgtaaaagaaaagagaagaaaaaagagaagagaagagaaaatgtatttttgttatggaaggggcattttggacaataaaaaaaaaaaaacttaccttttagaagtttgtccaattttagtttaggttattgatttcaactaatgattgaagttttttttatttggaattgtcttaggtctaatt

SEQ ID NO: 14296 - DNA, 8299 bp, Cannabis sativa
gtttctaggtaaacaaattataactatttgatagcagacccgtatcaagctaattgggaccttgggccaaaaaatctaattgctcttttttaatatgaaaatctttatgttttttgttcttttttttttgtatatatagtggtaaaattctaaaatataatactttgaaaatataattagacattttttcttaataaaatattaaatgtaacatcttaaaaaataaattaagtttttattttagaaaatagtatatttttttaataaataatagtaaaaataaaatatatgggtatttttaaaaaaattaaatttgggacctttttgtcaaagagttttttaggcctagtggggcaaccctgtttgatagaatatcctagcgtgcctctcatattttggtgttcactatttgttttcttaggtttttttttttagttttttaagttttatttcaattatttcttgaataacaatagtttttaagttcctaaaacagtttgcttccatatgtgtgatttctaattttatttctttctcttattaaaaatgagtttttaatacatgttacgtggcacatgaagaaagtggagagtaaatagcatgtatacctagcgtttaatcttttcaccccaaactcgtcttcttcaattcctttactaaatggtatagtaagatttttgctttgcgagtatgtcataatacccttctcactggttcttcactcttatctcaatatgttctagtctctatattttgctttttattgttgttggctccgtgataaaattatttgatacatgccctctttttgccctctatcaattcaagtttggaagctggtcaagccaagtctcctttggcacattgtcagtatggttatttatttgttctttgttttttctccgcaccaatcctatttgtttatcatcctcaaatggagtacatggggagaacaaaataaagcaaaacatggcaccccattcacagatgcttcagatgtcttaagatgggcaagtcattattacgatagttggttaaaagcccaaaaatcacactcttaggctacaaaaatcactcttctaccaagagttgttcattggataactcattctactattaaagtgaaatgtgaatgctaccattaccaatgataatgagattattggcattgatgttcttgttcgtgattctagtagttttcctttggagtgttttgtatgacttgtgcgtgctattttatctcgtaaagaagtggaagcatattggtcctatcttttggtttaaaatggtgcttgcaacttactttttgtattttttttgttgagaatgatattgaagttgtttatgtgtctttatgatggagtaacttagtggagttatattcttaggtctattattagatcatatttatccgtctttccaagtatttattgatgaagtaatctagtggagttatattcttagatcttatttatatgtttttccaaatacttgttgttaagtaatgaaaataattacagataatttagcaagatatgcaaaattaatttttttaatggataataaaactttattaattggtaaactcctccaccaaggaacgtaccaaatcagttgggacatcccccaaactcaaaagataatcaggaaataattaatatagatgctcttgcaaagttatgagcaaccatattagctgaccgtttatcaaaagaaacagaaatattttgtaattcaccgttgatagttttacattcttggataacatacctaaaggtagaaatcatattaaccttacttctcaaagcttgaattacgaccaaaaaatcagactctaaatgtacttgaggccaatcctttgtcttgatccaactcaaagtctcacgtacgcccatgactcctgctaaaataggctcaacattgccttgaagcaagcgagtacccccttcaatcaagagcccaacaccatcatgagccacaaatccaaaaccaaaggattgaaattcattaaacacatatgtatccacatttacattgatgctattagcctgtggtactacccaagactcagctccatcaccaatctcataaagagaatgtaatgtctcaaaatttgatgcctgagcctttctccattggtcaaggtacccatatgccgaagcaacaatactagtaattccagaaaccttcttattccacaacttctcattcctagctccccaaatgcccaacacaaagttgatactagacaacatttctcattatcagcctgttggaaacacttagaaacccactctaaaaagagtccccaatagttacactagtccctatcccaactctgttttaaattagctaaacactttgacaagtgactaaacagtgcaggatagattcctcttccaagttacagatggggcatagggaactcacctcgactcgcttagtaataagctgggtcatagttggaaggcaacccacaccagcacgccacacaagattcttcaccttaggagggggcttgagcttccaaaaacacttccaaaatcttgagaaatcattctcctgccagcgcccttgtgttttctgtagcaggttgtaggcattcttgactgaatacaccctagagacttcttggctctaaacatagtgatctaccccttgattaggatgcaaaaggatgcctaagatgaggttaatatcacactgctcaaacaggtccatgagtagctcttcatcccaacctctcccatccattttcatcaaattactaactttagcatgaaataaggttggataagacgataaaactagcagttttgcttcacccggaagccatggagaattcagtacattaatattttcaccatggcccacacgccaacggatcctttcttttactaacgactgagcctcccaaatgcttcttcaaacaaagattgagttagcaccaagttgggcagtaaggtacatgtcattaaggaagtaccttgctttgaattcttacagccaaagaggatggcctttgtgagaaggtgccaaccttgcttgcccagaagagcaagattaaaatctcgcaagcaacggaagcccataccaccaacaccttaataccgacacaatcgatcccaagaaacccaattgatgcccttacctctaaaactagaagacttccaaaagaaattggccatttgttattccatataattattgatctctagaggaagcagaaaaatacgcattgcatagcttggtaaagaatgagcaattgacttaatcaagacctccttgcctactttagacaacaattttccttcccacccttgcatccttttacgaattctctccttaagataaccaaaaattgttgtcttattacgtcccaaagttactaggaaggtcgagataaaggctattatcatcagctatcctcatttgaagttgcttgcataaactgttacacaaactgccttcagtattaagactgaaaaaatagatgatttcccataattaaccttctgacccgaagccctttcaaacttatgcaaaagttcttggagtttgaaagcttcacctgtcattgctttgcaatacagataactatcattagtaaaaaacatatgagataatttaggtgccccgtttgtaactttaaatctatgaatccaaccttgcctcccatacttatgaatcaacgcagaaagaccctccacacacaagataaaaaggtaaggtgatagtagatcaccttgtcgaatacctctagtggggattatagggcccatctctcgaccaccatgaataatcttatatcttgcagaagtaacacactgtaacaacaaagaaacccaactaccatggaaacccattttgagaaggatagcctttaaaaagtcccactcgatacggttgtaagccttactcatatcaagcttaaatgccatgtagccctctttacctttctttttacgcttgagatactggagcacctcaaatgagaccatgacattgtcaaaaattaaccttcttgggatgaatgctctttggaagaccgagacaaccgagtccattattgttgtcatccaatttttcataacctttgtgatgattttgtacgttacattacagagagaaataggacgaaggtccgccattctctcaggattccttctcttcgaaataagcacaacgtttgcctcaccacacccatattcaaaaacacccgtattgaagaaaccatggacaaactccatcatatctttcccaataattgaccagcatttttgataaaaagtgggagtcattccatcgggtcccgaactcttatcagggtgcatctgaaaaatagctcgcttaacttcctcttcaataactgcttgtgagagctctaaattaatctcatctgagatgctatgttgaatataattaataacttcagtgaaatcaactcccaaagcagtgaataggtcttgaaaataatctaccataacatttgagagtccatgatcccaatcaacccaatcatcctcgtcgtttctcaacttttggattgaattattacttttccttgaacttgttactatatgaaaatacttactatttcgatcctcttccttttgccaaaattgttttgccctttgcttccaaaaaatctcacgttgatcaagaatttcaaaaagtcttcttttaatctccacatatctttcaaccaaaattgcatcccttttatctttcaaaaaatgccactctctttgacattgctggatccttttttttaaatttaccagttatgtcttctccccaaatcgagagcttctcaacacaagaagttaatttatccccgaaggtattcaattcgtgactattccaaccatctttgataatctaaaaacacattggctccttaagccaagcatttttgaatttaaactgacgagaaggaataaaatcttgttgagtcaaaggttgaagaaataaagggcagtgatctgatgtagaagtctccaaattagtaagttttgcattaggaaaaagggaagaccaggaactactttactagagatctgtctaaaaaaatttcaacccaagaatcactgccacgactcttctcccacgtaaacgagtagcctgccatatccaagtcacagaggtcacagtctgaaatgacttttggaaagccttcaatgagatgcagaggataggggttcccccctcttctcttcatgggagacaatgttgttgaagtcgcctataatgcaccaaggcagtggggagaatttagccaaccactgaggagattccacaagttttggtgaagactccgattaggtttcccgtaaaaacctgtgaggtgccaacggggataagctgaactcagaatctcaacatctatgtgattgtttgaaaagcccattaaagttacctcctccccaactttccataaaatgcaagaccaccacttataccttgggcctccacacaaaaaactccctcaaagcccaattgtcagcccacccaattaactttgtcttttaagcatttagtttcacacaaaaaataacactgggtctcttttgagtaacaagctcttttaagaattggacggtccatgggttcccaagcccacgacaattctagctcaaaatattcataacgtatgacgagtctgtaaaacagagcccgccccaagaacattttttggaatgtcatctccattgtggcttaaatcattttcaactttctccttataattagcatcactctccctatttttggtaaggcccaaaactccttcctcaccactatccaggcccatgtcattatcaatcaattgatccactccctcttccatatcacatacatcttcaaagcccatattcctaccattaccatgggcctaattaaattatccttgtacgcattctcttagtctccaaagtaatatgacttttatttgaatataattcatttggagccaaattaaatccatcttttgttggctttccttttaaatcttccatattaggctctgattgtgtctttttaattgcctccaaatttatatctcccaatccctgattggtggccacattaatagccatattttggtcaattcctggatttcgtggtactaccaagttggtcatctttgagctacctaccaccatctgagcctctgtcgcgtcttccactgaagaacccttgacaaccacccttaatcttagccatttcgaaccattcgaatgatttttacgtctcagatccgctttcataccaagaccatatggtttcacgataagatgttttgagatttcaaagttctttccacaaaaacgctcagaatgacctagaatatcacaaataaagcagaaggtaggtaggtcatcatatttgaactgagtagtgcaacaaagtccaccttctttttctagcttcgtcttccttttcaagggcaaatccacctggagataatcacgccagactcctgtgaaattgttgggatcagattcagcaaattcaccaatgtaatttcctatgtctcgaaccacccttgccaacataaaacccgtggtcataccatgcaattgaacccaaaagtacaacctctgtaacaccaccatacacgggttctctctttctttaagtcgttcaaatattagagggactcgatcgaacgtccctctaatatacaacgtcaagttcatgataaaactaaaaaagatatctattaggattaagttccttaacgtacaagtctcttcccggtctccacagtgatgccatcttatgccgcattgcatcaaaatcgagtgagcgattcgtgagaaaatgcccaaccaagcaccaacggtcatcaatctccgataggtcattggacccatgaccatatcttatgactccatcatcatcgtcttctaacgttatgttcatatactgattttctaaactaaattcatttgttcatgttgtagccatggtagcgataacagatcaaaaaacaccaaacaagacttataacactggtaaaaccaaagagattacattaccactttgtcaaaagacaagacaataaatggtacaaattctacaaaaaaaaaaaataatttaaatattttaaaaacttaaaaaaatattaaaacaatttaattttttcccgcaatttacactaaataattttaaaaagattttttttttgaaacatggattttatgtcacaatttacccttttatatgatttaatgaaggttttttttttgccgatatagtctaagaacaagcgaaagtagggtttgaggaggattatctctatgatcgatcgtctttatattttttgagaacaaagaaaacttaaattttcattgagaaactgatcaacgttttagtcaagtatcttgatcgtcaatggcacctcatccttctaaaaagtttcgctctgcagatcaatttccaaacgatgactataagaatcctaattataccctacatgaaggtttattttttttccctaaccattacttgaataaattattaaacccatatacaatttctcttgatttgtaacatattgctcgtaataattgctattatattttactattgtcaactgtttgattaaaaataactattctttatttgaatagttagagatgctctaccaagtcaccatttgctcaaaattgagtctttttcgtcccttgtgaaagcttcggtagaaaactatagctctgagtttacagcaggaggctacaattggtgtgttcttcttcttcttcttattatttttttttaatttagatgaagcaaagtgtgatatatctatatatatttatgtattgttccatataaatatatatatatatatatatatatttaattagaaaaaaagtatacagatagaggcacagagctaattatgttaaataatatatttgttctatgaaatttttaactgagttgtgtttaggaaattttctgtatacccaagtggggacaagagcatagaagggaaagatcatatttctttgtatctggaaatagtggaaacaagttctttgcctactggttgggaagttaatgctatcttcaatctctttctctttgatcagattcgtgacaagttcattagttttgaaggtatcttcttccttatcttttaatatgagatgtgataaccaaaaacaaataactttaattgtcttttagtaagagaaagctacaagaaacaaacttaagtttctctattttatttttcataatacatcaccattttttttttttgtaagtttttacatttacatcatac

SEQ ID NO: 14297 - DNA, 6398 bp, Cannabis sativa
atctacaaaatggatatgctttacgtaaggaaacgcaagcttgataaaagaaatacgtatggatacaaccttagatcaactccaaccacaatatctcacacaacactcaaacaaggaaaacacagagaggtataaacatgtattcaatagaataaggaaagtaaaatggataattcacgagtaaaaaagcctggtttcttccctgagcaacaatgctctcacaacaaaactaaatttctgtttctctttctccataccctcctctcctatttatattttaccaaccgaatgttacaaaatctttaacagactccattctcactactgtaaactaactaattccccaattgacaatcacaattaggccttacaattcaactaaccagctaacaatacaatcctaacataatattagtgatcaaggaagttggaaagattatttaccgatcattgctccttgctcgtgaactagcacagcaagatctttaaagatttcattaacttccccaatttgttgctggatttcttgtattccttgttccctttcatcaattatagcctcattgaaggcaatttcattgtccaacagcaaaacttcttgcctacagcacaagccatttacaacaaacaatatgcaatctcgtgttaataggagtttacaaactacagaaaacacacacgcgcgcgcacacacatatttctaactaaataaaatgattatgatttgtcaaatcaacaataggagggtagtaacactcaaccctccaatgttaacaaaaataggcaacataataagaatgattgcggtaaaccaaggaatcagtaagaagtaacttccacacttatcaggacatggtgaagcatatcaaaatctggactgaccatgtggcatagcaacaacacagttctcagggattctcttttggtttatgcgttaaaaatcattatcaaatttatcatcaattgtacactaaacatttataagtcatcatggctgaaaatttacagttaccatccaggtatactgaggttggagtttggacctaactttgtgagtttatagctgaagtgtaaaccaattttatggcatgcagttgagacaagactttaagtatctcttcattcttctcccaaacaatttcaatctatgatgaactgaataagtaacatttaaacacaaatagaactaacctcctcgattccacaaggacagcacgctgttctgaactcttatctgaacttaaatctagctcaccagcggtgtaactgtatagcataaaaatattaacaaaaaagtttaacaattgtaaataaaaaaaacagaataaaaaatagcacaatgcaatataactcctaaattgtaaaaaaaaagaacagaataaaatatagcacaatgcaacaggtacgagatgcaagcctgcaagaaaaacctccaacaatatttgagaacaataatcagcctctttgtagagattgatttccttcctaaattcacttttcacagaaacaataaataagagctgtatttgttcggagactttcacaaatacctagaaggaagaactgcttggggaacaaatggtgaatatgctgtttccctctcagcagcaattcgctgagccttctggaattctcttaggacggattgaaaatcttttgcaagtttaacatctgcaattttcttgctagcctgcaatacgattgatgacatcaaattagtataaattgaaactaagaaatagccagatcatgaaataaaaagaaaagtccaaaagtacagtggaaaagaaaatctgaaaagtgaaacatgaagcctaagaagaaagttcaaagtaacaaaaaggaagagttgaggaatttcaatcaattcaatatcctgggaagaagacatatagggagttcattgaaaaggggagaccaggttgaagacccactcagtagttaactaaacaattttacataataattaatgatttagaagaaggttcctcctacataaacaaccaaatttccaactaatacctcaaaaactcataatgaatcatctgctatcttagaccaggtaacttccaatgataaaatggctacaacaatattaaagctaccattgaacatggtaagtatctgaatgaagcaaaaaaaaagtatcttcactagacaaaagtagaaaccaatatggactgatgaggtggaaacaatgaagtgttcatgaatcataacccatataaataaccaatatatatatactaggtattagtaacatgcaaagcatacaacttagagttgtattagagttgttattacctaattaatttaaataataataataaaattaaatctaaaacaactcaataatattttttaaatatataacatttaatataattttaaatttatttataaaaaatatatctaactaattttattaaaccataaaataagtaaataagtttagatattttaaataatataactaataattttttttacaaagtatgattaattaattaaattaacctctaattcaaatttaaattaagatttatacataaaaataattaaatatttaattttgttgatacttttaaattaaatttaaatatttaaaattaatttttttcaaaaaaaaaaagatgattaattgattatttaatggtgttagttttaaccgtttaactttaacgaaaaaaaaaacgttaaaccaataatatctgttagatagctaaatttaatataaagaagatatatatgtatgtatatatatatatacatacatacatatatatctactaaagtatgtaaagtaatggtgtttgtaaggggtactcaaaaaaattacattgacaccagtatgatgatctctttcactggccactttaagtttctctgaagtatccttcaccaattgcccaatatgttgccttgtcttgtgcctgcaagacagcaaaagtcaagtttaggaatatcataagaagctaaattcatcaaagaaacaaatgataagtattccaaataaaattgcacagaacaaactcagcaaatcaattccaagacttcatcctaagaagattaaaatgacctttgtgcacatgataatgttgatgtttaaccgtaaaatcagtagacaattggtgataaatattatgcactcaattgccctgtttaaatttcaggcactttaacaattgttaatcttggctcagatggaaaatccacggtaaaatccaaaacaaaatgggtcttctataatcatttggtgcattgaataaccatgtccttcaacagaccacaacctttcttcctttaatgtatatatatatatatatatatatatttttttcctttaatgtatatattagatagaaatagaatgacaaatgataaaacatctccttaaactaaaaccaaagattcgaatcgctaactaaatcagtgaaagaaaaaacttcaaattttcctctaaatccatatagccaaccaaaatttaactttccctattatagacatattccctccacaccttgaaagattcccaatttctttcaagccacagagcccagcaagctaaaactacaacaaacgacggcttctttcttccatcagccaacaattcaataggccttgcaccatgatatcatggaaactatagagccaaacccatagaactcacatcccatcaaacatcaggaccaaagctttgcagaaacagagtttgttgaaagagatgtctcttgactcattattctatttgcaaagaacccaccaatatggtgaaatagctaagaagggtttctgtcttcgaagtacacattagtatttagttttcccagaaaaagtgaccagctatatacaacttcgatgggcatttgacttccatatgaaatagtatgttgagtaaactaacaaaccatctaacaaaacaaattttttgaaatatagactcaaataattcagattcttctaacttcaaaatgcttctatcaatccatttatgcagcacaaaaggaagctgactcaatcaccaaaattaattagttctgaaatctgaagtgtccctatcatttaaattcctaagaaatttataaccccaaggaaaatatcccttctgatacaaccctcttgatgcctcaaggaaaattatgagcttctaaactataaaatataagaaacttatcaactaggcatgcatctctcacttaaacatttaccgctatttggagttaaatgaaacgaatttgcggaaatcgtcttaacaagaagaaaaaaacttccaagggaatttctgtgtttcattatatcccatttgtttggttgaaagttgtacttttaattactttgtatcataaataactcttttccgacaggaatctccaaagccactgtatgtatgaactttatgcaaattattatattgccaatgtctaatgccactctttagatctggcatactatatcttcatttagggatccaaaagattggaagtgctcaatgttggaattgcgtttttagctggttagtgcattttgggtattgtcagttaggaaattaattagttgtagagtattctaatatttgtccgatttgactaacctctacacttgaaataattttttatttttttttttgaaaaagagaaagaggctacttgtcttagactgagttataaatataaaaaccctcacctatggcggaagaaaatcgtagttacaataaagtaatttttcgtttactacaaagctgaagtaaaccctctccccgtttacacttgaaataattaattagaaaaagaaaaggttattctaatcaacaaggggtatcaaattgttttgtattttgggagaggctagctttgtgctttcactgaaataagagttcattagagttattccagaaattgtctttgacagagaagaaattccagtcaaccaaccacaacctttcttaatataagtgtcagaagtaatgcaagctatgcagctacatatgtaagtgcttgggacttatagagagaagtccactcatgaataaagcgctttatcatatttaatactcctatcaatgattcacaaggaataacaaggataagagtttataagtttcatgtatatagtaagtataatatttgtcaatttaaaaaattggctctaccaagcctggtgcgcaggtgcaggttcctcatttcattctcctctggaacctgtgtgtgtgtgtgttttgtccctgtgttattcgttcttttcatttagttgaatgcaaatcctatttattcaaggagaaaaaacgagaagaagatagttgcgacaaagttgtaaagttgaaaccagaatccaacatcctatcatgtttaaggcaatgcaatctaacagcagctacaatgtttagtctgttctcacattccgtctaaagtttgtgccttccaacagttacaaaccaatgtggatgtaaatataactccagagaaattaaactttgcgaacatagactggttccacataaaaatattacgagaacagcagcacttgtttcctattagcaataatgggttcatgcatgcacaatttttaaatatttctcactagaaagggctataaagtttcagcaactgtgctctactcattccgcatagttttaaagaattaccatgaccaacgatcactagtctaatatctactaaaacactcaactccactcatttataatcaaattttaccgctaagaattacacctattgaaccccgcgcatttttaattatccccagcaatagcaaacctaggggacataaatgatcgaatttaagctcatcggaattactccaaaacagaccaaattctttatcggtaatacataatagcatttcagtaatcaccaacatagaattattaaacgaataataatgataaaagaaatcaatcaaacaaacaaaattagtaacaagcaagttcaacacagtgagagagactcacagcttttcgcggagctctggcgtatctttgggtgtaccgagggtgttgacgagcctctgaaaggtcgaaaccgccgtgttgatctggaatatgccagaggccacggcttgagtcgggtcctgcttgccattgatcgtatctctcctcgaagaacccgaaccccgcccggcttcgagatcctgaaagctcattttttttttttaatttccttatctcggttcccgcttccctaaccacacggcctaaaaacaattaattttcccaagaaaattcggagctgattccgagaaaattccctggggagagaggaaaggaaacagaaagcgggtgtgtttgagtacaaagaatggtataaacctaaaccgtaatgggagaactaggactcagagtcggaggaagaattagagggaggaacaatgatcgaggcgatgat

SEQ ID NO: 14298 - DNA, 14284 bp, Cannabis sativa
tccatagcagaagggccaatcatttttctctttaaacagccggaatgatttggctcgcaacatagcaaacggtcataggctcatagcccagttgttccacttgggtaacggtgagaagtagatgcaattcaaaattcaatgtttcttcaatagcttatttgctctactagagaagttcctaacaacgcttttgtcagagaatgtcaaaggaagctcctcctcaatagtttctctttgatcagacaaacctatggtgtcgcttgcctctttcatgtcctctccatgagatgcttcagttgaattaggatcttcaggtatatcatgatacaagtgtttcaaaatgaaaagagcagtatcatgatccctccaatagtttctgtagccaaagttggactagttagaaggataatatatttagacttgtattaaaagaacttgaagcccacataacaaagaaatctgaacctatgatatcagttgtttctttgattgttcaagaaatggacgtgataaaaacttctgcaaatagtttattttaagttttccggtcattgaacggtaattaatcttttaaagaaatgcaattctgatcagaagggtttatttaaaaaattgatctataaattaataaataaactatccgtacgtatgtgatccaatggcagctatatatggatgctggaacgttttatcctgcacaatcaacaacaaagactttcagaaatcagaggaattcattctaatattacgagagaacatctgatttctactgataataagtgtaggaggttagccatggacatgtgacttttgtctccttctcaaaaggaaaaaaacaagtagtattacaaatcattcgtgattaaaaattcactaatgggatgtttactattgtattttataatctgacaagaacgtgaagataagaatacactattaagatgtgccaacctttaattgaaatctcagaacaagacttgccccacttaacacaccctctaactaaaaaccagatgtcctatatctatctatatggtccaacttctgaggtaacaaggtaaattgaaggggatgaagcacatggttttttgttattttcaatattattgggaatggctttgggtgcttccaatattaattaataccataatataacagaataacactgtgacaactcttcaggactaacggcagcttcacagacacaatcataattcatttcctacaagagtaacacctaacagcctgaaaccaaagataatgtcttattgttcaatgaaagaaaaattacttgtttctaaaacattttatattttggaatgataaatctaataaaggaaaatttaagaaaatatggcttagaaaaatccaacaggctggagagctaaagctacgtcgcatataaatgaagagaagccatgataaggtaaaactacccacttgaagcatgtgatcgatacgtccttctgtgcttcctgttaatttctccatcatcagagagccgtatgatctctcttctctgacttcggctgtttcttctcctacaacaagcaggggaagtgagaaaatggcatgattagattagatagaataactaaattttagagctgggtagtttagggtatactttgtatagggttcaaatttgatttgatgttcttaaaaactgtgggacctaattaaaaaacttgattggttcatcatttctgaaaacttataccaaaaacaaactcaaaattattgatctaaatccacctaacctgtatcaggaagcataataaaattcactgttggcaaagataaatgcctacttaagtttctttcacttaagattataccaggaaacaaaggaaaagtaatgcaagccaaacagatagtagaaccatttaccttctgagtcatttcttgactggcaaaccgtaagcactttattctgttcaaacatagagaagttagagtgtcaagcttcacacattttaggaaactaatgatcaattcaatcatacaatttgactactgacagttttactttatacatatgtaaaactcatgaatgacaaggactaacattagaatatattagcaaagagaatagcgcaccctaacagagcttaggcgatccaccatagcttgagaacgagaagctacgtcttcagcaaattcctacaccacattgtgtgatctcttcacgggaaagaaaagatagatatttttacaaaaatacacatttagacgcattacctgtaacccaatgtgcaacctttttccacctttgtggtatggtacaaggacaggtcgtttgccgatgtaatctttacaaacaagaggttctaccctgtatgaatcacaacttaattcattattttttctacatttaacaggagctatcacataaagaagaatgttcaaaacatgtaatgtataataatctctcgtacatgcttgtgagcaactttttatatgtttgagatgacaacaaacaaggaactgtggagaaatgaaaccaacaggtgtatttgaaaaaaaaaaaggtagaaataatggagaagcaagcctgcattatgttttgtttctcatctcattttcgggaacttttttaggaaaataaataacatgatgatgcatgagaaagtagaaaagaagggagaagaagaaaagagagaaaacttaacaaaaaccataaagttaaacataagtatttatgaagcttttaagaggttatttcctgatttggtactaatctctaatgcgagaaacaaaagtattaaggagatgtctgttgggggtgaaggagtgtcagctctaactctagatgggaattccatttcagaagaaatttgagagatagagaggtattagagttattacttctgattcaaatactagagtagaaaccaatttatggaggattcgagagtttggcctccaggttctagtggaattttttcttgtaagggcaccttccaaagtttagtttcggatcagcctgtgaaagaggaaaggtgggctaagatggtgtggaaaagctgtgctctatctaaagtcaaggtgtttggatggttgctaccagtgcaaaagctgaacattcatgaggtgttgcaaaagagaaggccatattaggcgctttccccggcttggtgtgtttgttgcaagagcagtgaggaaactctcacgtttatttcttgagtgtcattcaagtcaacatttgcggagtagattgtcgagagagtttggtatactgtacaaaattgtagtcagccattgtcttgcaagaggagggaagaggagttctagactttggacagcagcagttttagctattttgtgggctgtttgattagaaaggaatggcagaattttcgaaaataatagaaaataagggagaagatttgtgggataagattaaattttggattgcaacatgggtttatagaacaatagcttttgataacctgttgtctcaagatctccttaccttagagagtggggttgtattctatcccaggacacctcctttctggtttagacatgttgtgctataatgttctagtattttctagctgtatgttttaatgttacaatttttgttaccacggttttcctccgccgtaagtgaggctccctacataaagttgggaggaggtcagtccatgacttgaccttcgtctctaatcaaaaagaaaaaccatagaagaatttatccaatgcagatttttatttaaattttctgaaaacgagacaagttctaggactgaccacctcccaagtttattgagaacccttgcttatggcgaaggaaaaccttggtgacaagaaaacttgggaaaaatctagtagaaacaatcaaaactctagtaaacacagatgaaaacatggtctcctaaattacaaactaccaaacagaaactagtacagtaggtttcccgtctctacacatctttaaaagaaaaatctacaaaatcttttgttttataaatccaagtagcagaaaaacgattatgctaccatgcttcatgtttagtgtctagtacaagaaaagaagagttagagtgagtgaagtgagaggtagatagttgagctatgtaaccacttaaaggatttggactatgtaagttttaatccaaaattcttcataggacgctcatgtggcatccaatggagataattttattacaaggtaggttatattgaaaccagtataaaagatagcatttttacatgcttgatttctaagtgaaaggaaacaagaagatattttgtcttggtcccgtatgaggtccgataattaaacttggtcttggagcctttgcatgttcttgtgaaatttataacctattatgagtgctgctttccagtataaaagttatttagttggagtctgaattcaagggttcttacatatcaatacagatctcacaagcaatttaactcccaaaggcaatttcccattttcaagcaacgatgttgtcaattttaatgatggaatttaatttctgtttgtcctttcacctagtccgttgcctctctcttttcacgtttttttttattttccttttcttttccatataattttcaatcctgataacttttataacctaattttctcaaagccctttgttagaaaaaaaaaattacacacaacaatcatggtattccaatagatcaagttcacttctgattcttcacagaggggaaagaattcaaatgaacctcttaagaaaacagggggagggaaagaaacataccgatatgctacaggatcaaaagggtgaaatatgttgaacattctctgacaagctggaaactcctcattaatattttcctctccccaataatcttgcccccttcctggagaagaaagcataagaaaactcatattggttaatggttcatttttaaaataggtaaagaaataaggaatcgtgaaaagtttaaatgcaaaagatgcacctcaacacatccactagcctacccaattctctaacgttaataagaaagaaaaaaaaagagtaatctaggatcaacaagagaagatacacaagcacatggatgttagaaggtacatatctcataatttcaaatttagttgaggtaagccagggagagaattgagaagggtaaagaggaagatgataagaacatatagaaagaggaagatgagaagtacatataaagaagaggaatttagagaaaaacagggaaatagatacaaaatagaattacatagattgaaaaaacataccaaaggaaagagttagaggagcattaagagatgcaaaattaattttggtcataatctgaagtatttttttcattttttgttctttcaaattttcttgagaatactatgaatagagccccactttgagaaaatacatagaaaatgagcattaaaaaatttctgcacaaaaagcgagactacattattatgtaagattacatacaaatagtcattaactattaccaattccaatacgaatgttacgaagagcaagaaagacaccaagaggagatccgacagcaaaaaaagtgtcaacctgaaagaaagaaaagaaaagtaaaataactaaatgagataggattattgcaatacaacagtcattttaattccttcaggatccttcaggaaacttgaaattttgactttcaaagcaaaatgaagagacaatatgtcataaaaattaaattagagagagagaggcatatagagtctgcctccagcaccttgaattcaagttttgtgtaggtgatatacggggtataactcttcagggaatcatgatgatcagctggcagcttgttacatatgggttgctttactacagttgtaggtgctgcttcgttttctgttatcaagtacatcaaaacttctttccaaagctagaacaaaaggcagaataaagaaaataaagcaagaaagagatactaaataatctagcaatcacctttgtggagcctcatagtcctatcttcgccatcacattgcaattccaattctgctattttgaccttcagggattcaagctggcggaggaagaaagttaccatatatgagatatagggttctcatagacgggtactcgaaataatgatttttcttacctctttactcagtgctttaatttttttttccggatcgtttttctctgcacatatttcttcagacactagttctgaggcatcattacagactccagaactataatccgtagttccataaaagttgtccctgttatcaagaaccaagcccctaggatcataaattgattcaggaacatcttcattacaacttgattgattggagttgaaaacactttcagataatatattgaagtcaggtgcaacagtatccacaatggtagaaacaccttcagtatttccatttgatacatcatgtactaaaagagttggcagcatactctttttttcatcatctgctgtagcaggtacggaggaatctttttccccctgattagatacaaggcttgatatgcctttctcatgtatcaaaagagctggtgatgacctctgatttttagcatcaattgaacccaccatgtcttcaatattgttacttgcagatgttttaacttccagattgagtgaagagttgcttgcagaagactggtcaccttcagcatgttccctgtacattgagtccataggaaatggagaggacaaattttcctggtggcagaggatatcataggagagaacacttcccaaagaatgaccgtatatagaaacctgtacaagtcttagcatgatataaatatatatatatatatatatttataactttaaatcaatatatatttatttatgtgtgtacctttccatcataaccagggttcctcttaagaaacttcaaatacaactgatttaattgattggatacctggtcaagaatattactcttcagttatttacgacataaaagtggctgttatctctaacataaaaggcattttattataaacgatttcctgtagtagttcatagaagaatagttttgttagagaaaagttcatgcagtgtattcatgatgcaactaatttaaaatccccccatagcacaattttgaatgatcactttaggacaatgcattcattcaattggattatattacattttttaaaaaaaataagaaacaatatgttgtataatattaacaaggaaaaaaaaaacgtatcacccatcgatgtttgacacctaactgacctaagaaaacaattttaaaatctgaagtagtaaatatccaaaaagctacccaggactttaccgctatttgattatgatggaggggggttaatggaaagtaaagattaactaaacagacttcaaatactccgactgtaaaaagattgaaaacacagtaattaatatgcaagtttatcctccatccacgtattaattttttaatacaaacaattaaaaaaatggttgaatgtctaacaatccaggtagtagtacattagggatcaagtatgtgctaccgagttgatgatatcctggcagtagatggggctcatgtagtatagcacatcatgagcagttgcactcaacatgacacgcaggcccctaacaccatctaaagtgcatttttccactgctgtttctccactaagctttaaaccttttctccactgaaaaccaaacccatggataagaataacaaatgttagacaacgtgtatactgataatttaatcaatcatatgaataaggtgatggtgaggaaggaaaaatgatctaacatataaaaaaatctcttacctggcatgggatgaataaaactctctgaatgccactctggtgttgagtaatgtggcgttctgctagacttgctgtgatatggcgaaatgtaccaacatcatcgactaaattagatttctccaatctctgtccaattccatgaaccatgaagaccaggtgtcgtacaggaacctacaccaaatacacaactttaaactgtatttcttatcaagaatgcacaaatttagatttgttttctcttatgttggtgtgaccctgttaaaacaggccacaacaagatccatctgattatgtgatagaacactttaatattgtttctttaataaggaatgaaccaaaaaagaaaaagatacactgacacaagtatgcatccccaaatgcagattagtgtacttaatcatcaaatttagaacattacacagtatgattagattacatgaaacaaattatagtagattgaaggagctttgcaactacacactctattcatcaagcattatattacaaaatcaaaggagctatgcactcgctatttcatcaagcaactcgcttttctattctgtacaaattcaacagcgagagttattttgtgtcaacagagattttttttccttttggaagatacaggagcaaaagaaataatttacttctgactgccatcttatttgtacagaattatatactggttaggagagattactaccttgtggcaatcatcaatgtgaactttcgtaaaaaatgtaaaaatcatcaacatgagctagcaagcaatatggcaaggcttggcaaagaccaagcagactagacaattgccaagtaaatgggttgtagcccttatggtggcagccaggttcgacatggtatcacaaaaggtggagaagtgcctaaactgaaagcctttgtgggtataagttcttgaaaaattgacacatttctttgggacttagtacaatactttgaaggagcgagcatcattttgaagatcccacatgagtatgaattggttggtggtatacaactacatggggtagagctcactcccaaaagacatgcctatgaaaggagtgccttataaaccaccaactattcccatacgtagtcgatgtaggatcttaaccgtttataatttaagaaagccataatcaaagagaacatgaagcgagaaactaaggagagagaaactcttagtctcgatcccttgataatttaatttattttattttatttttttttgaaaaagagaaagggacctcttgtctcagacaggaccctctctgctatatattgaaaatcctcacttgtaaatggctcaagttgttacatcaactagttggatttgagttataagtaattgcaagtctcagcatgaactaatatttgagttgcaacaatttatatgttgtaaattgaactctcattatcaccatatgataataaaatatataaagccaagtatgcaatatatacatgaccttgatgaatatgagaatggagttgtcatggcttagaagcccccaaacatttttccaatactttcagtactctttgcagcattataaggctcaaattagtgttgataggaaaagattactttgttgcagattaaccatcaatctgaacttgtgaacataaatttgacagggtttcaataaattcgaaagtatcaagtgtgctgggaaggctattttgaaaacaataataaaaataatgctattttgcaaagtcacatcaaaaaacataaatatcttactaagcactccttatattagatagccaaatagctatccaatgccttattttatcccaaacactccccttatttccctcaaaatcttctgagtgttctcctttttctttaaagctttaaatcacactaggtatcgacaactgcgctccaccaaagactctactgggctataccacgtataacattacaagttagtagctcaatactgtgttggggtgtacacccgcgtaggttgaattccattcacttagatactctcactccctttcacgtgtgggtctacatcaaacaaagatcagagggctagatgaaaataaaaaataataataaagaacaattggcccatcaagagacaagctagagagttgcaaattgtaaggatttttttgggaagaaaaacagccctacttgtatacaccagggatcctagttttaaaaaaaaaaaaaaagagcaaaggaaagtatacacaaatagcgatgttctgaacacctgatctcctactataataccatgagctcaatattatgaacgtaattctagccttccttgacaattcatagagattcaatactcctttgtaggttagaaggcctagctttctagggctggttaccaaaacatgtgcacatacaatcaaatctcctaaattaaatcacaaatcatctcctatttatccacagctttctcttattgttattaaaaaaaacattgtcaagtcagtcatcattcatgatgctaataaactgcctcaagccaactcataataagaaaggaatattcattgttcatgatttatgtctctttatcccctctccattaaatagccaatcaaaagcatttttattactttcaattttatcagataaccaagcaaaactgttatgactttgcaaaggaaaaaaaatctgaagtcatcatctataaatactgaatttcccttgaaaccacgataaccaaaataattttactagccaaatattgaaaatgaatctggaaaccatgatatagcaaacagaaatgcaagagtgcaaacctgtgaacagtaatcatccatttcttcctccttccgttggcgtatttcatcctgaattggagtgcaaagagaaaaggcatttagcaagagtatacattattcaatatttgttaaaaaataggagaaaaacatagtcataaatcaacaattcacaaaatagtggcaagatataaaatagataattttgttacttacctaatcatatgctcaaaatgttacagttagaaaaataatgaacaaaggaggaaaagtataagcaaatgttgtcaccataatttctactgtctactctaagccatgtttaatttcctttctcatgaaaagattaaaataagagagaagcacaaagaaaaataaagtttcaggcagagacttgagtaggttttgctgagtgagatgttgaatatccacgtcttaatttgattccctttgcccctaaagtaatgacactagaaaatccagaagcctcagtattgagccaagcctcccaagtatcatcttctccagtaaaaagagcatgcaatccctacaattgcaacccaaaatgcaattatgaatcaaatattaactgagattatcaaatcctttatgtagaaggaaaacattgtaaactacttcataaagctttactatgtaccagggaaccttgcaaatcaactcgagctgcaaaaagacctgatggttggaatcttcttcggtgccaaacctggaggtaattattgaataagccaatgtattcattactttgcaaactaacaacagagggcactcaaagtaaacctcagtcagaaaatggtgagttccactatttattgaaaacgaacaaaggtcgataaaccaaagatgatgggagcagtattcatcaaaatctctgctcccgtacatgtagaaaattaggctgattgaaaacgtctaacaaataatttttttttttagagagagagagagagagggaccacttgtctttgactggccccagctcgaatgtctaacaaacaatattttagtttatgactttcaaagtaggaaatctctgcttcaaaccttgctacgatatgcaatctccaactgttcagcaacatcctcacgaagagggagccaatctagaccccctttacgagcaaaccaatgacctcttaaaacacgccgattttctccactccagtaaactgggaaagaataccttttctctaaatctacctgcattaaccatgtcatttaacttatagatataagttttaaagttgaatcttacaatatgtgtgaagatatgtatagtaggtacattacattgcttaaagagggtatggaaacattagtaattgcaggcaaagcacccaaaaaaattcaagcataattacagtaccccaattaacaagaaccaatttttttcttcttttatttttttcaaacaaaagctcagtttgttttgatataaaaataaccaattagaaagatgaggcaaacctaattattttttctgttgtcttccaaacagaatatcccttagataaataacatcaaagtttaaagtgtaactttcaatatctattaatctcgcattaatatattcgcattgaaggataatgcaagcatatatgtagaactggctgatgtaaaaccatgttttaatccattgtatgaatgtctagctaataaatagctagtaatgctatttttaagaaagattggatgtattcattcaatttttgcaaatcatcgcaaagaacatgataaacactagaccaaatatgaaagctaaagaataatattcattgacatcaaagatagaattacaattttccaagtttttaggacacttggagatctcccaaaaagagtttaactcttccaaaatacacaaataatcagatctcctcaaatgagactactgagatttatttgtactcaaccttctgagttctgtccactcctaaatcctccccctaggctacttacaacttcattcagctccctaatagccaatcaaaatacatacataatgacagcaaggcattactaaactaagacaaggctaattacaccgaagccaagtaatagttagagggacctcaagacattatttttttatttttcaaaattttagtaataggttgagtaattttaatttaaattattagtttagcccctccgaaactaaataataacaaatagccccacccacttcacgaggaggggtggctccataagaaacaccataaaaggaacacaggaagcctacctcataaagtcctcccttcactggaataccaactctctcttcctccatttcatataatttggttgatggaccaccctctgaggaagagatgttgacttgtttattcaatttattgcgggaactaggccgttctattggaccttcactgcattctgcatactctttccaccaacaaccaagcaactcttcctccctctgtaaatgtgagttcagcaaacacttaaacaatccattacctagttgttaagttaaatcagcactaacaagctcgattattaaaagcttgatattctacacgtataagaaagtcttcccatcgagttaaattccactatgtttagcatatatctatagtctgatgaaaaattaactaccattaactcagaatataatgttcatattccaaaaagcatcatcaacatcttctgagatatataaaattaacaaaagtgtgtggtgtttacaagttagttaacctgtaaaaaagaagcctctattgcaagagaatcccttctgccaaaccgaaaatactctcctttccctactatctcagcccggggaactgaagcagccaactctaagtatacacaaggaagcatctagtttatgatatattttggtaaaactaattaaaagttcaaatagagtctatacatacacaacatatatatactggaatagacagagaaacgaaaatttctaccattctcagctaaaggaaccttgcaaaagaaccagcgaacatcgacgccatcagagggactcctagtctgagcaagatacttctggcgacctatacactgttcaatctcatcctccaatctcgcaatattcgacggcgtgttcttcaataattcaggacttgtttcttcaacccgacgagaaacgttttccgtcttagagtcatttccctcactagttgccgatcttgaatccatggaaaatagcttctgagctataataatataagagaagagtcagccttccttcaatttgaggacaactctaacaattgaatcttagccaaaacccaggaatgggcttcttcgaaatgaaaaagcaagaaattcgcaatcaaagctgttaaagctgaatatttaccttttatttggggactactcgcgaaattgaaaattgagaaatggaaaatgaagatagtactttttttttgctgaaaggaaacaaagatagtttgtttggttattgggaaaaagagaaggaaaatgtgggaaaaaggaagaagtacggaagaagaaataagaagaatgacaggtttggtttgcatgactgactggtatgtacacctgttttcctaagaattggcggttgctcttgttctctctccttgtttttcttcttttaaataaagaaataataattcaacaagaaaataatcttttttaaaaaaataaatatatttatcattacatttaattttatattactatattaatactttaattttatattactaaaataatattat

SEQ ID NO: 14299 - DNA, 5205 bp, Cannabis sativa
  modified_base (4332)..(4341): a, c, t, g, unknown or other
ctgttccacaacaacccttctttgcctctttaaatcctgtacattattaattacatatcataatcatgtacttaattaatcaataataacaattaatatataaaagaaaaagcatatatatagattttttttaggtgagaccatcacttttacttttattttaagtgcatatcttatttttgatatagagagaaattgtaagctaattttttttacataactatatacattatagttatatatagtacgtatcttgtttattttggagaaatttaaaataatttaaatattgaaaatatgattcaaataattagttgcacacatgcctatattattttaaaggtgtgcaattaacaataatgaacattattttttattctgtaaattatatataaaatttctcaaaaacgtacaaatatctactgtaattatattgtatactgtcatgataagaaaaaaaaaatagaatataatttttctagatgttaaaaagagatcttctagaaaatgctcctataaaagcaaaagtactaatgtctattgtggacattatcccacatgaaataaatggtagagaattgagtcatatataagaacatgagctactctactcattgccaattgattttgagatagaatctcatgattctcaacaatgtctaaccgaaaaagttatatatatatatgtatgttatatataccttgttgtttagggtttttgataaggttgtagagaggttggtagatgtctatgacaagcaagtttaagccagataaccttttcttcaaggcttgagaagttgagtttaatcttttattaaaagaatttgcttcgaaattaagcttttccacacattggtcacttactaaaccaaatattgtcatcgatccaggcaaacaccctagtggtggcaatgaagtcactccaatctttcgtgctcccatcgaatacagtttctatataatatgaaattgattagtatatatttcttaatcaaaaaaagttataatatcattaaatatatgtcaaataggtcatatagttacatgcatgcatgcatgaatttagaatttatacatagatcactaaaatatgttcatttcttttcaaatacacaatatataaatatgtttaataaatatattaatttttgcataagacactaaaaaaaagctatatttagtgataatcttttaatgatcacaacaaaatgttacctgtaactaaaacatagtatttagatataagttgtcactaatttaattttagttacaacaaatatgtgactaaatacacctttaattacaacaaattgtaattttcgtgactaatacttttagccacatattttttattcacaatatgggaattgtgatttatatatatagtcacaacttttttacttttgattacaagtttttgtactgtgactaaaaataagattttttttgtattgaaataattctacagtacatttttaaaaggagtgcaccgatattttcctatctatacaagagaatttttagtataatattttaatagtcgacatagttatttaatgtattttgcaaagttttaaataaatttttaaaaaaaagatctaacatgctgaaaaaagtattcaaacaatgttttatacacatgtgctgttttttatattgtaaattattttgaatttttcgaaattttacaaatatcttaaacaattatatcgtacacaatcatgaaaaatagattgaattttttattctgaacaatatcatgtcaaaacaattggagatgcatcgattgtatatagaagcacccattatagtttattaataataaaatttgaaagtataacaacaatttgtaagtagtacgtacctcaacaaattgtgtaaatgatttgagaagggggacaaaatatttatcaatagatgaataagtattctgaagagtgggactaatatgataattttgaagaatgtcacttgttccagcacttattacataaagaccacctgaaaatattgatgaagcattttctttaccaaccattcctattattctcttttggacctctccataattttccaattgctttgtcaatgaaattgtgccctagaaaaataaaataaaagacatatccaataatcaccatggatatacatattagaaatcatttaattataatttgatttctaatttaataagaagttaaatttgtacatataaattggctgtagaatcatcatatcccgaagaacccgaagcaaaatttgctccctttataagatttctatctgtggcctttgtgttttgataaggaagtggataagaatcaaaccctagagtgtcaactgcaattattagaaacataaaaattagttaattagagactaaatataattaactaaaagaacaagaaaaagaaactaaaacaaaacaaaaatcaaacactaacacaacccgaacaaacctagaaaaaaaaaaccacaattattattaattacctaagaaatcaatagccaattttccattacaaaatcgaccggtaggggtgtgatttttgaagtcctgtccataaggaggaaaattggctttaacaaccgttgctaaattattattgttaccaacatcgagtactgaatctccgaaaagaaatactgctggaactatttgtgattgaacaccattcattaaccataagctgagaaaatattaattaatataacaataatgattaattatgtctccataataaataataagtagtactaattactcattaaatttaattaaacaaattacatacaatgtaatgagcttccaagagagagagaaagattgccagaggaaagtcatttgtatagagaagagatgaaacaaaatattggaaaattaatttaataatttgttggttgattattatataattttgtgaaattgattaggtttatatttcaacaattaatgtaatctttttctaaaattctcatgtcttagcgcatcattagcacttatattgacctagaattaatatattgttgaagtgatggtgaaaacaagtttgaatttgaaaggttaattgttgaagacaattttctaaatatagatttttttcatgcattgatgcaattgtttttgtttttgttgttttttttcttacttgtaattttttttttggaagttatattaattgcttacattgcaaaatataattaggggtattcgcgatccaacgtagtgcatgttgtaattttttttcaaactaaacttattaattttgcaccgcaagattttaaaactgcaaaaatcacactgcaaaaatgcagtatgttacggtgcgatttgaacagtttacactatcatcattatcaaatattataataaaaatttaaaattcaatctaataaagttttaattaacaataaaaaaaatatcttattaaaagatatataaattattatattgaattgtctcttaaaaagatatgcaaaatgaatgcaaatcacaaccgtagcacaaaaaattttaaatgtgtgtagtacggtgcaaacgatttgtgcagtgtaagttatttaatgaagggttatttgcggcataaataccttatgttttcgatttcatacacttaaatacctcaacttttattttgacggattaaataccaaacgttggtttttattcatttccgtaactactattctgttaaatgctgattgtatttattaaaatgccacatgtcatatttttattgatccatttcatattaattttgaaaaatattaaaatatttattttaataaataataattaataaaaaaatatattttaaaattataaaaattaaaaaaaatatgtttaactagtttttaattatattggacacttaaatcaaaattaaaccaaagaatatttttttctttcaattttcttataaacaaaaaaatcattgttttctaaactaacttacaagaagaaaagctatacaaaattattcatactaccaattcataattaaactatccacaaaatcaaatcacttaaactttctagctcagattaacctacaaaaataattagattcaaatcaatattacacagtaacaattaattagttaaatcagattctaaaacactaaaatcaactcaagaacactcatgaaaatatcagatctgagttctaaaatttaaaacacaaattaaacattatcaagtcacaaactaatctcagtctcagatatgtatgagttttcccatcaatagatccactcataatttttttttttaaaaaaaaattaaaaatcctctgcgccattgaacctgcatatatatatatatatatnnnnnnnnnnagagagagagagagggggggggagtacctgcgatgtcgctgatcgccaaggcttggctgaggctgtcaccgtcggaggtgcgatgggctggagatgtggccgtcgaagctgaggtgggatggggttgtcttcgtcggagctgcggtgggctggatcattgggcggttggggctgaggtgagagagagaaacatgagaggggcgatgtgctaggatcgttggttcgctgtggccggagatgatggctatggtagatgagattggaggcggaagagatggtgttgtacagttttagggtttttattttattttttaaattacttatttaatttaattttttttttaaaaaaaaacagattaaaatatatttgaattatcttttttttttaaggaaaaaaaacatgaatgtggacctattatatagtgacacgtgttactttaatgaatacaatagggtagttaagtgtatagaattgaaaatataagatatttatcccgtaaatttccctttaatgaatacaatagtcattaatgtactcaatactcatgaaatcataatataaattttttcaaaaaaaaaaaaatgataatatgaatagctcaaacacaaaattattgtgtatatatatatttatagtatactaatagagaaaaagcaaattacaaagcacatatatataaactgatcaaataggcaatgccaaactaagaagaaaaaaccctaatattgactaaactaaaataaataagattttcgtaatatagttagggctaaattggactatcgacaactcacaattagcaagagatcgaaaaccctatcaatagtacaaacatttttaaattataggagcccatccaacat

SEQ ID NO: 14300 - DNA, 2554 bp, Cannabis sativa
aataaggcaaaatatcggggcgttacatcttaaaagttcaaggggtaaaaatcctaattagcccaatctttattaaagtaaaataagtgagacctgatattgaattataccaataacatattacaccttacaataatactagacaccatgggtgtctttaagtatttctcttagattatagtggtatctagcattgttaagagatgtcactttacaaatagctaatgatactttataataattattaaatttattaatgtgggatttgatatttaattttacttataatactatgagcactactatcttttagtatttttcaatttttatatgagtattgctatttggtatctttaggtgtttaatatcatatcgacatgacactctataattagttaataattttttatattatttattacattaaaatagatgagacccgatattaaaatacaccaacaataatatgaagtctcttatgatgcttatttataagttgctatgagtagataaaattgctattagaaaaatcataatgtgactaagaaagtgttattatgaacttcataacaataatttaattgtatatatataaacatttagaagcccctagagatgatatactatattctaataaaaatgacataatatagttataaaattaaaattttcaagaaatatcttccttagctcttaagattttatttcataataatataaattgtattttgtattaactaagattgtttaacatcagagtatattatatatttattttcatgggcaataagaaatatacatagttttcttttaatttttttttttaacaattacttaattttggacttacaaaaaatgctaatatatatagatcgctaattatttaatttgtgttttaacaatacaagttgacaaagaaatacctaacaaaaaccaacttgaactccacctatgatcaaaccaacttctaaaattagtagtgattatgagaaagaacccaactttgactatttacataaaccacttgggtacttaggttatgcaaataaaaatgtaataataaaagaaaacatacacacaaaatacaaattcaatttaatctcaactttgtacaaaacataaaaaccatatagttttttagttttttttttttttttttcatgtgaagacaaagaagagaagaaaccaaaaaaaactaaactctaaaacacatggcaaagaatacaaaagagattttggtcaaatgttgcacactttggttggacctaaatcaagggattttgtcctttcatgaaggtgtggagccattttaggcaattgacaactttgtaaatttagaagaaaaagaaaaaaaatgtgagcactaagtaaggttcatgttcaatgtttcatgcaccaataataataataataataataatagagctataatatatacattatgactcttcaattgcaccatgggctaattagaagggctactactaataattgtgtacgtatgaaactaaatcatacattttgtttttaatgaaaaaccatactaagaacctaaatatgaattatattcaaaattatttgttaattactttaatgtagtaaaactagttaaaacttataattttaaataactaaaaaatatattattataccacacaaaattaagactacaaaaataaatttagacattttttaggagtccaccgtaaaaacttccaactctatataataatacatggataataaggatgtctatagtacaacatacttcaatagcttcttcaaaattataataagtgatatttttttttcatgataatgttaattattataatagtagatctcttatcatttttagaaaatttttgaaaacaaaattaaaataatttatgcactaacactacaataccctctcaaaaatttataatgagtaatattatttttcatgaatgtgtttattatagtaaagtaaatttcctatcagttcactattatttttcaaaatttaaaatttttgtttcttgaattatgtcctatacattattgcacctcttaaattttttaatccgttaaaaataattattgaattattcattgttgtaaagtagtccgtctgtgaagttttatcacatatggcaaataaaatgatgatatgacagtttatactatctctatgttcacaccacatgagtaattagtttgaaaaaaatatatttaaattttttaatttagttatacttaaataaataatatttagctttatgattttgaaaaaaaccatatttttttttatataaaatgaagtactcttcttttcattcctttgtttgatgggacaactagccagcaaaggataaggttacggatttgggattttcattgaccaactatcaaaaagcgatcaaagtcaggtcagaccgagctggttgagcagcaaagggagaattggtccaatctcaggcaaaaccataattagagtcataaggaaagtaccagttaaatagggtcggaagtcgaattccttctcttctttctacccgcccacaacctattc

SEQ ID NO: 14301 - DNA, 14485 bp, Cannabis sativa
gatatcgagaaaatgagaattttccagttgtaattaccactgctcgttctggaagaaggcagggagtgacctcgcaaaagcttgtttctgcataatggtcagtttcctttatagtaacttcaagaggggcatacacaggtagaccagtgtcaacatcaacagtttgaatccagcgagcctctgttgcaagtacatataaatgcctgaatgcctgaaaaatatacctccttagaaaaatgaagatataaataaaacatgaagatatgaaagaagaagaaaaaatgaacaatcagacttgtaaggggaagaagtgtgctacagactagccaattgcaaaataacgaaatgactagaccagagtaacaacataaaaaccagtctagtctaacaactctcaaattcttaataagtcagaacaagtgatatacataaactctttagcaatttacagccaaaatttaactatcccagatttcctctcaaatatggaaaaagtcttagatttctctcaaaccatacagcccaacaaatggcaagtacagcagaattcaacaacaatttcctcattccatttccaaccaatcccaattgaacataaagaatcagcacaagttcttagaatagctattacctagtcctatgaatgcttctgcataacacaccattccaaagaaatagtttggcaaggccctcttcatagcatttcgtgaaatttatttcccaatgatactaacccattaaaatctttcaccacaaccaggaacagcagacctcacactaactgataaggaacaaaatctataatacacccaagtcttaaaaatcatccaaccatgctacaaaaccaccgtttatatatggcaaccagaccccactatcttataccaagacacaaagcaaaactcctccatgtatcccaacagctccatcagttccccctatctctttatcattacaattacagcaaaagtgaaattccaaccagaaaaacttgtatcccacaatctcaatccacccaaaactctgagatctgaccattattacggctaacatttaaaacagcagtgaaaacctgattgcagatgcctcatcacctattcttacatccaacatcacatactacgtctgcttcagactagctaaactaactactcccaaatttaagacaatgataagaatatcagaaatatttcaaaaggcacagcatagtcaataaaccaattagtctgacatattatacatatgttcaagataagaaagacacatcacccctattctgaattttcttgaatcctgaccagtatacacgatcgagatcatgccatgtaattgattcttcttttgaaaaatacctggaggtgacatcggttatcatttggtcctgtaggcaagcgtgggtaaagagtaatcagcaatgcagcaatggagccattgcttgttgaaaaagtccgcatccctcccccaagaaacaagaaaccaatggctaaacttacctgaaaccaccatggtaatgaagtaagaaaagacaaattttaaagagtgaaaaaaagaaaacagagaaagagaaatgaagtggcttatggtagcaaccgtcaactttcaaataaatacaagcaacttccttgtgcaaaagaaaaagaacaaacccaaggagagaggggaagggagtggtttatcagaaccacagtcaacatccaaaaagcgattacaatataatatagccaagaaacttaaaactatatttcacccataagatatcttttacaatgcaggccagtggctaaggcttctattcattctgcatcattttcaaaaaatgaggattgcttatgatacagaatttgtgacactgtaacacaatgcaagactaatattttactagactctacagacacccttagagtaataactaactataagtaagaagcacccttagagtaatacctaactacaagtaagaagcagaaatttacaattaagcagaaatgactcaaatgatatgaagcaattaatggtagaagcagacccaacccaagaaagttaggttgagttgtcaggtccatgatttgcttccatgaggtttagcattcaattcttcagaggtacctacccaaaatttgttacagtttcctacctcccaaagattgtaggaatcaggagaaagatgaataaatagaaaaggtaaaccataaaaaacaaaatacctatgtaatgtctaagatcaaacaacttagataactaaaagttagtttgtgcctcaatacaacttttatcacagtggttaagcattgtcagtcaagaaaaaaaaaacacgcatagaatgtgacatcagaacaatggggattcataaaacttaagaaaaacttacagccatctgaacaccataattagcttgcccatctgcagaatttctgctgcggagaaatctcaatagcttaaaggtctgtagatgaccagaaccagccataacctaacatcatacatgataaggagtttaggcatgttaatgaatgatagggaaagagacagttaaaaggaactacatgtccacataccacagaaagtgaaagaacaataagatgaaggcaaatctctaatgtgcctcgatccacatagtgagataatccccttgggaaggttccatttatagcagaaactggtttgatctgcaaaccaaatgataacaaataaaatacttacctctaatacttgtgttatcacaagttagggaaaaccaaattgaatgtcaaacctcattcagaaaatagatagcatagttatacaataattcctgtgcattcccatcctttgtgcccgcaaacctcaatcctgtcacaaaaatatgaagttagaaaaggcattgagctctaaataattatcttataacatcttcaagtaagaaaatgtaagagctcaatatcaaagagccctaggagctcaataataaattgctacatgttaatagtagaacgtaacagtctttttaattaaattatgtactttatgagtttcataagttcctgtgtattctaattccatatggaaagcatcaagcaacttcaaaacaaattattacaagataatcaaataccctgacaatataaaccaatgtttcatgtaattagatgaaattacatcctaccaagagaaatacaagcccctgccactatattgacataagcctgcacaaatacttcagcgtccatttcatcaatatcactagtatcatcaccaagccattgaacaccatttttcacaatatcaggaatctgagactgaatccaatcttgagagggatgaaccctacaacagaccagcttagaaaagttaaatgaaataactatttaatgtaagtcaacgcgcaacagttgaactagttgaaagaattggcactacctgctccacattatcaaattccgagcaatgacacgaagcataatgaagtcgggcctaacatattgcaagtcaaaatgtgtacgaggaatagagagcttagacacaattgtctctgattcagtctgtcatagacatagataaaagaggaaaaagtcacaacgattaatctaatgcattttcctttatgaatggtgagagacaaatatgaacaagattttaccttcagaaacattaaagcaagagcaataatcgctccaggggcagtgacatcaacattaactgcatttccatccatcatctacagccaaatattagcacatgaggttaaataattattgttttagaaaatagtcctataagaaaggagaatactaacaagtttctaacaattttagtaaagaagtgattattacaaaattaaagtacgcaaatgtcacctgtgctgcagcacgactgtgctcatctgttgaaattccagcagaaagggatttttcctgatgataaataataaggaaaaaaaaggaaaaatcattttaaatcactaaagcatccgagtgtgtaaagctcttaagaattatactaacatgactgaaccttctgaattcattcagagcatttacaacatataaatgaattagaactaaagttggagtaagcaaatacaaggactgaaatgatgaagaactaagaacctaaaattcagaaacctacattatgaacttctttgcccccaatataatggaacaaccgatcaaccatagcatccataaagccaagtgcatcatagccacgtccttcatataaagttacaaagttaccaccaagattttactatacaaacattaaattaaatgcacatatacatataagttgttaaagcttttacctactgcaacaagacccagcgaaaatcctgcagaaacagaataaccctccctttcaagtacattatcacctccacttctacgtcctatttcaccctgtagaattgattgtataaatgtgggaacatcttacaaaaacaaaaggagaggctatgcaatggtattaatgaaaattaacctagtttttattgagagataatagtatagatgatctttttgaaataagaaacataatgcagatgcataaaaagaaggataaggtctcctattaagaaacggcaatacaagctaaaagaagaggaacagaaaataaattgaacattgaacaaaacacaatagtactggtgattctatagaggtatgaagtactcagagtatggaaagaataactcaacttaggttttttctatcaggaattcactcagttacaacatcccattcccatccacaacagtatgctcccaaaagttcgtattcattttccgtaaagttgaattttttttttttttttgtttttgtaaatttttctgtggggtttatcttgcccacttttgcttgtattaatttttcaattttaatacaagctgaagttttgtgtcaaataaataaataaagttgaaattgttgtttttttatttatttatttaaaggaaaaattgggtgatgcttatgagcacagcataaacagtatcatgcatatttaatatttaatcactagagaaacacaaatgaaatctaccaagagaaactgcatggattgaggatgtgcagacccttcgtgaagaagaccaactgacattagagctgctgactgattaacatacaaaaaagagtttgttaaattctctaggtggagaaaaccaaataatttaacaaatcagaactgtagcaaaaaataacaagcacttcatcatgtaagaccaactatatagtaagagaataaatgtaacacaagtgtcacactacaaggcaatgtttcacaaatgtgtgcatctagtttataaatatcaatcggtggctgaaaaatttctagcgaaatgagaataactttatagatacctgtagaagggtcggcaactccagctcaggaaaggaggaaggatgtttagcaggtatatgaacataaagagactgtagaagtataaataaagcagtttcatttcagactttcagttaataatgttaagcaataaacacatagacatttagaaatattaaaaacagggttatacttgcaaaaaattgaaatcctgtttattacaaatttccatcatacagcatgaacattgacacttcacatataattacatatatgaatttgtcaaaaaaataatcttaatttttatttattttttttttcgtaaaaaataaaaaaagaagaagaagaataagaattttagttaaacagtaactgcccaaaatcaagaaattgcatatttactttagaaattaatggatccatagtccctctataagaagctgcaaggccaagcatcaatcccacagttgtgctttcatgttcctaaaatcaatgtaagcaaagtaatttccaggattaaacatacaatggcaaataaatttatatgaccacaagtatgaacataaaatattacatggggcggctttgtatgaattacaaaacctgattgtaatactggaaaatatctgtaagacttaaaacacggagataaccgtgcaaccctagtgcaagaagtagtccagcatgaatagcatttggctcttcaggtttgttgtatataatccaggttcttgacattttaccctgcatacaaacaacttccgtatctctaagaaaactcaataaatgtaatttacatgttataaatatcatgtacatatttcacagcaagacaagtgagaaaaagaattaaagatagcataaacttgagatcattaattctttctaaggaacgaaagaaattttgaatgataggatactacaagcatcagcagaccatttacagaagaggtacacacatcaaagtaacacattcatcaccaaggaatttgagaaaaacaacactttttcaaatttgtaaatatgatatatctacatcagataaagaggataaacctgaagtggggccagcctcagtccagcagccacagcattgtgaaactcaggccaagatttaagttcttgtatatttctcacagttgggtccagattcacctttccatcaaaaaattacaagtacaatgaggcacagatgagaaaaggaaaatgtgaaaatgaaaggcaaaaggtacaaattaaaataacatttaaaaaacatttatggagcaaagcaaaatgaacagccccaggaaaggattgttcagaagtaatacatgggcatatattagagcttggaaagcaagaggtcaaataaacaacagacactaaccagtttgttacatgaataagttaaataaactcctcaaattgcataaaatgaaaaaggaaacaaaaaaaaaaaaactgagactgaaaaatcacaaatcgacctaggccaaccttaatattttcaatgacaataatggattccttatttctatcttgttaaaacaatcttgtatttggagacattttggacaagactttgaaaattataaatagcacttcatgacctgctatataaatgcaggaaaaaaaaaatccaactccgcacatagaaccaaaatattcagaaggacagacaacaagataataagcatatcacgaaaaaaatatgatttgaacatacagttgcattctgttgggcaggcaaccgacctgctaaaacaagctttgggactgcaaacacctgcacacaaaatcccatgaacatattacaaaagcgaaaacaattattctagttatgcagaacatgcacacaagctgaaatacctccgtcaaaagtgtatatattgttccaagagtaaatgccccacgccctagaggaagggaggtagtcctttgcgcaacatgccataatcgagccttcacaaataccaatttgataaccagaaaaattagagcatataaaaaaaaatataaaagaaccaaaactaaacatgcagatttaaataagatgtacctgctgaaggtcctggtcagaagtactgggattaacagatgtttgaatagccacaggtcttgcagagcataaaaggcgtctaacctgatagaaggaaagtaactttaagcttgaaaatacttgaaaaagaaacaaattcagaagacctatttgcacaccaaaggaaagaagtatacatctgatatgatgacaaagatacaccctgactaacaataaaatttactaacacagagagcatgtgatgctggacaaagacaaccattaacagttcaaccgcaccttcaatcaaaaagtttggtgtcatgttaagccttcaaaatcataaaactatagaagcccagttttgatatggaatccatatcctcaggtgtcatgttaaaagctactactgaagatatctcagcctggggatatggaatcttatcaagacttacattatggccagtggacactagagatataagtacgcacgcatatggaatcttggtgacaaacatccaacataaagggaaggagaaaatgaaatataggcaactaaaacatgtagaaaacatatgcaataataataataattttagcaaatctattcttcatcggtgcttccattctgttgaaagagccaaaaattacctcattcaatcgtaaatcacgcccgtaacgcaactgtgtgctagagttgaaaatatgctccatgccatctgtcatagaaccatcaatagaatctgtatcctcaaactttgcaccatctaatctgattgaatcagacactgtggaaggaatggttactggatgcaaatggagcatgtacggtgtagaaatagagattaaattcacatttgtttgggtttcaaactccttgaatttgcatgatcgtgccagacatgacaaagccaagtcctctcgaccaagtaaaacatatgcagcagctggccagtcagtaggaggacattcccgacacttatccaatgcctacagattgcagaagcaaaatgtaatcaataaatacagtcacccaaaagtggattaccaataatggctaaaatttacagtaaaaattaagcagaaatagaataggatagttatgtaacaaactcatatattacatgtatctatggtacaaatatcaatacacagtacaggtaataagtataaaaccactctatgttatcaaatggttttgtaagttccaaaagatttgtccaacctacgtaaacttctgccatttttcaaaaaatacctttatttttaaccatttcacatttataaatggcagcataactgttagacccaggattaataaggtgaggttgagtatagcaaataaaagggagcatgactaattgaattcaggatagttttaagtggagaataaaatagtataaataggcaagtaagggaatagagtgggcatgcaagaatccagaggttatttctctgcatcatggagagtcctagacctctcgaatgcctagggaaattgtctctataattatctagtgttggcaatattaattcagatccattttcaactatcatctacattcattcctagctattattctataattctgctactgttctactgggtttacttagctgtcaggtttggagcatatcaataacatacatgtcgtaaaggtagtgaaaccccagaaggcagcaagtcaagttgctttagtccaaatctttctccaaccattcccaagacagtaagttcctcatttgtgcaatgtgatcccacagcaatattacagtaaacgccagatgaaagtttttttcctatttgtttagcaccggataacaaactgtaaaaggagacaatcttccgagcccagctcacaacagaactcccattttgacaaattaaaggtgaaagatcgttaaaattagcagaactgcatccaagcagcaaacacgtctcaagccatctgaataaacttggtggtgtcttaattgaaaaggtagttaaagacattgaaatatttctagaaaaaacaggaaagtcacgaatatagtggtccagatagctttgttcacccagatacttggcaatatcacataacagaactgcaagaagctccaaatccctataaaaagcaatgcaaagattggtaaattaaaagagagcataaagaacaaagttaacaataatacattcggtaagtgaaatttaggacatttagggttattttgtttccattttatgtgtgtcttatgtgtattatgggttttcttttacaattatttcttgtaatattcataaataagttcagaaaaagtcttaattaattagtattgggttcttatttgcctagatttcagttagttataaattttatcaatttaaagtgcctgcatatgggcctattccacttgtaaacaggatattctattcaacagtttagtgaaacctctcaaggcattcggccatgttttaacccaaggaagctccaagaaagagcctatagtctaccctttctctctcctaatcatctgtcccatcactaagtttgaagaatacagcctgtcacaactattcctacctacgaggaaaataacacagaagcttgcaacagctaaaacagtctacttacacctccaatttcttgcaggttattcagctggaaagtagcaccaacacccccatcttgttcatttcttagctctaaggtaatcgtaatctatgctgcttaagtgaagttttaaggaataaaatgttaacttgaacccgcgcagaccattaaataaatgaagtgggaatcaagaagaatagaaacattttacaggagcttaaaataaacagtaaaaaagtgcaaacctcttccgaagggtatccagttttagactctcatatactgcatgtaaacaacccaagctctccgttattaattctgagtagaatgatttttcttttctttttgtaccttccgaatttgatccaatagaatccatttcctgcccgtgaactgatactgaagaaactccagtgacaaagttatgtttgcagaagttcttgtgaaacttgctactgataagaaactcccaagatgactcagtcgtcgaacttgaatgctttagattactgatagaaggtctacacattttcaggataatactacagaaagcatcccactccgtattaacaacataatcagcctcagtcaaatatccagagtcgccatctttccaaagaagactaacaaaatgactatagaagctggaactaagcccctcagccattgctgtgatgcaatcatttgccagcaaagatgaagggtttcttcgtattgcacacctatacatctggatcgttaatgataaaaatgattatgataaagatgataaaagctattagagtctggcaaacatagctagcaagaaaaatagccagacagatagcttattaccaagctcgtagtgaactcaagtgattccacattctaaatgcttccacacttttttgaccagaatctacaaatctaggaaaattgaattaaaaataccataataaattacttagcctgcacaccttcccactattcactatgatattgatacggccctcaatagcatcagctactccagtaatcttcaaatcatggaaaacagatgttgcttctctgaacttcagattttgagagagtcgatctttacttaatgttgcaggcagagcatacctacataggcattgcttccctgactgcaatagaaaagtggttgactatacatacacatataacaaatgaagtggacacaatataaatcatgcttactagcattgcaaactacacccatttcacaagcagtgtttaagttcccatttattgttgctgattcaaactactaaaaaaagcacaaactccagattaagattttcccttataccttcccaagaatgttaaaagagctttcaatacatgtaatcaccagttttgaaataaaattctataattgcctaaaaacaaactatatacatttttatatatattaaatatgtggaaaaaaatatatgtagttattttttatttgccccgaaaaagtttcttcagaattaatacactgaaagatcaattaaaaaaactcccagcaaatgaatatgttaatttaatgtaacaagaatatagttgcactgtaacaagtatgaagattatgtaaattcctgatgaatgcatattaaattcaacatatattgccaaattaaagacacaagctcacataagatcaagtatcaatgattaacaggcatatcttacatagagaagaagtgaattttctggtgccaaaacaactatgtctgcatacggaagcaagccaactttcactctgaaataaaaggggtaaaatgagaaagtcaagtctacaagattatatgagaaataactaactcttaaaaactgaatagaaaacaagaagccacagctttacctaggacgtgttacagtcacaggagcagctgcaattgcaggtatactccagctcatgtcaggtttaatatcaaaaataatttcattattgatttcaacactctgaagccttacggacaaaagtttcctttgctcttggtgaagaaagcaaattataggagctgcatcgtcatcagttgcgaggaaaacctaacaaaaatttaaaggatacttaacaaaaagtgaaatgaacttggcaatctttacaaagtactatcattatatttttaaattaggctccccacctaaccctacaatcttatgtgggtatccggagggattcaaacctcagaccttatggagcaaatcatattggtgaccatttgagctacactttgggtaaagttttacaaagtaccatcatatgcacttcaagaaaacagaaatatggatatctaaaaaaaataaagtgataccttacaagcagctgtttgcacacccttcccttgccatattctacggaaagagaattgtttctgtagtacaccggaaggaatagcatccaaaaaattagcattttccgcttcaaggttagaattaatgacttctacaacccaaaccgagtgctgtttctttcctataaacaacacaacagtgtcagaatgataagccaaaataagaacaaaagagaaaagagcttgagattaaaaaacctttattatatgataccataagaggtacttgatcactcgtccaaattgttgtttcatcaaattccttcattatgttgtactttcctctttcttctatatatgtcagctgaaaattttgaaagcaaaatctttcaacgttaataaatcaagaataaaagcaaaaaatgcaagcaacaaggtcaaatatctgaaatgaaataaatgaagaacaacaatcattcaagcaaaatacttgtggttcttcaagtggatctttcagaatcatatgtgaggacattgaacttgtttcccccttgactaaatttccaaatgcattcagcaaactcaaattatgctttgggctatattcattttctcttctaagacgagataattcacgcctaccaaataaaggactagcaggtgaattaggattgtgactcgttgaacttgtatctacttgttgctggaatagtaacccaaaaggaagagcccatattgatgtgacggagcgtgaaagagggatggatgttacttcacctatcaaaagcaggctataatttcaaaaaatacatcacatagcaagaaaaaacgaaagaaagagcaaaaaacgaaaaatggcttgcaacatagtatctcatggctaatataataaatttggataaattaacttttcaaaacagttccatttacatctatacactatgtgacgttttttcactacagtctgcttttattaagtttaaatacaagttgtaacaaaacagctcatggtttgtaggtaagatttaaattagcataagcctaaaagtatacaatataacaatcgaatctatgtcttgcccctgctctatacaatgtgctgctctggtcagctcacctgatgtgttgtacatcgtcaaagaagcaatttgtaaaacacaaagaagggcttcagccatatcacccaaacgacaccagcgagccttaaatttgcataggaagtttagcagaaaattaatatataaaaataataataaaaaagaaaaggaaaagtgagtcacttcttatatatgtgagttgagtatagatttaaatttccctaactttaacattacacgaaaacagatacagagaagtaaatcaacttctgaaagaggccaaagaatatctctaaaccatacaatcgctaaaaagaaaggtaagaaaaatatagcaaattgctaggtgatagaacacaatccatcacgataactcatttgaacaaaagatgagcttccacggtcaagctacactacccctcatgtctcatgatcatacactaaccacaaagaaatattatattgaatatataaatgtagcaattcctagagggaacagaaaactggagagtgaatacagcaagaaacgaacaatacgagtaattcaatgaatcacgaaccttgtcatgtaatgtaagcaaaagtctcgatcatctacggtagcaaaactacaatatttttgttactgtatcatgtcatattcgaatacataccataatgactggggacgacaacgtgaacctcttaaacactcgtgcacctgttgaccatattatcctgttacaaagcaaaatttacattaggcacgaattaacaactgttattttgtcgagttgaagcaacggaaaatagaatttgattctccttaagttttaaattttcttctttctattttcttacggctttttcaagcagccaaaaggaaaaattttccaacaacattaccgatttcctctaatgaaaagctcgtgatcgcatcgatcactgaggggggcagccgaggcatcgaaatcgtcggcttcatctctttgccgagtgagttcagaatcgaagaggaagtaatcgtagtggtcggtaaaattatcagcgggttttccatcgagagcttcggcgatcaagccgaagggcttgaactcgcccagcactttgagttcacgaacccctatcgacatttctgtgagtggagtggagtagactggcgcaggactcccctcccgctcttttcttttc

SEQ ID NO: 14302 - DNA, 11716 bp, Cannabis sativa
  modified_base (11621)..(11648): a, c, t, g, unknown or other
aattaataaataatttctataattaaaccctaattatctactaattttcaaattaaagctaagcggtctttacattatagatggagtgtttaaaaggaaaaaaacaaaaaaaaaattccaattctaacacataacaattgtagtagttcaactagaatatagacaaaaaatctttaatttcggtacttgcaagacgctttgttgtgccctttaccactacactttctacaattacaatatttcaaaatgttttctcccgtagaagaaaattgattttgccaaattcttccaactttttgcttctttggtcagcctatagctttaatttcaactggtactccaacttggatgttcttaatgtctttaggcaattcccaatcatccacgtcaccaactgccataattgactcctcatatgtgttgtttcaacactctctagtgtaatattaagaggacaatgtgtacatgctaatatttttctcttgagctgtagcacaagcataatgacagtggatcttaatgatttggaataggtcgtaaatacatgtttgttcctgcaagtccactataccaccgctgtcaactgatcctccatggtgaacattgaatgtataaggtcaagatgtgtgtcgatgtttaaaaaactagatatctaaaattagagtgccaagtccccgtccataattggtgtgatagagttgtggtacacttttaagtaagttcctttcagctagaaaaccacgtttgaataatgagcctgatgaatactataaaagcagtgattgggaaggctcttgcgccctagtcgtgctattgaagctttcattctagttgcttgtcattatgttgtaatggaaacatccattgcttttatcttctcaaattctctttaaaattgtgttcttaaatgagtacacacaagcataaatatgatccttaaagttgttagtcttgaacttgccagccacatttataataatgtgatggtagcattcactgtagtgttcatcagggaacacaagatccaaagcatgaataatgatttgatgcctatccgatacgaaggctaagttttcaacatcaacaattggttcttttaacttgctcatgaaataggtcaaagagtcgtgattctcattttcaactatcgcaaaagcaatcagaaatacgtggttatttgcatccaatgccattgcatcacaacatttgcccaccatacctaatcttcgagaaggatccatcattacatataataggtcgacaaaacctaaattcctgtctacaaggtctcagaaaaaaaaaaagcaatacttgaagcgaccctcatctagaacaaaatctgtaatagaacttggatttttcacttgtagcacgtgcaagcgacccctactatgtgcagggccttctctctgcacctccaagccttctcataactcattcgaatcctgtaatctttcttcatgtcttcccttattttggtggccacataatccgtgccacaaactaagaatttatccttagtaaggtgggaaactacccaaggtgatgcttgataagtaatctttttgttgaacatcaaggagcttgtgtgtacattttcaaatacagtcacctcaaacatctcaaaaaagtggcttcttcttccctcttaatctctacccacaatttggatccttgcatataacgtaccaaacataaataacaaacttcttaaccatgaacttgaacccttcttcattgcaaataagccgacaatcttcttcaaatgtttcttatctctgaaaaactttcctaaatgtatcttcccacctgacattccactcatatatgtacaatgactactatccttaatgaaatctttttaaaacattagagctttgaatttactgaatctttccaagaagagaatgtatcactaaatcctctagcattacttgttctatttggacaactactactactactactacacggtgttttttgttcttttctacaaggtgttcttataagtgttgtttgcctcggtatttgggatagtggagtaaggtcaaaaggttgagaagggacccttgtatattggttgtctcttacattatcctcaccatccaaatcaatataatggttaggaccattaggaaaatcttcatgaaaggacatttacgctacatggatacctattggtaaaacactaacaccaagacccacctctagatttgtttctagaatataatttctaacctcactatgagtatcattaacagtacttggtggaggactaagatccacaataacattcttcttcaccaaagtcacaaatagaggtacaaattcatctggcttcttcaaagtattgataaatataaacttacactcttatcattcattagaagttcgtccatttcatatagttgtaattcacttctaatttcaagtcatattgtgctttgttgacctccaactttcagtataaaagctcaaccaaatgagtattagtaagttatgtcgtccaacttgaatgttatattttctattccattaaaaacttaatctctaccctcatgcttccaaacaccattatacatcaagtaggcgaacatagttgaccctgtaatgtgcaaagaaaaaataattaaaaaaactatgaaaggcaaaaataattgttgaatataaagaatatatgacaaattgggctagtatcaggtaaccattgggcaatatcatacttttagggtggataagttcaaagaacaactatcaggcaggaatcgagcactcatcatcgttcttaagtcaagggttaatttcatccataactatcgtgctagtatcaggcaactatcatacacctatcaagacttcatccttaaccttcatacactagaacctatggagcccttatcgtactaccatcaaacactattatacaatttttaaaagaaatccaaaaaacgtagatttttacctaaactcgattttcaccaaaaaaaatttagcaaaaaataccaacaaccctcatatcaaacatctaaacaacatttttaatcatcacaagaaccaataactacaagagtcaaagaaagtctcttacccatttattttcttcaccatggacaaaaatgtgaaaaaacttagtgtttctcctccaattttctacaatgtacctctgatatagtttacttcagccgaatgtgtatcttcttacaagattttactacaaaaatcttgcacaatatattatttcataagagagaatgagagaaaatgtacggtgaagatagaaagagaaagagaatgaggaagtgaaaacaatatggttttttgtagggccgaaaaaataagtaagacacgataacacgacttgaaacccgcacaaaagttagcaggtttatgtttaccttaaatgggtcgtgttcggattgactcgtctaacccgtttaataaacagatcgtgttcgagttgacacaagtaacacgaaactaacctattaatcacctatctaaagttattttagtaatttaaaaagtcataaatgagtcataagtgtgttgaatatgtcataaacccattaaacatgtcattaatatattaataggttgacatgtttaaacaaaatctatttataaacgagttacacgggtgatgtcgggtcaacttgtttataaacggatcgtgtttgattttcattttttgatacgattattaaacgggtcgtgttcggatcaaacctatacttgtaatacatgagtctcgacacgacacgatacgaatacgacccacgattacgaattgctacctttaattttttgttatgagtatttttagaatgaatggaaatatgagcactaatttttaacaaatttcaactttgatttatttttaaattattgaccaattatacaaacatgatttatcaaatttccctccaaatacaaatttttttttaaaagtggtttaaattagaacactaaatttatattaaaaaatgaaataaaaaggtatagagtgttaatataatgctcggtaaacaaaatagggattcggaccgaagtggtgatatcgttatccgtaatgtaagattacacgtgtcaagatcgaaacggtcgatctccaccattctgtcggctactgttcactgatccaacaactttgggagcaaacgactctactatctcctctatctacccagaaagaaacacagttttaattttccggacgcaactcgagtattcaatttcacttaagacagtgcgcgtgaagtccggcctcaacgcgcccattcatatagcgagaaccaacaccaacttccccttactataaatacataatctcgtctattgaatcttctttttctagttttcgcgtgcaattgttttcgcttttctcatatctagaaaattttgtatttttgtgcgtagattagagagagagagagaaagaggagagagaggaggtaagagcgggaacttcacgagtcgaaactcgaaaaaaatggcgaccatggcggagaacaaggatgaaaaaggctcgatcgaccttccagcacctgaaggctgggccaagaaggttcggttctcttcttcgtttctctttttctcactctttgatttcaaacttttttggtttcattttagccctaatttgttttcctgcaacttatttgtccgaattttcttttctatttgtactggtattgttggatttttgtctttctttagtgagttattcgtagctatttttgtttcggtctgaagattcacttgtgtactgtaattaacgaattttaaatgttttggggttaggagctgaaattagcggttgaggatttgatttgtgttcgattttgttaattttttgaagtttgttttaatattttcggtaattattatatctataaattaaatgcagttgagataattttgttattttttttttcttacaatacaaattatttctttcatatttacgtctaaattagttttgggataaatctcgtcgtactcttgtatgacgcatttctgtaagacctttattttttaatttaaagtaaataaaaaatataaattgaatttttatctttatttgttgtacgtttaagttttgaccttgcaatttgactttttagggttttttttttcatcttttcttgaacagtagtggttttttttttttttttcatcctgaccttgtttagttaggatctctgctttaaattttatataaggaaaaaaaatggttgttacggaatcttttactgcttcgcgttaaatgcaatctttattggaaaaaacatcagtgtgtttcctttctattctcgttaagctgatgggattgacaattgttcctggtgtgacccgccttagcatttctttttttgggaaaatagatatatgtgaaatagtgatgcatgttggatttttttcgattctggatcactctaaagaattaatgtggttgaatggagatttgagtaatatttttgattattcttctggtgaagtcatcaatctcattccctgtggctattttttctctgatacatcagtgttcatatgaaaatataatattaattggtgttttgatttctagagaaggaagtggattaccaatttatcatatcatggataaattccaatgtatttcagcgggttttagttaaaggtccagagaggagattctgctagtctgttctgatttacaaacaaaccctgctgatgttctctttgcaggatcatattttatgggtgtatcctaataatctattttctactgctacctctgaaagaatttttaggaaaaaaagtgaagggagatgatggatattgtgttttatttactatatggcagcttcctttttgccctgtaaattggtaattgtttcttggtttctgcttctgtatccaaaactgttcctctctctgcaagtttacaatgtcaaaagtgtgtttataataaagccatttcttaactaaattacagaacagaatccgtttaaacccctatacatttaaatgcagtgtgttggattgaagtttgtgtggatagcctttattcattgtcctgttatatcacacttggtacacggactactacaccctgggttgtagttaggtttaacaatttaaaatgttcccttcaacaattaaaaaaaaagattaagaatgcaggaaggatatacaaatgaatcttgcttgtaactgattgatgtcttaccttatgtgtataattagcaataatattctctgttatcattattaatactaatttcttgttctacattttacttctattctttagctaatggcaaaaaaaactgggacaccaaggagaaatgagataatatttattgcacctacaggggaaacgattaagagtaagaaacagctagataaatatctcaagtctcatcctggaggcccccctatttctgagttcaattggagcacaggttttttccttttttcttcctatcttcaaattgatgtgtgcacttttaaattgagcaaagatctatatctagtgaagttactatgcaatctctgtacaggtgaaactccaaggcgttctagaagattaagcgaaaaatcaaaagtaagtgagacagaatcaccagaaaatgagcctccccagaaaaagcataaaaaatcaggttccaagcaggaagaaaaggataatgaagatggggacgaagaggtagttgaatcaaaggatgaaactagtgtaaaggaggaaagtgaagcaggtaaagatgtggaaatgaaagaagtagatgcaagggatgctagcaaagtttctactgaggatgctgttgctgtcagcaaaggagacgattcgaaggaggatgcggttactgctatatctgatgacaacatcacagaaccaaaagctgagaatcaggaaactactaacaagactattgatgaagagaaagaacaggttgcaaatgacccatctacagcagaagaattgaaggaagaagctgaaaaggtcccatctacagcagaagaattgaaggaagaaactgaaaaggacccatctacagcagaagcactggaggaagaagctgaaaaggaaaaagagcctgaagctccatcagatctctcccatcaggttgaggcggtcccagtgcctacaccagtagcagatgtgctagtatcagaagacgtggaggtagctgatgagcctgcggttgaggttgaagaaggtaatgagacacaaccacttgagaaagctgagcaagatgtaatggaagcagtttttgaggccgctgatgaaaatgaagcgctagtattagaggacgtggaagaggtagcttatgagcaggcacttgaggttggagaacgtaatgagacagaaccacttgagaaagctgagcaagatgtaatggaagcagtatttgaggctgctgatgaacacgaagcgctagtatcagaggacgtggaagtggtagctggtgagcaggcacttgaggttgaagaacataatgagacagaagcacttgagaaagctgagcaagatgtaatggaagcagtttttgaggctgctgatgaaaatgaagaaaagaaaccagaggaggagaaagctggggtcttcaccccaaaactgactagcgatgaaaactcaaattattcggtaaaccttgaggagaagatgtcacaggagcccaaggcttcacaagttagttgatgaaacctataaataggccactttacttctcttttatattttttcttttgtggaagacaattattatgttaccagttaggatatcttactgacagagacagtaatatatgtttctggtttaattaggcgcattagggtctcagttcattgggatggttagtagaaacccgttactttttattttcttccttagtgctttgacacacctttatttctaacttgtgacacactattcatttaccgtaccatttggtgatttaatcgatactttatatcaatgtttggctatttctattattagtgttgtgaatcacttgattctgctctgctactgtatttttctttccataaattggttcgtagtacttactattatcggcaaaatgtacaacagatatgaaagtgttgaatattgaatctgttttattatgcaactttactttatgacagttcacaacaaaaatagtatattacatgattgataaagaaattctctttgggacgagcaaggtgtattcaaaagttggactccacgatgattaagatgagattcaacatttttaaaccatgtaacactatttccatttcggttgtaaacctgctgccaaaaatatgaccaaaagaaaaaataaaaaaagagctccactattggaacagtagtagatctcggtatgcaacaagaagaagtcacgatgaaaggcccgagttatttacaggattaaaagcttacagaaatgagtggtttctgcaatttattgccatcaatggcagattcagattcgccattctatttctaatgcaccaggatgctatttgggatcactagtggtattggttatgtataacttcttacattcaaattaattatttaattcatttaaatattaacttgtccaaagagtagacaggcacaatatttacagcggattttatgcaattgtatataaaaaatccccttttgtgcactttacttaacatatcatagaaaccacgttcttaccaagtcgcatgccagcacttaattatcagagacaggaaataagctgattttgaaattgaactttatacaagtcaacaattgatttttatcttccattgtcatcttcagagtgtaggagccctgtaaattaggaaacaatttcagcccatggtacacaccagagaaattagtaactggtcatattctcttatattttaccacaactttaacttccaaattttatttaacaatgcaatgcaggttacaaaatgtaaacctcaaatcagagacatgcagtgtatgtgtatgtgtatgtgtaaatccaagataaacaacttcacatgataaccacacttgatacattttaaatgccccgagcatctctttctagtccctcgaaattttgtttcatgcaaaaatgtcagaattgttttaagatgtgttctattggcttgttacaacttacaaccacttgggtagaatcaactccaaaaagactaatctatgagagaagggtacaagaccatcagatgagggtgcctgatctaagtgattataaacctccaaccataccaattgttacaatttcttgactagaactcactcctaaaagactagcctatgcgaggaggatacccaagtgttcataaactaccatcaatttcatacgcattcaacaagggatccaaatagtgttctattggtttcattttaatttgtcaggcctgtttataagcaattgaactcatgaatctataataacatgctaccagaggttccacaactatttatgtattcacatctgtttcactattttagcattttcatttaaattgcaaatgttaacaccctataattggtttcagccattaagaaaccccccctttatggtctgaaaggattttggtatttactgcattggctttatttacaccagtaggctttccgtcatcaaaacaaaatttttcgttggtttcggctcaccttctgaggatgaaaaataatatgaaatgggaatttttcggttgaatataggacaggatttcattgttttttaaactacctaagatttttatctttcttttatagtttgaaatatgtttgagtaacaatctttatcctagattaagattcaacaattaataactaacccctttcagcaaccacagctcttattatttttttttatttgatcacatagaaaacaagattgagcaaaggggaaatccccaaaatatttcagtgtaaaacagcaggattgaactacctgtattagtaatttaagcctagtgaaacttacaggtggagcaaatccaggtaaagtttgagagtgggagagcacaaagtttccagctgcaataggacaggaaatctcctcgcacagattgtgggtttctgtatgaacttgcagtccaaaataagaaactttgatcactacttttcccccagggatatcttgacctgaatgcaattacagtgtaaattagatagcatgcccaaggttatctctagaaattactatcacaaaaggcagctctactctataatatgtaatgatttgaccatgactaaaactctgaaatcccctattttatcgtgagtattttcatctcagttcagtagtccaagccacaaaaaatggaaacttaggctttaagaacaaacacagtgatttgcatcaagtatgaatacttaggtccttctcagttttctgtctttagagtgcagaccataaccaaaagaacgcctacatataccaacaacaaacgaacacacacactgactgtaaatgaactacaaaacattgagagtcgaactttaattcttttcattaatcaaatgctcaaatgcccaactccatactcaatttagcaccctctttcaagttgatgtaaatgagggtaggaggaacttggacaaaccttcaaaagagagcagttagtgaatagggaaacctgattattgctatctcttttgagcatgtcctgagccattaccctccacaaccgttctaaactagtcaacaatgtaaacctcctaccctttaattgttttttcatttgcaacatgcagtcataaaagaaagcaattagtcttatttcatgctgcactctcatacttgtatacagttcacaaaactaacccgaggttttaaggcaactcgaatggcgaaaaacggtaacctcaggttttgcaggctgatgtttacttcttttatataattaaaatagaaaagctagatgcaattaacaccagaatcaggatcaaactagatatagtaaataatgatgaaagaagctaaaacgcaaaccccacttcattacatatttatatatatacattttcttattattagattccagacccaaccaatgctgagattatggcatctcccaagaattagtagcaaagcaaaaatttgaacttttcaatttctgtgttatgtaaacatgctttaagcagataaggaatgtagaacacaaagcataaactaaatcaaagcatttgatcaatggttttcacctgttgaggctgatataatgaagctaactggcttgcctattaccacaggatcaggggaaatctctactccatggaccttaatagcatagtcaattttattatctgcaattttaaattacaattccaagaagaaaaataattaaatatacaaatttatcgaatgttttacaaaaacagctattctattcaagaaggttattacactctcacacacacacacacataaatgaagattgaaaagagaaataccacagtgtttgacatcggtagctgtaattggatgaaaaatcagcaaaagagtggggcagagcacaacaaagaagaggttaaaattcttcaagcgaaacagtgaagccatgagtgaacttatagtcccaatcccactctcctagaccaaacaagcaacatataagccataataataataataataannnnnnnnnnnnnnnnnnnnnnnnnnnnaataataataataataatttaatgggaaaatcattaattcacattaattttttatttactttttaaaa

SEQ ID NO: 14303 - DNA, 15107 bp, Cannabis sativa
caaccggcgatttccgacaagtctctcgatttgggagaagagtttttttaaaaagaataagcagaaatgaaacaatttttggttaaaactttcatactgatttgcagtatgagtcttatttatctctacacttccactgtccaagagggacgaatttttttttatcttttccttgtgaaaacactaatgtccctactacttgaagttattttttacttgtttccacacctcgaacagagaaggaacgagaaaaaccgcctccaaatttgtttaagcttcctaactccaatcggtctaaccgaatttcaagattcattgttgctgatggagtctggggaaggggggatttcgggttcatcttctgcacatagggggagcattgatctcaacagtagtccgaccataacggaggaggacgaagaagagattcaggagaactctgaaaagtccgttcgacagcgacaagtcgaagcggagttgcaccatcgacgccaactcgaaatcgctgaaaaacgggcgtcgatcaaagaatgggtcgatttcagaatccgttctgaaatcgcgaaacaaggaggtcctccgcttgtcgatccgatcgataacttagaggagcaagcctctattatcgaacaaatcggacccaaatccaaggatcccaccgacctcatcaatgtacgtcggtgcctttccactttggaaaaccgactgaagtcggacatcctcgacaaaggagaaagcagaagaggccataaggagggccgttcgacgttttttatccgaatcccaagattgaggaacaagatcggacgttattccggttcgtctccatttttgtgaaactattcctcaagcaaggcagccgataagtcatcgaagggtttgtgtgaataatggaatggtaagcataactcatttgaaagtttcccacggtgatctaatatcttttcaagaaaatgacgtgagagtgtatactcttgaactcagggagcgagaccctaaaataagttcaagaagctatgaagagtggtaaactctgaaaggaaagatggaaagaggggagttggctgataaagatggacagtaacgatcgcgtaatatcaatttttcggcctcgtcatcgaaagcggcttccaattgttcggaaattctcagctatatggggggcttggatggtgagcaaaaacaattgatcaagaagttggtcaactttcgcatgaaagaaggtaaaagaacgagagttcgtgctattgtttatcaaacttttcatcgcccagctcaaactgaacgcgatgtaatcaaacttatggttgacgccgtagagaatataaagcccatatgcgaagtggaaaaagtaggagtcgctggtactatttatgatgtccctgggattgtagccagggatcgtcaacaaaccttagctattcgttggatccttgaagcagctttcaaacgacgtataagctacaggataagcttagagaaatgttcatttgctgagatactggatgcttaccgaaagaggggaattgcacgtaagaaaagggagaatcttcatagactggcttccaccaatcgaaggttcgcgcatttcagatggtggtaaagtgaaaccacataaagagctcttcctcattcagtcagattattcagtaagatatggtttgaccctttttctttttgtttgaatcttcatatagaataaattcctcatactcctcccttcattcattgagttggaggaatccataggaggcccgcccgttatgcattgcatgaaagaacctttcttcgtatgacttctcttttgcctcaggtcgaatggggagatcaatcaaaaaaatgggccatgaatgaagaagtagtggcctttcaccctctttctagtgactcggggagcggatctgataaatgcacttcaaagggagggaagctaggtttcccatgttggtatggccgggcataaaagattttgaagttaggtaaaaaagaagaggtagagagagagaacagaacggaaccgatagccccgaattatgtcagggcaagagaaagaaaagtaaggactctcgttttccgcatacgcatataggctgtgaaaaagaagtccacttttctaataaagaaagagagtgattcgtctactttgttaataaggtaacggaacgaacttcaattcgtaggacgccgccgtttgctaagatgtgcttccacatcgtgagcagtaggaggagaatcccttgtttggggcaggagtatcgacgacaagtcgtgcctgaagttattcatgcacatcttgaggagctcttgctgagtaaacttctggggacaggcaaaagtaggggctcgccaccttgcaatgaactccgtgacaggttcattatccctttgcttggtcttgagttgttcgggcactccaacccttctttgtgtgttgctgaactgcttcctgaactccgagacccttgcttcccaagtcgggatcgactcttcagagaggtgggcgtaccatgtaaaggcgggcccctccaatgattgaagagcctaaggcacagtgccccattctgcgctaccggcccacatcttaccagggaatgcgcattgactcattctatcttgatagagatatttcgaattcgacgaaatgaagcacggagtgcccgctactcgttcatcattcagacagatgcgcctctctcccagtcgtccgggttcatcgttcaatcaatcattcgtacggggaatagaaaggggccggagtggcttttatgggtagaatgctcctccaactctcctgatatggctggtttttccgtttgactgctgccaaatctttctttaatggaggatcttcatcccgaccaccagatccttcttcttctaagtcttacgcagctatagtgaaaaaaaactctcgtctgccacctttacaacataggccaggccccttccctttaaaaagcccgatctctcatcaaggagagccgggtgtgtggtgtgcttcacttatgatgagatttacagatcagtagatccattacgcttttctttgatagaaagttatcctcaggccgtccctctgtagatgagattagacctcatgttcgcactcactggatgatgaacagcgaagttcatattgaattactcgatccaagacatgttattatgaggttctcatcacaagaaaatttcattcaagcttggaccagggaatctctcgtcattaaggcttattttttcaagtttatcctggtctccttggtttgatccgcggtttgaatcttctattgcaccgcttttgatctctctcccaaaccttccccttaatttcttcaatccagactaccaacaatctattgcaggggtgatatgataggtagggttctgagatttgatggcccggagcttacaacatcttatgagaagggcatgtagctcgatacaatctaaagccagccagttgcttacttgcgtacgaagaaaggggcagacggattcagccattcccatccctcatcagggtccagcttgacaaagattttgatgcgcatgacagaagagagagagcaattagatgagaagagacttcgcgccatggaacatgtcctggtctacctgaaaattcccgtgcattccaaaataaggtaatgtaatatagagaaagttcaacataggggagaaagtcttgaaaaagattctttcctgacgtgaacctaatccaagagggaaactccattttgtgctctctctcttctgtcatgcgcatcatggctgggtgagttggcccattgcgaattaacctcagtgcttccaatctggtcatgcacttttttaagatgcggaacccgcctcttcaaaataggggtcaatttttcgtaggggggtaaggaaggtgccgaggtcaacatagaaaggggttgatagtcccgtctgctaggcttttccgaacttcccttcgcctttctgcccgtgaaatccttttcttctgctttttcccaacgatatatccccattctttagtattgaagcatatattagttccagataatcatccgaacattctgggatacggttgtcaaatgggggaagaggaacgagaggcgtccctaagctttccggctcactagtaggtgacgaggggatttctaaaaaaggggtaatttcatctgccgatgcattcgttcggatacattcttccttcttcaccttttcaacccacccaacctaaaaaagcgaatttgcctcttcctggtaatgaattgagcggcagcgagggggtccggttccatagtgatttcgtctgcttttggaacttcgattcctggggacaaagaaagtgacttcggagttttgaattctcagaacctccttcttccaacagatgggggtaggcatctctcttcgagcggcagtgcaagctcggacggtgttagcactggcagaaggtcctggattagtttgtaccggtgtaggttcctgagtagtgacttgtcccccttgatgttgtggcattggattagtatagatccccatattagtagcttcagtaacattggcggctttaattaaggtatgccttaacttcgttccaattgatacgattttaatcattcatgtcatagatgacagcaaagtaggacactcttcgatggtatggcccgcgtatcggtgaaatggacagattttgaaatagtcgagaccaggaggccaggggagtggtttctctctgggcagagaaatggctttccaggccagaaggatggagaatagggtaggaatggatagggggtaatggcgggtagtgagctctattgggtccccagggtcgcttgggagcaccttgttgctactgaggatcataattggccggaggcgctgcgttgttataagcgggtctgggcggagcttgcgctgggttttgcggttgcgattggataaggaggtttttgagtgggttgggggccggggccggccccctggatggcttgctgattccgggtgctctgttgtctctgtgcattctgctgtgcttgaactgcatgaatttgatccggaggtaacctcttgagttggctgctgggttcttagggtattcttcggcttgccttctcccccattagaacagttcctgaggaaagtgatagacccgtcttttatactcctctgcatgcgggcagctcgttcaaacagttgagggaatgttcggaaatctcctagcactatcgcttccttgatgggcccatgcaggttatcgataaccatctgtactgcatcttcctcttttatgttccattttgtttgctttagctgctaaactcctccatcagttaacaaaggtaatgaattcaaaaccgggctgcattttttcattcaccagatcacagagattggtcttcaagcctggtgcagctactggctggtgaatctgtcaatcacatcgtcaaaactacgtagagcatgttgggggagagatgagttccacttgagtgcttccccttctaatgacttctgaaaaaggtgtttcaataacccagacaaagcctcggcaatccccacagaaggacagcaagtgatgatatgggtcgccgaccccattgtatttactaaacttcggtatcttgaacccttccggcagagctacatctggatgtcggaaaaaatcctggaataatcgtttacatccgtattggtctgctctactgcagcttgtattattgcctcaatctccatctttccgagaggcttctccatggggaccacagagcgatcatagtataactcttcactaggagatttataagcgctttcgaggcctccctctcggattgcccattcatgaaataaggtgcaggagttctttgcatccgtagaggaggctcatccatgattgggaatcggaatgtgggtctttgactggatgcccctccattgatcttggcttgcttcattgcattcatgaattctttgtttgattcttcgggcttcttccgatccgcttgacatcatttccctctactccaagtattccgaagtatgttcctcctttcgtggttcttcaggtgcattattaaccgagctcgagggcaatgcgtcttccccattgatcaccatgacttgtcctatcgcttcggagatttttagataatcccccagccacttccaacatggggcccattctgaacttcgttcctcttccgcttttccccatcttactaatcataatggcaatcggtcaaaggtatccccaccccaagtcggaattccggcaaacaccaagaagtatccattcttaacacaaagaaaccgccggcttttagaaaatcttttctcttaaattatgcacgatttactggggttgtcttcctttcttgggagttaagcgatgagttgggtaagcttcctaagggtatggcttctccggggcgactaaggacacacccaaccaaacgatcggtaaacgggtctcctttggtacaatctcctccgccgggtctagtctatcccgtacggttggttgttttcaaaaagtagtgcaatcaaaaagcattctatgaacgaattccttcatagtcttcatagagtaagtagagtagagagaaatgggagtaagcctttggtattctgttcttattacttagttcctgtctatctctatctagaataatggatcctctgtgaagcggagaaagatcagtccagtatttagaactagattcggaaaattcacatacagaaaaaaaaaggtgaggcttgagtctactttcgattagagtttcgattacaaaaaagtagagtagaaagaagactcactactcaattcgaaggcgacaccccttgcagcctttacgaagatttcccttctttgcttcttttttttgtttgaaataggaccgggacgggtataatccggttgtaaagaaagaaaccgccagagtgggggattgtcctgtcctcctcactgaccccaaagaagatggctctgtcgctaagcaggccggcagagaggacaccaaatgcctaaacaagacaaaaacctactaatatgcttaacacaaactttccggtccccctctagcacacgggaatcgaccctacgcaccggggacgaagcgtagaggtcactttagtttgttgtaccggagtggttcatcgtcaaaagaacaacaatgggttgtagcatttcctattaatttgtctaggggatgtaaaagagggctttctcgtctaaaggcaggggcgagctttctcactatacaatgaccactacgaacgaaggaccaacgacgagctatatagaggataagagaaggaatcccaactatattaaaaaaagaaacttaacggatactttttttttcgtctgaatatgaaggagctaagaccattccaatgctttctttcgccatgcataaactgcaccggataagctaatacgaaaataatgtatataaatagggaacggatacgcccaatacattagaaagtcattgcccatggataacgacatcaaaaaagaaaattactgtaatagtggattcgtaattgtgtaacttcccattgctctatcggagatagcatgcagccgcaaatggagacagatatatagaaagtgtgcagtgagggtggttgtaaatcactaggtagtcagtctttacttaactcggcccaagcaatgcccaaagactcccatgcctttcttggttggaccaacccaaccggcgatttccgacaagtctttcttcatttttagagcaagaacaagtctctcttcttttttgggggggagcagtcaaaaagtaaaccacacaaaatgattgttctagaatggctattcctcacgatttctccttgtgatgcagcggaaccgtggcaattaggatttcaagacgcagcaacacctatgatgcaaggaataatagacttacatcacgatatctttttcttcctcattctgattttggttttcgtatcacggatcttggttcgcgctttatggcatttccactatcaaaaaaatccaatcccgcaaagaattgttcatggaactactatcgagattctttggactatatttcctagtatcatcctgatgttcattgctataccctcatttgctctgttatactcaatggacgaggtagtagtagatccagccattactatcaaagctattggacatcaatggtattggacttatgaatattcagactataacagttccgatgaagagtcactcacttttgacagttatatgattccagaagatgatctagaattgggtcaattacgtttattagaagttgacaatagagtggttgtaccagccaaaactcatctacgtattattgtaacatctgctgatgtacttcatagttgggctgtaccttctttaggtgtcaaatgtgatgcagtacctggtcgtttaaatcagatctctattttggtacaacgagaaggagtttactatggtcagtgcagtgagatttgtggaactaatcatgcctttatgcgtgcgcccggaaacataggccgagtgctgagcccactctggctcagccgcaccacccggggtgcgagccacccgagaagcaagctattacagcgagcggctggagctgtagggagccgaggagcaaggcagtggataagatagaagaagggtccaggctcccggtggagcagaggagacggttaggataacgaacttgaaacgcggagcccgagcggccggcgagcgagtggttagtggccaatagcgccctagttgaaggcattcctctctacggctggcactcgaggaaccacggggcactccatacagagcaagcaagtcttaggggtgagacgcccgcgcaaggacctcaattctcattaggaggtcgaaccaaggacctatggaagtcggggctaccccgtccccatgggcaacgcaacagtgtcctgagggaggagtttagaggccttatagtagcacggacttctttttctttctaggtcatgcgaagggggccagtccaagatcgtactgttcctctacaaagacaacagacgctctcaacggctaggcgccactctctttctgagttattccagcttcttcatgatttcgtgccgcggtgaacaaacaaaacaaaaaaaagagggccgtctcagcggaaggagaaggacctgcaacggcagagactactgaccctcttcttgttttgttcctagccgtctgttctgttatgagtctgggaagccttgaatcctaaataatatgagggatccctcaaaatagagtaagggcgggcagggcttccgcaagggcctcccccctcttcccggtcaagatagatgggaaggagccctatcaagtaaaggccataaccagccttcttatttatgtacgtacacctttgtttcaggctcttcaagaccttcctcctgctaatccggccattttcgaacctgtctttcccacccggaggacttctcaattcttgcgattcccagcttattcttattataataagaataagctcccctttctctaataataaggtcaggcgctaacgcgaccttccttcagctggttttggctttccccttgtctaggttggagctatgaagcttaccttatttatattatgaaaaggggccacggagtggaatggcctctctttttaagtaaaaaagggttgcggatttttcttcttgatttttttccggtatgccgctccgcgagcaaggagcgaaagaaccaagtaggctgtgttaatggcaagtttttaaaagtcgagaatcaaaggactcgcagggggcgctaactgttttagttttgtttttttatcttctttgtagttatctaaacgccatttggtatttttattgggtgatgatgaagagtatagtcgtcgcagtaacaaaactgacattctccgggagcggggagggttttttaggcaggcgatggcggctctttaacagaggcatagaaacgcttataaacctagcgctaggcgagaacgagccgctgcatatggatttcgggggtgaagggagtactgatccaggaaccaatcttccatcttcggcctcttcttcccaaagtggaggtggacttccagatctgaatgaatccccgtctcccgcttccgtcattaaacacattagagaggaggtcttttcctctcaaaagaaagtacctgatctcaacgaatccccggaagacgaagaaaagaaagaagtggttcgaacccggattcgccacttggtagatcagttacaaaacgaacttcagcaaagaaaataagtagtagagagtctcgaaccgaagaactttgttgaacaattataggttttaccgcaatttgccaaaatatttgggggataaggagaaacggagaggtgggcaaccatagttttcttttttcgtggtgttgttgacgttggttggtgaaagctaatttttaagtaggcctcgcttttcggagcagctcccagctctccactatggtggaggaggtgccgtgaagatctaagagtgtgagcagtacgagctgaaaggctcccatactgtttggagggcagggggcatagatgccaaacaaacctgacccctatctatcgtcgtagaagctgttcctaggaaagattatggttctcgggtatccaatcaattaatcccccaaaccggggaagcttaagcagaaatgaaagagtagggtgagggacactaaattgaaggcttcgctcgctcgctctaacgctcgtttagtaaacagcgagtgcataagcccctttagagataggggcgagtactacacgagctcgtcagtcaagtacggaacgagccttgtctacgaagcagagcgacctcgtcttgcttctggcgaagcttctagcactagataataggcattcttgtatggtaggaatactactttttaggccgacggagcgatagcaaagccaagccgtataaaggcgagcagcccttatagcaatagcaaacggcctacttatagccctttatccccctttattcggggacttcaacgggccttacaagctcataaaatggcaagtcttcacgttttcctcagacagtgggaatgaattctattacttgattgacattgaaagatatgtgtaccacaccgaacaagcaatatgccgatatgcttgatgtaccagccaagccagctcgaccgtatacagtagttgggattcgcctttgcctcagacagaagaacaacggatttcacagtacaaccgggaaggaaagccttacatagtcgatattgatttgaacaaaggaactgaaaccggtaccagaaaccaaacaagagatggaattcaaaatggaacagatgaccgacctacaataagacgaaaatagaattcctaattccattctctaagacgaactaaaggaatgtctctaagcagctaagggatgagaaaaggaggaggtggaatttctttcaactataacatttattacaacacttaatattacagaaaatgacagagaattcggtaaggggatagaagcacatcctgcacccgatatgtcaaagcagcttgaagccctgcaactcgcgcatactgatgaaagggaaaaagcaggccaattcacgcatcttccgcagagtaccgccctatgagctaactttccatttgacggaaaagagcaagcggacctgtgaaagtcacatctttgactaatataacaggcttctgagaggattctttaatcaaccaaaacctgcaagtccaacatttctaccacttacaagttgagatatgttccattcccaatggcagaagaaggatgcaagctggaaggacttggacaagatattcttcacttggacaggagatgcagcgcgcttagcgtcggaaagatccctctacatgggtgtgctataaaactaggagaagaacagaactaaacggatcaattcctttgaccggtcgtttcgagcttccagtttttctggattgctaacgtggttcgatgacgccgacgaagggaaccagcggaaaggctctcaaaggcaggcgcgtagcataggcggactcataggataaggctgtgcgtgtgaatcccaactagagagctcctttctataaagggctactcgacccatttggaaagagcgactctaaggcctattctattggtaacttttcagtcgaaaggctttcagttagtttcagagatcacttttctcaggccaagaccgtaggaataaaaaaaaccacttctcattcaggagcgggaaacattgaaattccatttcatttagaaatcgcaacaacaactctcgttcggttacaaatccgagattttgactggggagatcatagcagacgagagccgatcccaggtttctctccttcgcctggtagttctatgttccgtatccaatagtccacccagctactatcatcgagggaggggtgcaaggcttcgttcgaataggtacgtttaatgatccacgccttctggttccggttgaatagttgttgcctcatcgaatagctggttttcctgatcaaactagaggttaccaagctcgaaaaaagccgaggtctatcagaagtcaaatcaaagaggccactagcttaagcttattccccttcactaatgcctctgactgaatagaaccccgttgaagctttagctcttctcgtcagaacacgcgcctgcccgaacagcgtaatcgcgcttctttgtcggcacattgaccggaccacagtgtgttactgaaactacttatgcttttgcccggtcaacacctagctctgggtctgtagactctggaacttaaacagcaacccgtgtctctgtcccgccggtgattatgccaatcatttgcatatgttggtatagtccaatacagaatcattgggcccactataactagttggaacagtaaaaatcaggtatgccttaacgtggtaggtgatccgcaacaaactatgaaactacgcccgcggactctagatcccgatcgctatccgctggatcttctaatggataaactttcacttatgcttgctccggaacgggctgggctatagtagaacggatgccggaatattggtttactgggccaatgacgctctttccttaaactcccttaatccaccttagaccccctccctttgccgagaggaaggactagggttaggcattcaatggctttcgatgtatgattgatgatgggcgtgctgaaagcagtgattcatgggagggagcagcttcaatagctttggctgtgaaaactcttggtcttggagcatcagttcacccaagatcggcaggacaaataactactaggttagtgccagaaaagcgtcttgcgtgacgtggaaagagtttcaaaagaaagagattcatcagctatggaatctgacaggtatcggtattgaacagagggggcagctcatataacagcagctggaatctatctaactgctccatgggcttctatactccctcgagtgatgcccgctcaagccctatccgaattatagaggaggagctaacgtgatgaatatcagacgctcaattagactcgcaatccatccaatgctacgtgttggttaataaccttatcagttaggtttatatgcgctcttccttatgtacatgataggctgaggtgaaactatatagccgttattcacatgaggagtagatccattcatagcagcttcattggtaacagctattgggtaggtaacgatagatgccgtctacatgtggaccctttcaacaactctgtaagcgatctgcacatctcgagaacccctgatgaaagtgctagcaccaatggtagtttctataccttggagcgaaaaatacctgcgtttcgtgcccccaatccgagttcgagctattagtagtgcaagtagcagcgtcagccgtaatagcagcgccagtctaatgtgaccccgaggtcagaccaagggaacttccgtgggcggtatgacgaggcacttccaggtaacgagtcatagtgccagtcgtagtagtgctagccgcctgtccaattagggacccataatcggtcaatccacatctatcgaatagagctgctaaagactagtggttcgggataagatagggcctgaaagaaaggtaatagtgagctcgagctggagctgctgctcagccagcgcttttctccttggtgagtgttttgtttttaacttgttcccttggcccattggtcacttcctcccttagtgtcaacccgaggatcccaccatttataactaagcattggggcctttaatcaaataggcttgttaacaaattacttattattatggaaagtggattgacgatcggaatcataaatatctatctctttttttattacatttggaacattaaaactatattaaataaacaattggatcgtgacaagtcgttactaccagccagccgttacctctttatgacctccttctctctttttcctagttatccatcaaatggcactatctttctatctgtgagcatggttgagcaaggtgaaaagagaagtagagattatagcgggctcccacccggtatctcttgtagacacttcttccttccccaagattaagccggtcaacacaagaggattcatatcatgtggctcacattccgtggtcgacttcccggcggaatgctttcactgctttctcggaccgtgccatttacctgacatattacccggtgcaacctagaccacaggctcttcaagaccttcctaaggatctgatctatctcgtgggactcactccggaagtataaacattgaagaggtaaggctctcaaatgcgtgcaaacccgagaaaacaaacacatactagaaaaatcagctatgaggacttcgaaagagtacgtactacgggtcagtactaaaggcttcgttagccagttctcctttgtaaacccgtatcaacaccagaacatattagaagctattcttaatgccgccaccggactcattgacgccctatctattacaattcctatgattagatcgcccacgggctaaaagcaaccttcgccatcgcccgagactgctaacaaggattctaaccctactggatct

SEQ ID NO: 14304 - DNA, 11261 bp, Cannabis sativa
ttttctattttttagttttttaaaactcggtttttaaaaaattttgccaaacaactcctattagtttttaaaaactgtaaattatgaagtcaaacagcccctaaattttctctataatgttccaccattctacactcattactaaatgtatcatctaataattagttaataaccgatttactcttcttaataataaaacatatacttaattcaagagtaaaataatcatttctcaaataactcatataatctcataatttttaattatttataaaaatactaaatacttctaaaatattaattcgtcgagttttcatcttcgaataaaagtaataaattacatattattcatatataacacacacataatttaataaaatttttataattaaaaaattatatcatattaaccaatttttaatacgttttatttttagtattgcacatattattttataattaattatattatactaattaattattaatttttatgtctaattaaaatgtggttataaaggtaatgttttataaaaattattacattgaaatatttaataacgatataatacatctctcgtggacaccaccattattgccctataacatgtatgtctgacaattggtagccacatttgggtaaacaagctaaaattttctttggcttaaagcgagaaaagtttgggttaaaaaattaaagtttttagctatttttttttaacccattagcacgagactgctcttacaaaattaacttcggttatttatgattcgtgtcatttaattattaaagaaataataataattattaaataaataaaaaaaaaaaaatctcctcctcaaaatctgacaaaagcatttaagtattgggacaaagctacagaaagtcgcgaaaccgtcgctgtcatctttccaacaaaaatcgagacatgttgttccaagcgtttcagtgttggggcccactactgaccactgataagctaccttgcttatcaaaatgtcgtaatgcttaccaaatgataagtatatctgcttatacctcgtgagtgccgccctattatataaataatcgtcatcacaacaacaattagctccagtctccatccacccatgtattgtattttgttagaagagagtgttcttctgtgaaagaaattcttttgaagagaatggagtgttgaaagttgaaacctttgtagttctttaatcaatcaatcacttcacttgctctgttattttgtgtgtgtgtgtactgtgttctcttctgttctgttctgtaagtaagcttatttctcctcttactttctttttaacttttttctgccactctaaaatgggttacttttgttttgtttctttcctacacatcactttctttccttcactccatattcttcttctttaaaaatcaccatatgggtcgtttaactttactgtttctcgtctctggaaaccctatttcttttttcttttctctttttcaaattggatgtgcgaattattgtttgaaggtctgaaatgttaaagatatttttttgtttcggtcaatggagttgagtggttgtggttcccttcatttcatgcttttttatcccttcgttaagcagcagcagtgattattcatttatttgtttgttatcttttatattttcttcaagaaaattttgttttccgggaaaaccttttcccgagaaaaaaattctttcatcgaagctctttttggtacatcaagttttgcagtcatttttttgataataataaataaataaagaaagaaaagatttctgggttttgttgtttgcttcttccagaattgagttggtggagtcttttttcatgaatttactctctctgttaagtatttgacattgtttcattgtgcagagactaaggagataacaacaaattgatcgtgatgacgtcaccattgagcaaggacctcatctatctgattcttcagttcctcgatgaagaaaagttcgaagatgctcttcatacgtaattctcaaataacccaattttgctttcttatcttaatcgtccgtgttagtcaattaaagctttgattatctaaatctcattttcatttttagacttgagcaagaatcgggtttgtacttcaatttcaagcattttgaggagttggtgatgagtgggaactgggatgcagttgaaaagtatctttctgggttcaccacaatggatgacaacaaaaattctagaaagatctacttcgaaattcgaaagcaaaagtacctcgaggcattggataggtaaagattttatgtcttggtgtttttggagtattactttattaaagaacaactttttcctcatgctaaatcaatcacaatatttcaggcttgaccgagttaaggcagtggaaatccttatgaaagatttaaaagttttctctaattttaatgaggatttgttcaaagagtttactcagctactcacattagacaatttcaggtgcgcattttcatatactatcatcacattatttcaatttttcttcagtttgtaattaagttgttttgattattatgttgataaaaaaaacacatctggtatggcagacaaaatgctcaactctctgcctatagggataccaggactgcaagagccatgactttggttgaacttaagaagcttatggatgtgaatcctcttttccaagataaaatgatgttccccaatataaagacttcaaggctaaaagtactcaccaaccagaggtaaaataatagtgacagttcagtatcatttttaagatcaatgcattttgttgatctggtatcttttattacatgttaaagggcataatccaacatataggtaatgcatgagtcataacaaataaactaattttgttgacagcttaaactggcagcattcactttgctcaaatcctagtcagaatcctgatatgagaaccctgtttattgatcacagttgtagaagttccaatgaccagtttccacaggtgaatcctagcaatcacccgataagttcggcaccaaggaccgattactttcatccaatggctgcacatggggtactgacatatttgttgctgttgattttttttttcttcttaaaatgtgcaaaataagttgaactagtgttctcatttgtcaaattttttctactcttaccagcctcttctttcaccaactacatcagttgcaacacctgtatcgattcaatcattatctacatggatgcctatgcaaccaaatgtaaatcacccaggagtttcaggagggggcattggcttcggtgctcaagggaatccagattattgtactactttctaatctttctcttaaaatactggttaaagatcttatgttacttaggttaaaatcagtgcaatatacttttggattctgaaataatttttttttacagcttcaatggcaaagggtcctggggtttctgaagatgcaatgaaaatgaggccccctcgaaattcagaacaggtaaggtctcaaagcataataataaggactaaacaatctggtttttgattcaaaacattattgtacttatgcattttctgtagactatgttcccaggaaatattccaggccaaagtaacaacgaaattttgaatctgaccgatgactttcccaagactgctgcaagatcactagatcagagatcggttaccaccagcatggactttcatcccactcaacacacactacttctaggtccattttttgtgagcttaacctttgaattacagttattttaaattgttgttttgtcaagtgttttcattgttttcttttttcattcagttggaaatattgtgggagatataagcttgtgggaagttggctcaagggaaaagttgatgtcacaaagtattcaggttgaggacattggagccagttcaatgatatataaaatgagtcttttcttttttcaattagaatacaactattatggcataacggattgtttcaccttttcttatggacttttcaggctggtatggttaagcgagttttatggacccatgatggtagtgtatttggtgagtttgaagatatatttggagcatttgatcattatttcatattctgcatcagttaaactaaactctattatcaattttacatttgacaggagttgcattctctataaacatcgtgcatctgtatcgttataatggtatcaatgacattaggcaacacttggaggtagagcattgaatgtattactatctctctcttatcaattgtatcaaagctttattctctttttctaatatgtttgttatattttctatagattgatgcccatgttgggagtgtaaatgatcttgcattctctaatccaaccccatccaaacaactatgtgttataacatgtggtgatgataagaccattaaggttggttagaaaagaaaaagagaaacagattgtttaattgatgagtgtaaacattggtttatttaaagattttattggatcctttatataggtgtggaatgtagctaccggtgtaaagttgttcaccttcgaaggtcatgctgctcctgttcattctgtgtgtcctcataacaaggcaaatgttcatgtaaggaagaagacttaattagattgttggcttttcggatttgattttcctccatgtctcttgcctcagttggcttatatactataagtttgtctaaagaactgctcttgacttttactcctcagtttgtcttttcaacatcagtagatggaaaaataaaagcatggttatatgaccgggagggacctcgggttgattatgatgcccctggccgatcatgcacaacattggtttatagtacagatggacaaaggttgatcaattaattaagactttttaatggttttgaaaattggtaatttgaagtatacttacatggaaaacaatttttgtagacttttctcatgcgggacaaacagagatggggaatctcatgtggtcgaatggaatgaaaatgaaggtacaataaaaagaaactatcaagggtttcacaaacattctttaggtattattcaatttgacacaaccaagaaccggttcttggctgttggagatgactatgctatcaaagtatgggatatggataagaacaatttgttgaccattattgatgctgagggaaacttaccagtaagttttccttttgatgaaattttcgtatacttgaaacttttcttagctggtattatttattaatgtatttattacttttctgttattaaggcgagtcctcgtatccgcttcaacaaggagggatcactcttagcagtttctgcaaatgacagcatcaaaatcttagcagcagtagatggtcttcgtttgatgcgcacatatgaaagtcagtcactactggcctcaagagttgcatctgaaactgcaatgatggtaagcttttcctgttattgatgctctaaatgcttggagaaccatcatgtttcaaaattctaacttccaactcttgccaatgcttctagtatataaaagctgataacactagtcctaacaattcaaactcttggattataagcaggaatattcaaactaattggataattatctctatcattatctctctaatgaggttgatgctctttctaggattgtggcacaagaagcatggaggatgtgatgccaagattaattgaacaagccaagtcagcgagaatgaggaagcatactgagatcagtgtaaattctgagcttcagtccttaagactctcaactatggctaacacagacaatgtaagcttttaattgtaattgttccatgttttttagacttaccaacaacaagagaagatatcacttatcagcccttattgcaatattgcttgccaactgaaaaaacatcataaatgaaaaaggattataatttctcttttgtaattgttgcagatctcaaggttgatttacacaaactcgggttctgtcatcttggcattagcatcaaatgcccttcattttctgtggaggtggaatcgaaacgagcagaatttaagtggcaaggttatgatgttacttcttttttttttttttttttttttgcgtgcaaatttatgtcctagttttggttcgattgcattttcttattagtccaaaattgtcggtgacatttttttccggtacaggtaacaaccaagattcctcctcacatgatgcagccaacatcaggcatgccaatgaccaatgacttgactaatgctaatcctggagagatggcctcgtgcatggctctttccaagaatgattcttatatcttgtcagcttctggtgggaagataactttgttcaatatgatttcttttaaggtaaaaatattttggatggaagcacagcacaggcatgagttaattccttctattagaataagttattgattaaaggaggtgcgtggttttatcacagaaaatgacaggttttatgcttccgccaccggcggcaacttctgttgctttccaccccaaagataacaacataattgctgttggcaccaattattctaccattgaaattttcaatgtccgctctgataatgtaagctgttattattgtgtcacagacaattgcattgctttgattctgttcagaaaaaaaagatactgattttgtgcatctttttaataggtcgtggaaaagcttaggggtcattccagaaaagttactggtcttgccttttcatttaatctgaacacactcatttcttcaggagcagattctcaggttaaccttttcaaactttccttgttcaatttcaacatcttaactagcatagttaacataatatacatgcatctcttaattatcttgaggatgtgacatattctagtattccattttctcagattatcgcatggagctctgataattgggaaagacaaaaaagcacgttcttgcagactccagctggaaggacaggaatgtcagacacacaagtgcagtttcatcaggaccagacacacttcctcgtcgtacatgagactcagctatctatatacgaagcctcaaaactcgaacgcatattgcaggtagaacaatcaaacattgcttcaaaaacagtcatgaatctaaaaatttattacaatgttgatcttgtttttctgttctagtgggtggcaggggagtcttcatctccaatttctcaagggacattctcatgtgatagccagttagtgttcaccggctttctcaatggagtaatccgcatattcactgcttcaaatcttcaagtacaatgccagatcaaccccactgcatatcttccagccaatatcaagtaacatagttactcttgtcattttttttccctcttcgattgaaaatacttatcaaacaaaatttttaagtattgtcctttttcaaatgcagtacttttccaactgtaatggcggcgaatccacaagatgtgaaccagtttgctgtagggttatctaatggtggagttgttgtgttagaaccattggagtcagaaggcagatggggtaatgctccacctactgaaaatggtgttaatgcaacaagaggtactccacttgttgctgctgctgcttcggaccaaggaaatttacttttactgagctcaaaagctgtaaactaatgaagaaaaaaatgaagtgtttagaatttgtaccttttatttaagactaatttggtttttcataatctttttcctttttgttttcagcactgagaacttagttgaaaataatcaagttgtctcactaataaaggtccctttagttttctatgattctgttgttttgttttgttggagggttccagaagtagtcgctgtcgtttggttacgattatattgcttctgattactgtcgtttacagtcgtttttgcaagtattccattgtcgttttatgtcgtttttcgttttttttgggttcacatattattactctagataatcttttgtaggctattttgcaaaaataaagcaaagtttcatattaagtactagcaggctaacacattaatgtttggaatgacaacaaatacaagagagtaaggggagacagttattggatctgatacccttttaaatactggttccaggcttgggattactccagatgaatctatagttagtacttttccatttagaagtaccgtttggctatgtaaatctccatttccagccattaagtgatactcttctctttcaatatgagacgaagtattggatgttgaagctgttgttgaaacaagtacttgaaccgcagtgctcttctctagattgattaagagcaatgttattcctttctgaaacatcaaatgaaatttattgaagtgtgtgtatttatttttcctttttctttaagaacatgtataactgtgaatgcagattaatttgcttacacttttcttggaacagtgagcataagtgcgcaatttggcttgcccagaaaagcttgtggacaggacattgtttcccatcaatcggtgccaaagaagagcactgtagtagctcaaaaatttaatacaaacagaaacagattttactatgagtacaaagatggaatttgtactaagactaagagtactactcacctgtaataatctggatttgggacaaaagtatttgtattgagaagaccataatttccaccaactaatgtttgtctgcaatatgttttggtatcataagatgctgccataccaagctggtccaagtacctgtttgattcattgcacaaccaggttttcattcatcaaatgtagatataagattatgaagaacagacctgcaataatctctttgaaaactttaccagaaactgaaaacaaaagcattggtaacaagattgcggccactgttgtaagctcctcctgcttccccaacccaagcaactgctgaagtccctgaatgcttaagaatgttttgaaggctactcaaagtattcgattcaccgtttagaaaagacggatgcaggatcttgtcaataagatgttcatcactgcctaaagaaagtaggacaaattaagtacagagaattctatatatttcctctcttcaactttgtctatgaaatttaaggccagcttacctggaccaaggttataaacgtgatgagtgactacttgaagagatttagaagctttgtcaataaactttttgaaccaaatgggatcaaagaaccctcctggtgcaagaaccaaaggctttattactttagaaccattataaattttcttaactatgttttgaagatggttaatatctgatgcatattgctctgctgtgattcttgcaccaattccatttccactcacttcatttcctgatacaatatatatatatatatatatataaacaagtgttaattatagtttaggtaataagctttcatattgccaagcaagcatatcactttcttattatgccatattaatttcaatgtgttttgagattttccttaccaagttcccaaccatgaatttggtaacctttgttaactgtataccgtatgagagattcagcattggtggaatcccaagctcctgttgctaagccatgtgaatctattatcttgccacttagggcatttagaccaaaaataataacagccctgcatttaaaaatgtaaggtgtattttcaaaaatactttttttttatgtatttttgaagggtaaaaaataacttttttttgatgtatttttgtagttttttgtccattttgtaaaaaaaaaaaatcaaagtttaatatgcttgttttgtttgtgatatttatatatttttctattttaataataagttaaaaatgtcatatttatttgttttttttcttacccagttttttggaagaaaaggttgagttgatcccaccgagacatagataagcaaccatgagagaagctaaataattcagagccatttttaacaaaatcaaagtgagtacaagattgggctgctttagttttttcactctcgttctggtatatgactttgtcttgtaaagtgccccctagcctaatcttcaagggtgaaagtgctgcaatatacaccaaccaagaatacttattagttattaataatgggttttaaagattatattgtcttgtcattatgggtacatataaatatatatattttccttattaattaccttgtacagcattttgaagaatgggattggtgaggtcctaccacaaaagaaaataagaagcgctatattatgaaaagtaaacactataaaacaagatatatagactttgtatcatgactcactccggagtttgagaagtcaaataatatttatgcattttattaagataaatatatagagaccacttgtattacattattaaataaatttaattataaatattaattaaaaaatttaaatttatatttaatttaattatttaactaaaaaatataaaaaataaatatttatttttatattatattaaaaatatttatatataaaatatttaagtcaaatttaattttttttatcttttcttttgcaattttttatttatttatttttcattctaatctatataattataaaaataagacttttttaattaaataaaaaaattaagtataaaaatttaaattttcttaatcctaactgagtaatattttttaaaaatgtattcatatatactttatttttatatataattagtattaggaagtcatttgcttatccaatcactaaattccaagaactaccctttcggtacttcaatcaatagccctacttgattgataaaaccttattatttaatcaaaaccattgaacagagagagagcgagagactaggataaaaatataatgaaacttatgagaccatggataagacactagtataaatgccatcgttttggcagcatccaacaatacatggtaccaaagtgtagtagtactagtggagcgaatagatagttctacttatacaatattacattgagaaatattaaggtggaacttacaccacaaaaaatgacaaattcatattgatatattttaatattgaatcattcatattttcttaataaataacatgagaaatggctaataaattgccatataataaatgtagtgttcaacatcttaaaatactaaatggcaattaaataccttaattaaagtactatccaatatatttcgtagtgaaagattaatattttcttatattatatattaaatcaaaatatgtgaaacctaatattaaattacactcataatagtttgtgacttttg

SEQ ID NO: 14305 - DNA, 11524 bp, Cannabis sativa
gtacaagtggctgaagctgttactagtattaacgacattgtgtttttcttcatatagctcagctcagaaagtaactagagaaacagaatggcccaagttctttctgaaagccttactaaagatttgacagaatggaggatcgaagcaatggttctccttagtctcctcattcaaaccatattgatcgtagccggaagcaggagaaagtactggactagcagctcactcggattctttctatggatggcctatctatcagcagactgggttgcaacactctccctcggcttagtttccaataccacaagaactgatgcaagtgcagcagaggatcctagcccgggctacgttataaaagccttttggtcttctcttcttcttcttcatcttggtggccctgacaccattacagcttattccttggaagatactgaattatggttgcgaaactttgttgttctctccggacaattgatagtctctctctacatcttcctcaacgcctggtctgcagattggcttaactatctctcccttccaatacttgtggctgcaatgatcaagcttggacagagggttttggttatgatgcgtgccagtagcgaacattttagaaaatcattgtttcctgatcctgatcctggtccagactatgccagatacatggatgagtttagtttgaagagagaagagggattcaaggtgtcttcaagaagaataattgacatgcctaaagtaggtcatcatcttaattctgcttcagcaaacgtcacaattcccaatgcacaaacattgttagacgcatacactttctttaatatgttcaagccacttttcgctgacctgatcttaaacatccacaacattttcaatagccaatctttctttcaaaacagatcatgtgatgaagtgttcagggtgattgagattgagcttggatttatctacgatgtgttctacacgaaaatggttacgttctactctaaactaggtgtctttctccatttcttgagtttgtcatgtgttatttctgtgtttgtggccttcgtcgtggctaagaaggaagctcactccaccattcatgtcatcatcacctacatactgctcactggttctaccattcttcagatatatacctttcttgttctactctgttctgactggacaatgctatggctaagcaagcgtaagaaatctatagctgatttcttttaccagcccatttcctatattccaaagtttctgacacccagaaacaaaagatggtccaatagcattgggcaatacaacctaataggattttgctttgctcataggcctgggaaatgcgctaaatatctgaaggactggataagcttttatgataagctggtgtatgggtactatttcaagaggtgtaacattcccaaggaattgaaagaggagatctttaagcaacttcagaagaaatctagaggtacttcagagcttagtgattgtaaggaattatgtgatcatagaggtgaaactgctcttaagaatgaggaatgtgatggcacacttgactggagtgttaagagagaatttgatgaaagcattcttatctggcatattgcaacaaatttgtgttataatactgatgtggatgaaggcttgaacgattctcaaccgaaccaaggcttgaacacagttcggcctgtaaattttaaagagatcagtaagctcatatcagaatatatgttgtatattttggtcatgcggccattcatgctgcctaatgggattggacaaatccggtttcaagacacatgcgccgaggcggtcaagtttttggaagagagaaactccatagcaataaatgaggagacagcttgtgaagcactgctcaaagtgagcaccaaaatttctccatcagaagtgaaaggagacagatgcaagtcggtgttattcgaggcttgtcgccttgtgaaaagcctacaaacccttgaaacagaccgaaagtgggaaaaggaaaagaagtgggaattgatatgcaatgtttgggtggagatactgtcatatgcagctagtcaatgccagaaaaaccagcatgttcagcagctaaggcgaggcggcgagctactcactcatgtctggcttcttatggctcatcttggcataaccaaacagtttcaagttacacgtggccatgcaaggactaggctggttgtgcagtgatgaactagactagtcatgtttgcataatatattaaatataaacatatgttttgcttataatctggtgtcttaattttagcctttttcttgacactaatgtactttataatgttttagtataaatacatggaaccttaatttacttaggttacaacttacaagcattcacaatatagagcacatggcctgatggaccagaaatgtaacaaaatgttgttaaaagaaataggtttatgtggatttcaagtgacttaacctgttattgtagcctacgtttaaatgtaagtttatttatttatttttctgtattgactttttttttttttctctcatgatatcactattataattttttacctctgccagtttctacacaggcaaaggtctttgctaataaatggtttatattttctcaaatgaccaaattatttgtcaaaagatattgggatttaatgactaaaaagaaaatacaaataataatctgtcactaagaaaatcaagttgtttcaccatgacaagttctgtttcaataaaaactcatcttaacacccttttcatgatcatctgcaatttgaaaatgtttggtgataccaagatgcgccataagaagccatacatgagtgagcagctctccacctcgtcttagctgttgagcatgatgattcccttggcattgattagctgcataacataatatttccacccaaacattgtttatcagattccacttcttctcagtactctcccatttctgcagctctttcgcaagcctacaggcctcaaacaacaccgtgttgcttctacctcttttcactttggaaggagaaatttcagtgcttactcttaacaatcctcctcgagccctactttcattagctatggatcttctttctttaaagaattcagtggcctcagcacatgtgtcttggaacctgatttgcccaattccattaggcagcataaaaggtctcaagtctagaatatacaacatatattctgacatcaacttgctcagctcccctaaaggacactccccacgagaatcaccatctaagctctcactatcttcatcataacaaagatctgttgcaatatgccaaagaaggatactctggtcaaattcttctttaacgctccatccaaatatgtggtcacatttctcattcttgagaacccattcacccctttgatcacataattttttgcggtcagcactgtttctctttgattttgtcagaagctgctcaaagatgagttctttcaacttattattttttgcaatactaggtctatcataccagtacttgaacatcaacttgtcataatacctggaaaaccaatacttatcagctgactttttgaggcaaaaacttataaggttgtgctgtccaactttattagaccacctcttgctctgttttgtagatgatgaaatgaaagaaattgcttggtataaataagtcacaacagcaccgctgctgagcttgctcagccaaagcattgtccaatcagagcagagttttaaaacaacagcatatatctcaagaacaattgctccaatcagcaatatataggtgatgactatatctactgtatagtaatgtcgtttgtcaatgtacaagaaaaacactgacacagaaaccacacaaccacatgtgactaaacatgtaaaacaaccaagaccagagttaaatttaagagctttggtgtagaacaagtcgtacatgaaccccagctcaatctctatcactctaaaaacttcatcacaagatgtttcttggaagaaagattgactgtgtactatgtcatggatgctgaggataaggtctgcgaaaaggggtttgaacatggtgaagaatttatgcgcgtgttgaaggttatgcgcatttgggactatgctgtttgggcggatgacagtgcggagatgatgatgatgagtgtgaccaatcgtgggaacttcaaatgttgtctcgatagagaccttaaagccctcatctttcttagacaaatattcatccatgtgccttgcgtaacttggccctgcttcagcagaagggaacatggattttctaaagcattcactacttgcacaccttagagcccaaatacgctcaccaaacttgattagcccagctataagaatcggaatagaaagtaagttgagaatattattggaccaagcattcaggaatatgtagagaacagctactagctgtcccccaagcgtaacaaagtttctccaccatagctcattgtcttctaaggaataagccgtaatggtgtccgggccacccaagtgaagaagaagaaaaggagcccaaaatgatgttacagtgaaaatttgccttgtggaagagtcatcctctgattcgttcccttgtaaatttgaaagtacaccaatagatagtgttgctacccagtcggctaacaaatatgacaaccatagaatgaatctaagccatatttttgttgtatacttcctcttgtttcccataagtacaagaatgatttgtaagaccagactaaacagaaccgacacacgaatctcggatcgattccagaatttccggaagcctttggaaatgaactcatgagccatgattatgtatataaatacaaggctaagttatgttggtggtcttacctctttagtgtctgccagaatattacaagagatcaacttctacttttcaaaaggaggagagtgtagttgttgtgttgtagagctagctagaaattaatatacaagaaaattagaattagagaaagaaaattaaactaaagaaaacaacgagtaacatcatacgtacattaggtgggtggtgagtggtgactgcagtagctttgcttggcattgacttattagctgtgtctttttatcaattaatcttgatatttgtttgtttagttttgtttgcaactgataacactagaagaaataaaataaaacaaaacttaatttgctaagagaaagtcgtgtatgactccattcgtgtcattgaaattattttaatgctgctgtacccgtaccctgttttctgagactaaatgatcccatagatgcctatgcataatgcatggtaataaataataatcgtgaattacttgacaattaccattatacccatacgttacttcttcttttttgaatttgttttattttagtatttcatatgagtagtaaatttattaacaaagataatcataaatttctaaaatgttttaatataatgtattttttatataaaaacaatcagataattttttatgtgatgtaattctctatgtacatttttatgtcttctcatttttttttcttgtttttccttagcttatgtttattttaattttaattttaattatttgaaattaaggttattagtaaaagacttttaattatttatatatttagtacgtatttctttattaatttataatatgcttgttttattttaatgtctaagtacgtatttttgcaagattagtatattgttttggttgttttgtacagtttttgcgatgtgccaatttttgttggtttttacgtctttggtttgaaataatgtctttttgacatatctcactttaaagtctattatcaaaaaatcacataaaatttcagatatgactttctttaaaagtatattaagtttttttttttttttggtaatatagtttataatattttgtaagttattttcaattatgtgttagaatgtagttattatactttggcaggggtgaattttcgattgagaattagtaggtcatagagtcgtcaaaagataagtttaatttactaaaaatttgagctacttaattttattgttaaatattttaactttatctttatcaattttagtgtgttaattctcatttagcattgacatttttgtagttgtaagcgttttcttccaaaaattatactaaacttattagttttcatatagagtgatactattttattaagaagttttcaaaagataagtttttttttgttaatttttatatcttgtcaaaaaagtaagataattggacatttttttatatatatatttcttaacattatatgtttgtttacttacattaagtgtgttttttttcttttttgtttgaatggtctcaagttgtttgtctaaatttttaaagtaatttggttttatataagtctttgctttgtatctattcatattctgtttggctaaataattagtagcttgttagttgatgttatctttttgtgatcactctttaaaacaaaaaaaaaaaaagtcgacggatgagatttcacaatttatttaattaaacttgaccaaacgggtttaattttatgagaaaaaatcgagttaattaataagtaagatcagcaaagacttttcttgagtaggtacacatgtgaaaacagtgggaaagagtatttatttaattcgttgtatacaatgcataatatttaattcgtgggacaaaaattaaataaacttgcagagtcgactctttcgctttaagatctagataggacttatcttcttcaattataatatcatcatacgacaaatcgtgcagatatatcatattataaaagttgggtatagaagcaataaatataaatggtaggttcaaacacattgttctgccttgaaaatacaaaatattatattgtgaacattaatttatcaaatacataataaagaaacgtatagtaagtaattcccactactacacacaacaactaacaagtaacaacattaataatgaactacatcaaattaaattgctacttgtgtgaattaatctaattatgctcgtaaaataaataatgttattagctgctaaaaaatcattttcgatggcttgtacgagttcttcaccaatgtctgttaacttcaattcttgaagattttttaagtgcgtcaatccaatggtcttttccaacttcccgcatctaatctctaattctcggagtttttgcattgtgtcttcctctactttaagttcaaccagctgatctagatcccataatttcataaccagaagctggggaaacccctttttagggaagaccatttttggtacacaacaaacgttagacctaaaatgaagaagattaagcagtggaagttttgctagcttcctcattagtaccaagctttctggtcctgagagtttagattttgccaacgtaacttcaacaaggctttttggtagttcagtgacgttgctattcagctttattaactttcctgataaatatagtttagaaagattggtaagatctttcaaacaatttcccaacactagtgcttgaggcgacatgttctcgtcaactgatttcaaactcaaagagattaggtgagtcaatttgccaaggcatgtcgctaattgctgttgttgtggctctgtccattggattagtgttaatcgcaattttctaaggttgctcaacttgtgtagctcgttcattaaagcaatattcttgccttgaccatgatccaaaaaggcagataagatctgcagatttggcatgaaaatacctttaaagtgaagtctacaactcctgtccaagtacaaacgttgaagtttcttcagtttccaaattgaagatggaactttttcgagatgagtatgtttcaaatctagagtctcgagatgcaccaactggcttattgatgatggaagagtctttaactcagtccgtctaaggcctagatatttgagcttcttgagtttttttaaggcgcgagacaagttaggtccgcatacaccttcaagatcaagaaccactaagccttggaaacgtccactttgaatgcccttgatcaaaaagctacgtatatctttaccaggatatgatccttgtcgattatcaaagaccacaatggagaaaggatatccatcatgttttgaaacagtctccgagtctagaccatgagttccgccatcatggctggcttctttatcgtcgaaatgataggcaacttgtctatcgaaactggtatacaatgaccaagacagagaattcttgtcctgtcgtctgttttgcaaccaaacttctcttaagatactaggaaagcgacacgtcttaactttcccattattctttttcttcacaatttggatcatatttcgatcaatgagctcataaacaaattcgtaggccctctcatcatgaattgtctctcccactaatccttctgcaacccacaaagcaaccaatcttcttactgggatttcaaaatcccaagggaacaactcaaagtaagaaagacatttatcaaaatcagtacttggttgcccccgcaagtactgggatttattcacatctctgatctcaatccatggtgctttgttttgatctccttgagatacacgaacaagcactcttgacaaaacatcacagctcactttttttcctgacaagagatatcccaggcgtaaaatagccagtggcaaaccaccagtcctcgctaccactttctctgctagtgacttaacttcaggatcagcaggacattggatcatttgggtgaaaagctcccaactttcttctttagttctcaatcgaagattgtggatgctagtactaagtacagctacatctttgctacgtgtagtgaacacaatcttgcttcctttttttgccatttctctgcattcaaagacttctttaagtaaataatccgaagcttccacggaagaaagatcatcaagaactataaggcagcgcttgacccttaagaaatttcttatcttttcaatccaatattgactttcagagctttcttcgtttgtccccatgatctggtttgcaacgcctttgagaagtagattgtggtcagagtagtactccttgcgcatggaaaccagaacacgctcttcgaatcggttgataatgtatctatgattatagataatcttagctagagtagtcttacctatgcctctcataccaactatagaaatgatcaatgcattatcattgttgttagtgtcagttagcttcaaaacaagtttgtgtatgtcttcttcaaggccgaaaacagagcatgattcatccatcaccttgattctatatgagtgtatgcatttattaagaagcttggcagtgtccatcaattgctttgtctgtcgtgattcttccgaataaggagccattaacttcaacagctttaaactagctattccccttgacacattcgttgcttctcgaccatcttccaataattgttgcgtattcaccagcattttcttcaatatttcgaagcaagccatcctcgtattggtcgcaccttcatttgcttctagattgcttaacttgctccaaactgaaccaaattcatcacacaaaccttctcttaatccttttgatatctggctacgttcattgaccatgcgcagctggctctgaatgtcatccacaagaaccttaatgcccctttgttgtgtggaaagcggcctgatcatgcgggcatagcccttggacgggactcttctgatgaaattgaaaccgtatgtctctttcaactggagaagatgagttaactctttatctacacgcttcacaatctgcttgagcttatgcctcataatccaatcgctgaaaaagttctgtttttgacttgaggcctcttgtaagaaaacatttatctcattgcgtacttggatattcatttccatagcttcctccacccaaaccttttcaatgttactttccattgtcatccctcgcaagtctctcatgtaaggctcaagtagttgcatttgtaggagaatggatcttgttttcttcaccatagttctcccacgtatcaaatgattaggagtctcatcaatcatgcgctccaagacaaaaggaaccactggaccaacatgcagcattgcagggacataacccagatgctctgtctcctcaatgggccgatcttgcagtctgctaagtttagtcctggattcctcaactgatttgatgatgtgattagtgaagtttatttttttcacaacctcttgcaactcagctttgattgtcttctctccctttgttctgaaaattccattggaaattttagtcttgatcgtgatctctcccttcgttctgaaaatcccataagcaagctcgaaaatatctcctacgtttctgaggaccaaaacaaagctttttgcagcacccccatctcttttcaacttaagtagtttctccagatcctgagcccattttttggcacaaatgcctacttttcctgcttttttaagccaacgcgtctcggcctcactcaaagttagagttattcctccaatattgagctcggagtcccacacttgattggccttttctttgatctgattcactgtacgatatgctttgcggaaatcttctgaaagagcatcaagtaacctccactctcttttaatccacaaattcttctcaaaatacttgaaagttatacacctaagggcgaatacgaacagaagggaaaagccaacaacgagaaagagcataggcattatggtatcggtatacatctagagtactgtaagctaaaggtgtatacgagctattattgattgagcagctgtaattgttacccagctttaagcttatatgtatatattattttctgtgtaaaatttccattatatggcattcaccagggtgggagttatttagtttattagccacttattgacaatgatccgttgaccaattgctaattaagaattaatgatcatcacctagtgaggaggtttgattaaatagatatatgacatgcacgtgattctcttcaacttaatataatctgttctgatcatttaatacgttcattattattattattatcattatcattattgttgttgtttgttattattttattgttttaggtagaccacgtaggcacgtactctgtactcactcggacaactaccctattatatatgagaccaacatcatgtggtatttattacaaggattgctattaatctcctgtgatttctttctacccatgagattagagccttaacacaagtacttggtatttttttaccctagttttaaattaaaagtatgtaatataggatattaaattgtattaataagacttgataatgtttaatacagcaacaataatgacttagaatgactaaaggtcatcataatatcaatattggtactattcaatatcggttatatttattttactttaataaaaattataaaaattcttaactaattatagggtgttatcttatagtggtgttaggtgaaaaacgctaatcaattatagaaggctaattagtaatttttcctcctgaactttgacatgcagtaaat

SEQ ID NO: 14306 - DNA, 11875 bp, Cannabis sativa
agaaacaatctatgttcgaatcttcgaggaaaggatggatttaatccgagcagccataattggtgcagctggaactccataccatgatggtcttttcttctttgacatttatctaccacctgaatatcccaatgttccaccagtaagtttcttctgcatttactcaattaccaaaactctatcatggggttaagactcggtagctactaagtgtagaaagtcaataaagaagtatgctttatcttaatttgtaatgatttgtaaacttcttacagatggtacactataattctggtggtctccgtcttaaccccaacttatatgagtccggaaaagtctgtctcagtcttctcaacacatggacaggctcaaacactgaagtgtggtcagaaacatcaactattcttcaagtgcttctctcacttcaggctcttgtgcttaacgaaaagccttacttcaacgaagctggctatgatcagcagataggaaaagccgaaggggagaaaaactcagtaagctacaacgagaatgcattcctcgggacctgcagatccatgttgtacctactacgtaggccacctaaggtacaatgctaaatccatcacaacgaacgaataatttgaaattaggctccccgtctaatcttacaatatgtgtgatcagaatactatattaagtttgtttttcttgaactattctaggataaagtttgcattgtttttgaaattgaaaaccataaacatgaccaagagctactaattttgcagtaaaagttagccttttttcggttttttaaatctaaaaactgttttttttgagatattctagtataaaatttgcatttttctgaaaaagaaaacaataaacatgaggaagagcttactaattttgcagaaaaagctagccttttttctgctttttaaatctaaaactatattaagttcgtttttcttgaactattctagtataaagtttgcatttttatgaaaacgaaaactataaaacatgaccaagagcttgctaattttgcagaaaaagttagttttctttttttttttttaaatctaaatctatattgatccaaatgaacatatttctttctctgcagcattttgaggcacttgtggatgaacacttcagcaaacgctctcatcatattctaatggcgtgtaaggcctatatggaaggagctccggtgggttgtggtgaaaccgaaggcaaccctccaaagggaagctcgacggggtttaaaattatgctttcgaaaatcttcccaaagctggttgaggccttttccattaagggaattgattgcagccaagttacattacaacccgaaaaatgagcagaagaagctgcaaatgtttcaagtgacagaagtagatgttggtaaccaaatctttctgtacttttgtataatttgtataatagttatagttagtgtgctgattgaattgaaatccatccaacaaaaaaaagaaacaaaagcaagaagataatgcttttggaagatcttatggtatgtttttgattgagaatgtggtgattgattcactcataataaagtgttatgtaatatattaaaggtgtaatctttctcctttctctaggtcttaaattgttgtaatatatgaatattggtgttgtgaaataagttggatttgatttgtgtgattttgttgttaatttatttcttcaaaaatatatatctatcacctattttagtgccaaaatgatatggaaatattaatctacctttaattttggttcattttatctttaaatacacattttattatgaaatttttgataagaagcaaaataatattgctttaagaaaactagaagttgacttgtgaaatattgtatattttaggatgtaatttgagtgataaatgaattagactaattggtgagaatatatatcctttcctttaatatcattttccaaaagaattttattttattattctttactaagtacgtattaaaatttaaaagaggatatcttgcaaaagattatgtcatatatatggcataataatcagaaaaagaaagaaaaatagtttttcttttgtaagattctttctaaataaaaacgatttactatttttggcaaaaaagaaatataatacaataaatatataatcaaaattaatataataaatataaaaagaaaaactaagaaaagagatgcaaattaagttttatatatttataaatgctctctaatttatattaagataaatactattttgaattttgtgttttgtaaaagttactgattaaactattcgttttgttaaatgacaaattagaaatatttaaaaaatagtacgaaatagtaccttaaattaattttttgtcaaaacaaaagttaataataactcaatctagatttattttgataaaattagatatatttattagtgttagaatttgtcttcaagcttattatattaaaaaaaattatcgaaaattaagtccaatacactattttagataacttataaaatacagtgtacaaaatagtattaattattttttttttaaaaaaaataatattaatcttttctattataatcctatttttcattaaaaataattattattattattctaaaaaaaataaataataaataactcttttatcttaaacgggtcagagaaccgggttcggttcaaaaccggtcgttataactaactaactataaatatctctgtcacttccaagcttcctatccgtacaacaatggaggatccttcttcttcttcctcttcttttttttccaaatccaaacaaagggtttttcaatcaacccaaatgtcactccttttcctcttcttcttcttcaccaatttcaaacccatcgactccgccactctactcacacccactccatttgataatttcgaatccgtatacgatcaacactgctcccacatcgtccctcgaaacccttcactctcccaccgattcgatccctccatctcctcttcctcaccttctccattccgattaggttacttcagaggcggcgctccattcctcaaccaaaacccagattccgattactacggcagcaccggctataaatctcaatctataaacttttatccctttaactcagtcaaaaccctaaccggagatgtttaccagttccaggcgaatttgaatcttcgtgacacttcggtgaacaccacgcgccgccgtgggttgcgtttggtccgatttaggggaccgaaatctgcgattcgaagacggcttaggttttcgcttagtgggtattggtcagaatcttctcggaagctttgtatggttggatctggctcagctgtttttagtggtaatcaaaactctcttagtgttgttctcaaacttgattatccaattaatgctaataatatctataatagtttgataattgggagtttagagagtttggatggaagttttgaacagatttctttaatgggtttttatcaagaacaagatttgagctatgaatacaaattggtagggaaagagaaaaatgggtgcgaagaaggaattggggaaagtttgtctcttgaaaaccaagataaatgttttgttcttaatgcgattgatccaaggtttaaattttattgtaatggtgatgattgtgatgttcttggtaagagtcttggatttgtacctactcatatgttttatcacaagactaggtgttctactaatgagactaaatggcaaatgttgttgagtttttctaactcaactgttgatagtcctaggttttctttcacacccaaatcgagtttcattgctgaaggggaatggaacgcgaaagacaatagattctgcggttttgggtgtagggttatgaatttcacagagtcttttgctaatgcttatgttggggattgtacagtcgggtttaacttgaggtttccggctagcttttctttgcgaaataggagtagtgttgttggagaaatttggaacactacaagtatagcgaagaagatcgagtttaggagttttgatgaagatttgttgggtgttttgggttaccaatataagtatagtaatgagattgatagtgagacatttggaagaacttgtgggaaaaagaatatggttaaaggaagaaaggggaaggcatacccggttgagtactcgtctgatatgaggtttgatatgtcaatacgaaacaggaaagggcaagttggttggggttattcgacaccattttatgtggagaatcagctgtatagaccaaaccagttctatagagttcccactaactcacaacaggttatgcagactccgaaaagtagccaaagcagcttaatgaatataagctacaggatgagcttgacattcccaactgatttcaagctcggtggtgagggtttttcatcgaatatggaaatatctgctgaaggaacttatgatagggatactggggtgctatgcatgagagggtgtcgaaatctagcatcaaaaactcagaatgcagttacaaatcatacattagattgtgaatttacagttttcgttcagttttctcctttgaaagcaaatagtggcaaaaacatcaagggaagtattgaaagtagaaggaaaaagtcagatcctttctactttgaaagtttagaattgtcttctaattcactttactctggccaagctgcagcctccatatggagaatggatctagagataacattagttctcatatcgaatacactcacttgtgtgcttgtggggttacagctctttcatataaaatcgcacccaaatgttgttccattcatttcaatcgtaatgctcgttctactcaccatgggaaacatgattcctctgctgttaaactttgaagccatgttcgttgcaaaacgcagccaacagaatgtctttctaggaagtggaggatggcttgaagtaaacgaagtaatcgtcagaatagtaaccatggtagccttccttctacagctacgcctactccaactaacttggtcctcaagacaagaaaccgaaagcaagaaaaccttgtggaacaccgaaaccaaagttctctacatcacattaccaatctacattggtggggcattcatagcatggcttatcaaccatttcaagaactcatatgggatttcttcacaacacaggcacaaattctacgtcgtgtctccaatacatagagatcgacatgtacattccctttgggaagaccttaaatcctatgctgggttagccttagacggcttcctactccctcagatactcttcaacgtgttctcgaactcgggggaaatggcattgtctccattgttttacacaggaacaacactggttcgtcttatgcctcacgcgtacgatctttacagagctcatgcttatgcttcatatttggatttgtcttacatttatgcaagccataaaatggatttgtattcgactgcatggaacattgtcatcccatttggtggtctgttgttagctcttgtcattttcttgcagcagaaatttggtggtcgttgcattttgcccaaaagatttagacataataatagttcttctgtatatgagaaagtacctgttgttataggcaatgatgatttatgattctttgtctttgttacatttaaacaaattcttagatagatatatatatttagaagagcatgtaccacaattttcatcaaaagagagatcttgttgttttcttgtttctattttaaatagtttttattaaattattattggtgtaaaactctagaattgtgtcgaaattgtatactattttgatcattaatttcttataattacaaagggttttgtccaaaaagtaaataataaggaacctagaacagaagttggaacaatttttctaaatctaacacaaataaccattgttgaatttgaattattgatattattttaataattaaaatgaataaaaaatctaaaaaactacattaaaagaaggatgcaaacttcccaattcccaattgatgaattttgcaatgaagctgccttacattacaatttacatgattacataataacaataattgaagaaactgagatgatatgtacaaaaccagagaataaatagctaagtaaacaccaaaacatactctctagtctctgatctctaccactactactaccaatcatgttactcctaattactacccgattcatggctatgggaattgaaaaaccaaaatctaactttgttcaacaaaattacaaacaaacttgaaacaaaactacttgttgtgtcagtcgaatcgatctaaggccactcttcctcatctcatctcatttcatgccctgaaatatagttagaaaattccaaatattagaacacaataagcagtgattgtaggcttggtaaggaaagacaaaagtacaatatagaagaagtatatacctctgagtatacacatacaaactcttctctttggtcagtggaattaaagctggttttcgattccatctcgtaccctgaaacattggtttgaaactaagttgtaaattttccaaccgaaagcaaaccgaaagaaccaaattctagttttgctcatttgagagtagagtacctttaggaatttctcagttggtctttttgccggtgagaatacgagatatctgaagtcctctactgaatgcttcattaaataagatcctagtttgcattgcttgaaatccaggtaaccaagagagcaatgccattggcatcatgacaataactccaaacagcaaatcatacatccgagcaaccgataccaccgtctcccaaaccactgtagactgtaaaaagggtctaagaacttgggctattaaaatgattccccaccctgtgggaacaaaggccaagagacttgttacaatatcgatgaacttgaagggagtgaactccagcagtagaacaaccacaagtactaacaccaaaatgacaagaagttgaacgagtctgtagtacatgtggtctcttacagcgtatttgtcccgagcgtacgcaatgatcatgtaaatcccgacggccactaccatgtaaatccatgacagtaaataaaccgctatactcgtgtttccaccggaaatgcccaactggtacacaacaccgtattggaagaagaagaagcggagatctaaaagaatctccaacaactttccccaaagaccggttgttttgaggtgatcttgttcttcgtaccaccacctttcccagctatgatcagaagttgtaaacaccccaccagtaaaccataaccaattcatgaaaatctcaaagtcttctacagttttcagccaatcgaaacccgaagggttgaacacaaaaggcgacattatccacgacactacaagaaaccagctggacaacgacatgatgatgtaaacaaaggtattatcagccatgggactgtgagaagcatacactgttaaaataaccccgagttcgattgccttgacaaaatggcttcgagcatagagtcgatagttctcaacaaagctcttgtgttgcaccacgaatccacgtccagttgctcggtacttagcacccccgtgaagaatggttcggccaaagaaatgggtgcgagttcccatagaaaacgtgtaaaacaacgaggcgagctgaaactgcatagtcaagaaatcccaaattgcggggaggaagccgtgctcaagagagttctcaactatcatagggagggcagtgaagataccgagttgtataacaaactgctgattcaagattgcaccgagggcttcattgttgctggtgttcttactagcgacatcctcaaccccgctaagagcaagataaaggcgcccccataaaaacgtataaacagtaagtatcaccatcattgtgttaaaatagtatccaacagtactgtaataaaatgatagcattcgaaagaaatccaatctgtgacccaaccgatacacatctctgctcaatacctgctcaccattgccactggctaccttagcttcaaacatggaaatctggttcagtccaacatctctcccttttcctacctgaatatactcgtggtgagtcacattcccgccccgaagagtgcaattgaagccggcgaatatatcctcgctgatgttgattacttttgaagctttgctgatcccaccccgaggcaaaaaccagaatctatcgaacacatccggatgaccatagtgcattctcacctttaaaggatttgccaaaacacgctgacccagagtcacgaaactcgtttcttgggcagacatgaaccaagcaagtgacgacacagaacctgtgaaaatgttctcccggacacccaatatggttggcttcctaagaccataactgaccttaaactcctctaacaaattcctcatcttgagtgcctcctcaaaataattatcttggttcatgtcaatggtttgaagtgcatcaccccttgtgaaaatgatggcgtggttctgattttcgggttttccttcaccgagcttcaatggaccgggcaacctgattcgataaatctccacctctcttcccagttgttgatcatacttaacaagaacagagtaatactcagcatcttctctaccaaagttaaactcatcgacataggcaattcgaagggcctcattgtttttcatcaaatatagaatgtcctcagcacgggggtctccctttgctttatgttgaccgtacagttggcacgccaccacatatgtaaatttcattagagcacacccatactcatgtcctttaaacaaaagaccaacaccgctacctgctctgccaagattcctcgaagtcggttgcttcactggctgcataccttcaaaacctcggtttcttttcgctgagccgtgagaggcaatttgctgtgatccttctcttatgtccatctcagacgcattatcaagaaaagcaagcatttgaagggctctatagtagtacatcattccccttacagttcgagatagggtctggcctctgtacgatgcccaaagtcggagatcccttcccttttcttcccatatctgctcgtcatgctccaatccttctctccgcattctctccataaagtttgtccactcatcttcataaatcttctgcagataaaacagtgtggaaatcccatcttcattgtctttcagaagcccatctagtttaaaaattacatcttcatcgtagtaaggtgtcaaaacactgaaagccatcattttctcaacgataggagctcgaggcatgttcataaatagagaattgctgaaaaaagcaatgcgccttctcgcctcaatgttcttcgggacgttatgtatgtaatctctggaagttaagatggtatgcaggcgcctgagttgcctatagaagagtgcatcctcgccgggaggaaacacaaccgccttttcaaataacaactctgtctgattagctggattgatactcgccaatccttctcgccttaactgctccatggatttcttcgcctttggtaattcgcgaactgaaagttcatacaaggcctgcaataaattcactgctttttctatatctctctttgggttcaacaaaagctcgataagcgaaatcaacttgccatgaattttttgaagcagagacatcttgtactcaactgtgaactttcctctctgaatgcaactatctatctcgttgaaaaacctttcaacaatcaaatactcttctgtgccgtacttaacaatcacaaacaaaaaatgcttgacagtatcataggcttcaatcacagcacaccgacgatactcactcttgcatatcttcaaccaaagagacaagtcggtttcatcagccagctcagtcgcctgactaagcgcaagcaacaattcattacaaataagaaaacaaggccaccgaataacccgaatgttccaacaattcggggggagttccaaaagctcgagttcataatcactgatgagatcttcttccctgaaagctataacaatctcattccaaatcaaagcaaacctggtagtttcaacttgactggattcgatcttcttgaaagcctgaccaagtccatatctcagtttcaatctatgaatagaatcacgggccttcttcaacagtgacatgtcagaagttaacagctgctcctcaggcataagattgaactgcatagcactagcaaagaactgaaacctgagcctaagctgcccgatatttcgaatctcacccaaatgtgagaacaacccaattgctgcaccataaatggaagagaatatagcataccaaatttgcaaatccatcatataaatcaatataacaggaagccataacaacacaacagctatttcattagtactactgaaaaattcatgccaacggtactttccatcaagattcaaaagagcctttgttggagaaataagaggcttgatttgcaagaaataactaaacgagaatttagaagccaaaaccaaaacccagaaaacagtatacttgatattatcaaataacccttctctcaatcccctaccgacgaaaattcgtgtatagaaccaccatgtcaaccaagaaacaactctccaattcaactcttccacgaaattcctaacccaaggaacaatgaaaagaaccaatgctaacaactcaggagcaagaaaaacaagaacagcttcaagaaaagtaaagatcctctgatcagcaccattagaccatctcctatcagaattcttctgactccatatcctagcatacaaaacagagaacacaacagtccatgccaaagcaaccaagcttttcaaaaccatcctcaaaccgagccacttcgtctccctcgaaaccaaactgtactgagtcccagcatcaagcacagactgaagtaacctcaaagcaccccaagtaataaacacagtaagaagctcaacctgaacatctcttctctccaaaccctgccatggaaatgtctcaccatcccaagcaacaatcacagcagcttgaaaaaacaaaatcaacaaaatccacaacctatcaaaactcctaaacaaattccaaaacgatctttgctcaacaaacccagtcttcccaactctcctactcttcggagtagtcgagaagaaattactccccaaatcaataggccatttaagcttattaaaacacctccgactccaaaaatactcattcacatcatcataatttctccaagcagaatgaggagctttaccatttctactactctcaacctcatcactaatagttttataaatcggcataatcacactcttcaaaaaagcacaatcaccagaaaacgatggcaaaaataactgaccagtattaggatcaggtttaccactcaaaacacgattaagctccatagccatatgatgataaatataacaaatacattcaggagcaaacctcagattcccagcttcaccccaaacaagaagataaagagccacataaagcaactcacgactacaatctccacttccacctctactaccgatcgaaacgttagacttccttccaacataagaacaccaagagctataattctgaagcaacttcttccgatacttcctcagaacagattgctcaagctgatcaggaacagccggtggaggttgcaatcgcatttgagagttagccaagtgaagaaccagatgctctctctggttccgaacgctgtccttttgaaacccaaagaacaatccaagccagtccatgaggtcgtggttaggatcgtaagccgcgtaaggatgaagaggcaatcctccggtggatttcagagcagccgcggcggcgcgtacctcggggtacctcatggaagggtggtccatgagtagcaagtcgtggatagggataatgttatagacttctctcattgacggcgg

SEQ ID NO: 14307 - DNA, 4717 bp, Cannabis sativa
aattttctaaaaatttgtgggaagtttcaaataactacaatatacgttgtcatatttttttaaaaaaagttggattgttacatatccatgtgccaaaaacacgaaaacaagttgttttaaagtatgttttatgcgcatagaacgcattatcttaaattctatatttggcaatttaaattattcaacattttatgaaaacttccttacaaaaaaaaattacgaaaacttgtgagaggtcctaaataactaaactgcacaccgtaaaataaaaaatgtttggactataatttttttaggagttaattacagagacactcctacaggtggtgccaaacgatatgcccctaccaaatgattttcctatatataagtaataaagctaaccattgccggtatataaatgactaaagaatcgttttcatgcacaagatcaaatatgaaggtttaaaaaaaacaaaggcaaaattaaaaggttcttttataaattaatcttcaccaaaaaaaaaaaaaaaaaacggtcagtgcataaagaaattaagtaaagaaagaataactacaacatatactcaaattgtataataaatattagaaaatttctgaaacagatactaaagataaataaccatctctttctttatgcagaacttcttagtaaaaatccatacattcagtcaagagtcaagacaggctgagatctttcccaatcaatagaaatgaaggaaagaggttgtgttacaatggagtcaaagcaattttccaaaggacaaacagaatatcagaagttgcctaattagctaattagccataaaagatatatccttgataaagtggacatgaggttgaacaagaaatcactaaggaatgcatgcaatttctgaacagtgtaagtagagatgtttgactaagagaccagatcagctaaccttttgtatcggtaatactcttctcgagctccccgaagatgacgccttaatgtcgccatggacttctcatcagtgtcatagtccatatcattttctcctaatcgaccgccttgtggtttaaaggatgggtcttccctgaactgaggaatatatcattcaacatgtttaaagagaacctttatccaacaaagaaattgaagtataaaaaaataaatacataccatttgagataacattttatcaataacatccatgtagggcctcaaaggatcacgcttcgacatctgagtggatgttgcttgagcaacctattaaggaagagatcattacgatttcataaaatcagctataccacatacagttacagccatacaacatgaactttcacaagctattacatccttgatagaataaatatttcaaataatagatcaaagattgttctcaaaaaatatatatatataacatctacttagtatcacttattctagggactgaatcctgttgaataatggacaaataaatgatgatttcagtgtcctaaacttacttgatcctttctcttagtttctcaatgttaatgacttgaactctcccatttcatatgtgttcactctgaaaactctattttacaaatatgtgtatttattttatttctgtcctcacaataccgatactacaaattggatctttcactcaaaagactgagaaacagaacccataaaacgtagtcttttccactgtcaatgtaccagagttgcaaaagattattttaaatatctctaatacattgtgaaaaatctctattttctatgaagacaaaaaaactgaagtatcaatacaaaactgttccaaagttcaaattcaaatgttcacattacattatgacccatgacccatcactggtctcaagcatccagcaactatcaagtatcacctcaaatgaatatctgattgcagataatcatagcaaaaagaaaaggtacaacaaacccaacaggtctagatttttcttttttctttaaacaaaaacaggaattgtttgcattatttttaaataataatataataatttaaataaacaaaaagagaagtaccacaatagcgtttgaaagatcttgatgagcatcatcaagcttcacggccattttagcaattttatgggaaaggactttctggcgggttgtccaatctgcatttctccaaatgttccttggaatttcactcaaaccaaagccaaggagaaaagcaccagtaaccagtccaaaagtatttgagcaggccattgcaaaacccagaacacttcctttcctgtttacacatattgataagcataagaagaatagctccaagtgctaaaatatggtatatcaactttacaaaagtgagatacaaaccaattcttgtgcatcataatgagaagaataagtccaaaaagaccaatcaatcctacaatcaggtagaagactagattaacatgaacactagtcttcaatctctccttcatagtgaaatctccagcatcttcaaaaccctgaataaggggcaccacagccctgcttagacatagcataactcaattttatgaggaaatttacacatattacaaaaggtcatctgcgctgcgcacctacataagcagccaaagatgaaccacaaagagaaacgatatcttaagcagaatgtgaaactaaccagacatagatcatagtaataatataccacctaacatttgagagaataaactccaccatagccaccataaacaatatgcacatgaaagttaataacttttaaatcaaaatcctgaaaaaatatataaatcaaggcatttcaatagaaaatgccttcctagaattctataaaaaaaaatggaatatcttctcaaatctaatattataaattctattaaattggacgtttattttcctagaaaaatgagttcataaatgtatataactatatatacatatatatgacaggtaatgccaactatagagcatatgtatccgacgatgacttgattgaaatgtgattaaaaatactagagcatgtagtatccatttaaagctttgcaacttatatgtacaaagcgggttggaagatagaagagttatagtttggaagcgtaccaagttaataaaaacgtgctccaatatgaccagctccaaaagaaagaaatgcctccattcttgatctcgtgtattgtctgtatacattttttaaaagaaaaaaataagaaatacaagtaaagcaaattaatccttagagaacgcatgcttcaatcaaccattacatccaatttaaatatgctttaaaagaagtgaaatttcttcaattgcactgcactttgtgaataatgaaagtaagcaaatcacctcgacacaattagagaactgaagtgatagctttcaaaaatatgaaatatcagctatagcctatagctattgttacgtcaaaacaacaggataaaatgaaaatcaatacaggaaaatctaaagctgccccaaaatgtttcctgtcaaagatccaaaagagaaacacttgccacaaagtaataaagagtaaaagtaaatccgtaatgcttactgcgggcatactctgaaactacaataaacttcccagttttattggacagaaaagcagcttaattaagaagtgcacacggtatatatacagacgtatgcgtaatattgaacttgtatatatataactaaacctatcacattgcattgccccaaaattcagacaaaatgagcaattgagctctgcggtgatgagatgttaacaactagaaaaagaaatccaaagctacaaacaagcaatcaaatcaaaactatcattcatctgaatcacctctgccgttaaaaaataaaaaagatcaataaaattatgtccataatcataaattctacaatgtcgaacctaaattagggttatgatgactcaagaatgggcgacctaatttatcaaacaatgaagatcaggaaaaatgaaaatataaataatgaagacatgggaaacatacggtccagatatcggcagggacgaggatgatgatggaaagagagcaaaaccaggtgtatccgacggtgagaagaacatagcgaggtacctcaggtccatggaagtatttaagcgtcaaaattaccatccccaccgtcaacggcagggagatcaggtagaacacccacatctctgcttctctttctctcggaaggtaaagagttaggtggatccgaggacccgatcgctgggaatttgaggcaccggagccgacgtttttgtccactgctgccttgcttttcgggacatacgaaaatcagaaagcactaaatccaggagacgagaagaactaattattttttattatttactttttttttcgcttaaagagagctaattagttttcacaacaacatattccatttgcccacgcgcccttctttagagttggtttttatttttttctttcttataatgaaaagctttcattaaagaagttcaactgaacttaaaaaatgttagctcactacaagataggggagagcataaaatttaaaaaaaaccgaaaaaacccctaatggttaaaatcgccattgaacacagtcggttttttttttttttttgtaataaaccgaccgaaaaaaaccaaaaccgactgttatacatatatatattaatttattaaaccttttttgtatgtgttacagttattaataatatataaaaataatatattatttttttattaatattaaagttaaaagaataagataattagtttttgaaca

SEQ ID NO: 14308 - DNA, 5435 bp, Cannabis sativa
aaaaaaaaaaaaaaaatcacaaatctataccacaatagcaaaaatggtcttggtggtttcttcaatttattgagtttttggttcgtgaatgacggtcgtgattcctgtgggtgcgagctttgattcctgttggtcgtgggtatgaagatgatggtggctcttgagtgcaacttgggtcttggttccatcgggaatgcgagaagacgagagaagaaagagagattaggtgaggttttttatataagacgggtaatttggggagatatgaaaaaaaacttaaattactaatagtgatttaactttagtttaggttgttattttttgcttaatgcatgtaagcatgttaattttatcaaattttccttattaaattgtgatttttaaagtttttttgcctgttaaaaaatctcttagaactattcacattacgtatgaaatataaacactctgttaaattttaactcatatgggtgactaaatgtttatttagcttatgtgttagtgcaaaatatatattttaaatgaagttaatttataattcaaaaaaattattttctcttttgaaaaattattagttgtttatttattaattgtaaataaaataattaatttttaaaatttaaattacacatttagcccttacaaaaaagaaaaactacgcatgcgatgttaagtttatttttatgtatttttagagtccattttagtaatttttatttgcttttgtttagatttacgcttattttatttttatttcaagttttaatggtcaaatatatcatattggttaaaataagagaatttttgctaaataaaatgaattttatgaatttagtatgaattttggagttgtaaaatacaatcggtgaaaaattctaagttttagatgctcaacatgctccgtttgtgatcgaaaaatatagtctgaaattttaagctaatttttcactatcattcgtttatttctagaaaaaatattttgaataaaagttcttaatctttcttttaactttccaaacatcttgaattgtctaatttcgagctatatcaagagagttatggccaaaataccattaagctgtatcgtagcagaatttcagaattgcaaccgtttttgaaattttccttggaatgctgcggaattcactgttcagctaccacccaagtgaccaaatagtttaatacttttttgtcactttgcatgaatttttgaaaggatagcatattacataaatttcttgatttaaaagaggtcctctttgattgaaattttaaagataaaattaaatactgaactcttaactattgatagtatttgcggagatgatcatcatttcatgctcttggaattagggatccatccattcgtttgagtttgtagatctcagagcctatttcatctccaacttcataaggtccttcctaatttgggcctaacacccccattctgggatcttgtgaggtgagaaagaccctttttagaaccaggtctcctatgaagaattttctatttttcactttggaattaaagtgttttgtcactttcctttggtatgcattcagacgtatttatgacttctccaagagtttttctacgagatctagcgattctcgcaacaatgactagttggtggttggatcatagttagtccttctatgggagggaatggtgctctcatcactgggaccattgtttcacattcgtataccattaaaaatggagagtgttcggtggtggtccagacagtagttctgtatgcccagagtactcatagcagttcctcaggccaattatttttgcaggctaagagtttctttttgagcgtgacttttaatatcttattcacaacttctacttgattaattgcttgcgatcttgcaactgcagagaagattttacaactctatatttttttttcttcagaattctattaatatgtcactatcaaattgcttgccattgtccgagactatctcttggggtagtctatattagtagataatattttttaccacaaagtccagagtattctttgcggtgattgaattcatcggctgcttctacccatttcatgaaatagtccactaggactaaaacacgtttgactccacttcccatttggagggacccaattaggtcaattccccataccacaaacagtgggattgtcattaatatgatttcattcggaggggcccttgggatgtttataaatttggcacgggttgcacttgtggatgtagtcaatgcaatctttcttcattgtggaccagaaatatcagtgtcttaggatctttttggatagactgggatccccagtgtggtccccgcagaaccttttgatgaacttcttccattattttcttagctttgggattagagacacaccttaggtagggcatacttaaacctcttcagtataagatgccatcaatcatgaggtatcgaggagcttggtactgaacctttcaatagacagccctatcttggggcaattctctcttagtcaaatagttgatgatggggtccatccaactaggcacttgattggtgattgcaactaggaattgtgattttctcacctggattcagagaacactagtagggtttggagcttggattcaaggtataatgtcttggctttcttctctttggaattccttagctcaaaataggttcttatgcacgaatttgagaatttaggtgctgtggaggtttaagctgtttgaatttgtattctggagttattttaggggttttggtggtattttgtgttgggttgggtgattgatttggtttttaagtgggatttgagtttaagaactcaaatattttcctttaatggtgttttcaatttttgagccatttattgtgttctactgcttgaattggttatgttggagtgtatacaggtattctagagaatattgaggagtttgggtgtgatttgaggtcttgggaatatttttgaggttcctaacactgaaccggtcgaccggtttagggggacctgtggcaactggtcgaccggttggtccccaaggaaccagaattccagttggggaactggtctaccagttgggtcaattttggaaccccagtttttcttatttttgtgatattcagggtattgccatcctattcattgatatagggatatttctagttttgttttaagtccccaaaaagtgttttaatgtatctctcactagagttacaaatgttgtgttacaaggtcctgtaaaatctcgagctgcaattctactcaggttgaccggcaaatctgagttcggaaatgaggtaagatagcataaagtatatacatatgattaaatgcttgttataatttgtatacactactaacactgagatatattagttttaagagtgttagtatagtgtaggattttagggtagttacaatgttaccaacacgagtatcaaagggtacgtcgtgcatgtggtataacactttgtgactcccgaaagtacataatggccctaccaacacgggtatggagtcagtactctagtacatatggtacaatggtcatacttccgttgagaaaattcttaactatttggtgagcttggtaatcgagctcatgatggcttaagcacaaagccgatataacattgcttatatataagttatgcatatctttgcatatcttactgagcatatcttactgagtctgtcgacttatcagtttgctaccttgtgtaggtaagggtaaatctaagctggaggagcagtgagatgtgctcggcaaggattgtacatatcgcggtactgcaaccaaaaggatttcagtctttcaacattttgaaccgcgtttcacggttgccctgaaattttgtagtgtgtaaaaaaaatgttatgtaattttatatattatacatgtatttgcagcaagtagttttaaactcgggatcccgacctacaaggttttataaatataataaataagttttatttcaaaatagtaaatctttgagtacgggcattacaacaactctcaatgaaagtaccaaaatattgactgaagttttcaccaaccaataattggagatgtatgaggtaattaatgagtgttagaagagaagatttatgtggttgggtcatttaaaaatgagtctttgtccacgagacactatatttatgagagtatttattacagagtttctccgactgatcccccttgctatacatcattaggggtatttataggcttataatgttagtaagaaagtcactattgtcgtgtttatgtgcaccacactttgcacaatttcccgaatataattttagggcataactgcctacttttatgatgaattttgggctatctataggtgttcggtgggatttgacttattctatatttatgacttgacgactaatttatgcagctgtcaattgatgtattggatcttgtgaaatcagggaatgatgggtttaaacccttaaatatgcatgttagagtatgtcatcagatgttcttccctatgttgtattaaatatgtatacaacgtcttgatccttgagtgacatgtcatgcttcgatcatcagtcctcctgtacctttcttcgggtggacttcactcgcggagaggaaaagacaagagatattcattgtccaacaagaccctttcggaaatgactattctgtcattaatctcccgaaataataggctctagaagtaattagagtatcaatttaattaattttacaaaatatagggtttcaatttgaatcatcatttaaaaaatacaactattaaactggccgtatttttgaaattagattattttctaactaataattatctagtaataaataggcaattaattaatttgcttattttttttggtttatcattcttgcaagcttatatatggacatggaaggacaatgagcttggatctatatatcaaaaatgatcataattagtaaaataaaacattttagctagtgggcgtatattcatgttctttattaactagttggggtttcttttcaggtctttgggagcactttgatttatttaatttgtgggtgtaatttctacctaaaagtaatatctagtgtagattattgtatgttatttccacacggtctattaattaatgaaatgatttatatatattgatttgagtacgctttttctttttttttttcttaactattgatttgagtacactttttctttttttgcttaactattgatttgagtactactccactaaaatctctagtcttgcatgttgtcatggaattgagttggtcaatgttttctaattagttgaggactatgtttggttggacactcatatatatatttatatatatatatatagggtaatactatggtaggatctaacaaaagttccctaccggtagggaacttttttttaaccgttgattttaga

SEQ ID NO: 14309 - DNA, 10905 bp, Cannabis sativa
  modified_base (410)..(423): a, c, t, g, unknown or other
gaatcatcttctctgagaaattttaatgagtgaatcaaagaactcaatgagcacaaatatgagtttatttatactcaagattcaggctgatctactaatgatcattattgtgatatgaataactcttttcatggtaaacggtaagttaatgaaggatgtttattacatatcgatccagtcatgcataagctaattttacacagtacctttacacatgtccatctacatatgtgatttgaatcaaaatcacacacactaaaagtttagtgtataataaaccatgcttagcagttctatattaaagattcctagtactttaatattctacaacttgttttattcatatcatataatcttaattctcttgtacatccttacaagattataccttctccatatgaataagaaannnnnnnnnnnnnnataattatactcttataattaatatatcacttatcttatatatatatttcatatattctctaatatattatccattaattacttatttttaggacataaatcccaacataaagtactcatggaaattcctcaggccagctatttttataggccatgagcttatttttgagtgtcacttttaatatcttattcacgacttccacttgaccattttcttatggtcttgcaactgccgacaaactttttatgactgcatattttccacaaaactctgtgaatatgtcactatcaaacagttttctattatctagagactatcttgtgaggtagcctgtatctagttatctacagacaatattctttaccacaaagtccacacacgtctttgcagtgattgaattcattggttctgcttctgtcttctttgtaaaataatccaccatgactatgacatgtttgactctgccttttcccgctgaaaggaacccaattaagtcaataccccagactacaaatgaccatgggcttgtcatcaatgagatttcatttagaggggctcttaggatgtttgcaaatctttggcatgggtcatacttttggacgtagtcaatgcaaccctttttcatggtgggtcaaaattatccttgtcttaggatcttcttggataggttgggacccctagtgtggtccccacaaaacccttcatgaatctcttccattattttattagcttcggggttagagatccacttcaggtatggcatgcttagacctcttcggtataaaattccatcaatcgttaggtatctaggagcttggtattggaccttttgagaggtggccctgtcttgaggcaactcgcccctagttaaataactgataataggatccatccaggcaggctcatggtttgtgactgcaagctctacctcagccaggatgctaggatccagaaggtactcaatgggcaccaccccagtctttccacttatttatttaaagccaattttgctaagtagtctacgtgggctttcttctccattgggattttctcaattttgtaacttttgaactcttggaatatttctcttgtagtgacaacataaaaagccattcttacaccacaagtttggtattctccaagcacttggttgcaactagctgggagtcactaaaaatttctacctcaacccatgtggataaggcttcatactctacctcgttgttggaggctaggaatttgaatcgtaaggcaatttgaagtctcaaacctttgagtgacaccactgttatccttactcccgatctattctcgtttgagtccccatctacataaactttccaagtgggggcacttacttccagtttgtgagcagttgcttcagtatcgtttcactccacaataaattctaccaaggtttgacccttaatagagatgcatgtgacatataagacgtcaaaatgtctgagatccatggcccacttgagcattctccttgaggcttctggatttttcaagacttgtcacagtggatggttggtcaagaccttgatgaaatgtgcttggaataggccgtagctttcaagaagctattagcaggcacaaggccaatttttctattaaaggatactggacctccacccatatcatccttttacttacgtaatagaaagggtgctggactttttcttcttcccgaactagggctgcactgattgcaatttagaaactgccaagtatataggtaaagatcttctccttggactggcttggtcaaaactggaggcttaaccatatgctcttttaattttttggatgcttcttcgcactcatcgatccattcaaatttttgacttttcttcaaaatattgaagaatgggatacatttgttagtggaatgggagatgaagcgactcaaagctactattttccccatctggctttgcacatccttgtgcttcctaggggatggcatctcaagcaaggtttgcatctttttagggttggcttctattccttgttgacttactatgaatcctaagaaattccctcacttaactccaaaagtgcattttttagattgagcttcatcctatactctcttactaccctaaagcattctcagaggtcatcagagtgattcttacttattttggatttgactagcatatcttccacataaacttccatgttttgcctagaaagtttttaaatattcggttgactaatcgttggtaagtttctcctacatttttgagctcaaagggcatgacaaggtaacagtataatcctttatcagtacgaaaactagtgcactttcggtcaaccacatgcatcttgatttggttgtagcctgaataggcatccataaaggccagcaattcataagctgatgtggcgtctaccatttgattgattcttgggagttgaaagcaatccttggagcaggccttgtttaggtcggtgaagtctatgcacactcaccatgtcccattaggctttggtactagtaccagatttgccaaccactccggatagtagacatcctagagacagatattggacatcattttatccacctcttgctttaaagcttcagacttgattaggtcaaggggacgtcttttccactgcacgacgggcatatttttgttgacattcaaaacatgggtaattatgtttgggatgccggtcatgtctccgtgattccatgcaaagtcatccgcttactatttgatggtctccatagtttcacttttttctttagggttgaggcctttcccaacttgaactactttagttggatcctaatcacagatttaaatttcctccacctctttcataggttcaagggttgcctcatctcccatttggggatccaattcatcgtgtatttttgctgggtgttttcccttaggctagaccttgagcacaacttatttggaggctacattgtagcacttttttgcttctccttgatttcctcaaacacttcccactctcactgaatgagtagggaacttaaggtacatgtgtctaattaaaatgacaaccccaaagtctaccaatgtcggacatcccattatggattgtaggctgtaaattgtggtaagacagaagttgaagcataagtagttgtccattacacataaagaaaactaagtaatgcttcagaatgcactgtacacaagcattaaaaagaaagtgtttaacatgggattatacatataatattttaatttaaaatataaaagataagattcgatactgcttaaccgcacctaccaataccaatatgggtactaattgtcgataataataaaattaaaaatagatttagtcactataaactaaactactaacctcaaaccattaaaaaggtgcaatatttgaacgtgctttgaggagtgtttggacacaaggtcatggggagcctaatattccccatgtggatgagggaattttcgttgaacccagtgagctgcgagccacttggagataaatcctattccgtaaggccaatggtgaggaaagcttctttgaacaagatatatactgaactcccattgtccaccaaaattcaagctactatcctgttagtgatgggagttcgatgaccaatgggttgtgatgcggaaaatgcaccattcgagcatctttctttgtgaaagttattagttaatccatgagacgaggcctctgagctggtagctatcctactttgcatacttcttcatcatgatctaaggctctggcataccattttaacttattacgagttgaacccccaacatgaggttctcaagaattcatagccactctcccatttggtctaggtggctgccctagcaagaccccttaattttggggaagagctcacagaggggattatacttccaggacatgtgttacacctctgagaggtaattgagctctagcttgtccttccctcatgtgaggcaagtgattccttatccattcatataagtggtcgagctgtatcaaggttttaatatcatcttttaagttcttgcattcattggttgtgtgcccaatgttattatggtactcacaccttttattgggttctctctgggaactatcatggtacataggaggggtctccggtagtgaacattttgccttgtggccaagtacacacaattttttgtgtccactaggtcagtatactaggtgtactgagagttatacctagcctttttcgattttttgctatcactctgagtgcttcccttggatgaccgcttactccataaaactttaggagctacaattacacttactcctagtgaggcagactgagtaggatactgcgtgcacaccccaggggctagaccacttgctcacaacccataatcagagtgagccgatgtcatgatagaatttggtgagtatccgagtattgtttagaattgtacacttggcatgccactcgtttggggagaaacaggaaccgtagtccctgggtactgtactctaagagtatatcctgggcctccagttggataatatcctccgaaagcatttatttgggcttcttccaggttatatatttttgagctctattctggaaatcttgaagactaggtgcgccttcttgttgcaactcattctaaaatggagaccctgtccagattctagcttgcaagaaagccaattattgtatgttgtctgcttttttagttttggaagcctcctccttgaacctcttgatgaagttttttagggtttccattggcaattgtcaaagcactaacttcaagatttatcattgtggctgcaacaaattgtcttctaaagctaacttgttacttattctagcaatctacagatcttggttctactttctgaaccgttcctctactgagtcatccaacatcaacgggaaacataaacatttggcatcattgttaatcctcatgactatcataactctattgaaccttgataggtgatcacttggatctgtgttgcctgtgtacagagtaatttcaggcatattaaagttcttttgaagttcagcttctaatatgtttcttgcataaggctcccagtcctcacaataaaatttagagtcatctcccttctgcctctggaagaccctcgctatgtccttttggaggatagcaagttcagctaggattccctcatctagaattcctctgaaggtaggtgtgccctcaagtccccatgtttggcattgagtttttattgtaaatcaactgagggatctttctaagcggaccttttttttttcctggcccttgatgcatggacatccctcttcagtctccccaatcctaggggctagttctccctttaggaaatctatccctgcagaccttttcctttagggagatcagaatagactttctgtggatcgtcagccttaagcatattcgtgggatttccctttgtggtaggctttttagagggtacctaatgggattaggctccttattcttttgtttttgacccttcttgggctgagaaagttctccctcagtcctgtcttgtatagacgagactgtggttggatttacttggatgcctgcatttttcatagccttcttcatggcaattaatatctattgcatcctgttgttttactgtttttgttctgccaactcaacctaatggtcaacaaccttttgtcttagcgcaactaggtctatataattatcttcatcatagtcttcatatttttcttgattataatatttcgggtcattggtatccccttttcctttagcatccaccctcgaggttgcttcttccacttctgggtcctttgggtcctttaaatgttgtggacgtgaggtgttccttatttttaccattatgctacgaggttacttaagacttcctctttttgggtaggcttactacatccctcaatgaaagcaccaagatattgagcgagatttttggaagccaatgattagacctatatgaaagatttaatggaagttagaagagaaggtttttacgtggttgggggtattaataaaccttactccacgagtcactatatttatgagagtatttattacagagctttcacttggtagatttctatttttgttttcaatgaggtatttataggcttgtaatggtggtaaagggtcactattgtcatgcttgtttgcattatacttgacacaattttccatctataacttagggcataatttcctactcttgatggattttaggttgtttgtaggtgtttggtgggatgtgatttatcctttatttgtgacttgatggctcatttatgtgaccattgattgacacttgggggttcatgaaatcttggaatgatgggttttgacccttatacatgttagtcagagtaaggcatctatttttcttccccacgttgcattaaatgcatatacagtgtaatgctcccttagtgacatcatcttccactactcctcccatactatccttcggttatgcctcactcgtggagaaggttagattaaggatgcttacagactagccaaatactcccagagatgattaatctgtcattattttactacaagagtaattaggggaatgcatctcgcacacgtgggtcctaccgccacatggcatattcttttattgtcacgtattttgggagaaattctaagcaataatcttgaataaacttcagccctgctatattttatgtttaccaagtaaatctgataggctatttcgatgtgcataatttttcaattgtagatggtcctaaactattaagttagtctctctttattttcataaaacataatcactatgttttactccttgatacattttaaaataacacttacaataaaatggtattaaaaagacacataaataaaaagtaaggagaattgcagcaaaagtttccaaaaagtttactttgatgctgataagtccctaacctcgaaaaataacggcgtagtccccaagctcgagattattgtaagtctgttggtcctcttttttaacatatctgttaatttctccctaaaatgtcaagtgttgatattaaattgcagcataagtccctaaaaagtttattttgatgcatataagtctccaatcttgaaaaattgtggcaatagttacaagctcaagattcttgttactccgtaggtacctaatttaactaccccattcgttgttctaaaaaatttcacgtgttaattttttattggtctaaattataattttaattaaaattaattttaaaaacaaataaaaaaattaattatttcaaaaactaagtaattaactttttttatctttcttcttcttcttcttctagttcactcctagcccaacatcccacctctgatatactttactaaaactctccattttatattagcaagagatgtcactctaaaaaaattaagtaaattttgaaccaaagaagctaatataataaaaacggccaccaaaatccaccacccaccgtagatggggactagcagaatagattcatagagagtattaaaaatgaaagacttgttattattcaatatcccaaaacaaggtatatatacagagtgagaacgagtgtgagttagttacaatacagttgggcttaactaactttgtaaaatagaaaacaagctctctctatgaaaacctatagcaaactaaccaacttaactgaaatgatgagtaaggacttctaatagtccccctcaagatgaggtgtagagattaatgacactcatcttggacaatagaaaattgaattgagtttgaaagagtgctttagtcataatatctgctatgttgtgtcaagaagggacgtatatgagctttatgcgtttcttggtgacttgatcacaaaccatatgacagtcaatgctgaaatgttttgtatgctcatgaaacacaacattctcggatatgtggagtgcatcttaagtgtcacaatagagagtagcatgtgtagaatgtgagataccaaagtcattaaggatgttaaagaaccaaagaagttcacatgttgtattctatatttggcttctgcaaaggatttgaaaacgattatttatttcttggacttccatgatatgagggaagggccaagaaaaatgtagaaaccagtaatggatcatcttgtatatggacaagttcctcaatcagcattcaagaaggcttgtagttggaaagtacagtcttttgttgagacagaagagctgaagaaaaagcctaagccaagaacaaattattgtggaccaagatctttaagttggaattttgaatttaagaagattttgaaggcagatgcatctgactcattcttagtttcaataactatgtcattgacatagactagaagagcaggaaaaacattattggatgatttgatgaataaagaatggtcattaagggattgggtaaagccattactaagtagagttgtgcttagcttagcaaaaccattctctaggagattgctttaagccatatagacccttgattagcttgcaaacaacatttggaggaagttccccatcatgtacatagcctttaggaatcgacatgtaaattttctcttttaggtcaccatgtaaaaaggtattatttatgtccatttggtaaatggaccagatgtttaaggcatctaatgcaagaaaaagtttgagggtgttaaactttgcaacaggtgcaaaagtgtcaacatagtcaatggcatgttgttggttatacccttttgtaaccaaacgagccttgtatctttcaacttcacctttagagttgtattttattttatatacccattttgtttctaataacatggcagtgaggtgggagagaaactatataccatgtattgttttgtttgagggaaaagaattcattatctatggcttttagccattggaaaaggtttgattcttaactgtatgaagtaggctcgagtttgatgtatgcttggagaatggcatttcgataagtgtggagcctaccatacttgagatatttgttaaggggatgtgcagtagaagcaattcatataaaatcctttaaatgggcaggtttaaatgtttgtctggcagctttagtggtgtggtttggagcaataggcattggtgtaggatgtaataatgaatccctgtaagaatcagtaggggttggtagaatttctatattgacctgttgtaaaggagtaggatctgcagtgtttggtgttgcaatgcgcttggcagaggaaaagaaattgtcaagttcaggagttggggagccttttaggggaaaaatagtctcataaaaaataacatccctggaatgaaaaatagtattgctacccagatcgaatagtgtataggctttcataccattggggtaaccaatgaatatgcaagcatgggctctaggagaaaatttatgtctcttactggtgagagagtaagcataagcaaggcaaccaaaatttcataagtgatcataagtaggttgtttattatgaaagagttcaaaggattttttttggtgcaataaaggtgtggaagtcttgtttataagatatacatcagtgttaataaggaagggtcaatataccagtagaagagaggattggaaagccaatgccctagtaacatttaaaatgtgttggtgttttctctcaactactgagtttgttaaggtattttaacacaagaattgtggatttggatacccttttgagcataaaaaagatggcatgtttaactcttttgcattgtcacatctaattgctttaatattggtagaatattgtgtatgcacaaagctataaaactgagtaatgtattgttggacatcagattttgatttcaacatataaacccaaaaatatatgctatggtcatccatgatagtgagaaaataacaaaatccttcacctctttaaatgtgaaaatgacgccgaatatccatgtggattagattaaaagaagaagcagcaaaattattttttgaattaaagggaaaccttttttatttttctaaatggcatatagaacaagaagaaagtatagtagagtctttaaaatgtaacattttatttataaaacttgtagtatacattgaatgatgactaagtctagcatgccatgaatgagcactattacaagaactattacaaataattttattgtgaacaacaaaagtggaattggaatcgtacagcaggaataaagatgagcaatacgtttagcaatcctaatcctcttgttctgtgaaccctgaataatgtagcaagaattagtaaaaaaaaatgttgtttgttaatgtttggaggaaagtgagaatattgaacaaattgaattggaaattaagaacataaagaatattgtataggtttaactaattggagaatttaatatgtaaagccctaaataattaggcacactacccaaaatacttatgaaaccctaatcccctaatcgagattactaatcaaaatagcgcag

SEQ ID NO: 14310 - DNA, 2212 bp, Cannabis sativa
aataatatattgcattaattttttaaaaatattatttaaaatttaattaactttgtatttttatactattaaatatgtaatatttaacatttaacacttatggtatagttagtgacaaggaaatataatatctagattatttcttggctcaaaaatatgtgtaaaaacaaaaataactgatcaaagctcaaaaagggcaaacaagggataaacttgcaaatgtaggtttgacaggcacacactttccaaaaaaaaatgcctaaaccatttttcaaaacacatgtcattaaggatttcgcatcaaatgtcaaataatgcaagctctatccaattctaattaaacacgcctccaatcctagtcaagcatataaaatagaatctaaaaatattgtatttgcaaatatatagtatctattttctacaaacattgcaattaaactccaaacggttggaccaagcacacaatttttcacaaactccttttcataaataactacaaagcagcaacatacaaggataatggcttaacagtttacactaaacaaacactttaaacagcacaaaaaaacctaaaaattttaaagctctcccccaaactaaaggttcacattatcactaatgtgatattaaagtacaaagaaagagaacttacctgatgccacatcagtatggcagaggaggtggcggtggtggccactggtacggagtgtactacgcaagatacgagaaaagattctccatatttggactcaccacaagcctttgaactaaatcattcaactgatccacttgaattcattcatccgcatgcctcagctccatgtaattattgaaattggcatgcatttcttattgagcttcaatcatgtactaattttgggcaatgatgtaaggtatgtaaggatctggacccctactcccactaggcataggggttgtcagtccattacctctagcttctttgtgagcacccaattccatatcaacttctccatctccctcattcacatcaacttgagtgcgtttagaatttttaggatgggtgctagcaaacaaaggatgtggaatggaatcaggaaacttgcttacataattcggcgtaattggaccttgtattttcctgggcaccatacttttgacataagtcactaatcagcgagccatgtcccaaaccacaagatgtagttaagcaagataaatcaacaattttctcatacaccaagccctcacatcaaatgttgatttacttcatgatgccatacataaatcgaagtcgatcctgaccaatattaaacatatgagaattaggatacatccttgcactcataaaatgtacccaactctagtataaaaggagccaactaacatctccatatacatttcacataagcgtcaaccatgatccattcaaccccctcataagtaattgtatcaacaatttcttgccaagtgagcttatcctcatgaatcaatgtgttcaggtcctcgtcaacacaaatccaaaaattaggcaacctatataactcattaataaggtgggcaaccacccatggtgctgcttgacggtgatctgaatgtctcgcatttaggttacatgtgtgtttgttgtaaaatatagttgtcagaacgcatttttttcttcccctcaatcactatttacaatctggatccttgcatgtaacgtacaacacattgggagctgacttcttcaccatccactcaaaattgttattaattgaaaacctaaccactacttgtcttaattcttccttatttttgtaaaaattgccaagttttatctcccctaatcccttactttgtaaataaatagtaagctcatgcttttctattatatcttcctttgcccacataggagctttgaacttggtacaaccttcaaataacgagaacattgagaaaagtgcatgatgaggaagagcatgttcttcatatctgccttgtcgactactgctagttctaggtgtatttcattttcattacaggattgccattcttgctgtgcaccatggttgctcggtgcatactctaacctcaaggaaggtacctctacgacttcatcgactaccaaatcatgttcgtcatccatatttaaatctataataggatcattattgtagaagggagcatcaaactcctcaaactaaccaaatcctgccgcttcttgctgttgatctgttaggttttatgccct

SEQ ID NO: 14311 - DNA, 3644 bp, Cannabis sativa
atctaccaatgtcaagatattaagctatttcctcatgaaggatttccatctactctaaaagagcttcatctctgcaattgcagccaactggtggcacagcacaagcactggggtctgcaaggactaaactttctcaaaaaactaagtattgatggatatgatggtgaaatagtgcttgattcatttccagagggattgcttcccatctctttaactgaactgtcactgaattatattccaaacttacaaaagctaaatgacaatgcctttcaacccctagcatctcttcataagttgtcactccaaagttgcaagaatttgcaagttctgccagagcaagtggtctcgagcacatctctacgctctttgttcatcgatggatgtcctatccttgaaaataggtaccgaccaaggagaggtgaagactggcataagatttctcacattcctatcatatcaattggtcactggtcaaggttagtaataattgaattctacttaatttgagtggttgtatttttcatggagaagaacggtctcttatttagtgtgtttatgttaattttagaagactaaactagcttccatattgtagtgcatattacaggactgaagaagatgatatatgaggactgctcagagaaggaaaagagaccatctcatttcattctacgcacaacaaagtttgtctccactgcatgtacgtatatgtatatatatatatatatatggtagtgtacgtaaaatcatctttagttgctgaacttgaatgtgaataatgtgtagctccttacaagagttaaatgtagtatatgctcattataagttgttggacatataatggaagatacgaaattagtgtctaatttctgcctacggttaccaacttaccatttcctgacactacttaccataagtgtctaatacagtatatgaaagccaaacaagatagagttgttaaaatgcaccctaatcccatcaacatttttagttgttaaaatgtatactttatgaagttttacatatatgcaaaattcacccctttctaattctaaaggggcaaagcttcaatctctctcctaaaaatggaagtttcaaaattcacccctgaaaaaaaaaatcgggaaaaaaatgtatgtattttgattagttacaacatatatttgtaattaaaaataatgaatataaacataataatagttttgacacattagttagactatctcacacatgttatagagttcaatggttcaaatcctagtaaaagcctccttaactttagttgagtccgccactattattttgcaataagttaaatactgaaaattataaatatttgttgcgcaagaatatagtagcatttgcaaagttttccatattgcttatctctttaaaaaatcatattgacatagtgaatttaaattataaaagatatgacactttacattaaccatactaatgaattgacttactcaaacatgtaacttggcgaattcaatagccttcttcccatcatgaggcttactgaagaaatggctgaaataatccgagtacttaacctgtttataaataggcctctctccactctccaatacttgtggcaaaggtccaattaatgcctggggctctggattcacaaatatagggattgaaatcctactcgtgttcctgttaggcactgcccgatgctcaacgctcttgtatagatcattgctcattatctgaagcacatcgccgacgttgatcaccaatgcaccattcacaggcggcacatggatccaactgtcagttatgtcgccttcccggtgaacaaagagcccaccagagtcgtcttggaggagaacagtgatggttgatatgtctgagtggcggccaactcctgctgtgagttctgggttgggacacttgggatagtaattaaagttgagcctcattgcccccattagcatatgttcgttctctttatcaatctccttcacattcagtttgtctagtagcacttgcaatagccttttgatcacaatttcagctctcttcatgtactctattgcttcatgcctagtatttttttgagtcattaataagagaaataagaattaagttcataaaaatattgcatcacagaattatacataaacactcaatgtaattaatcaatctattgttttctaatacatcaattgaaccttagatataaacaaaacaatttgtcagaaagagaaatgcaaccagttgtttaaattatacaatcaaggaaaggaatatcctcatttagtttgttatgttttcatgaaaaacatatttaacattatgtgttttcaatgatatttaactgtatttcatcatatttttaaattgtaaatattcgtaccctaaattaaaatttaatcaatacaattttattaatttaattaaatagatcttaattatatataatcaatttattaaatttgaatttaaaatttataaaattttaagagagtttgattgtgttgataaaattttatcaaaaaaaatttaatcaatacacttttatcaatttaactaaagtaccctaaagtgatatataatcaatttattaaatttgaatttagaatttataaaatttttgagagtttgattgtattaatattttatcaaaaaatttgaatttatagtactaaatatatatgattttaaaattattattgaaaacactactaacttgtatcaagataaaataaccaaatccatttatttaaacagagaacagaattattgaatacaaaaacactcatttgtaattgtttacacatcacgaacaaagatcccaaaacaagtaaatggaaattgaaatatatcttttataaaagaatctaaattggacaaacctacattccggaggccaagaggcggaagcctcatcctctgagacatagagcatcatgagatagtctttccacttcaaaacctgctccgctctcgggctgaagctcgttgccaatcggacactctccgatggtgaatctttcagatatttcctcttctccggcactggtaagtcgaaaaatcgatggacggaggccttgaggccgtggagaatgtcgatcggaatgccatggtttacaatttgaaagaaaccccagttggctgcagcttcgcagatagcttctttgacttgaggatcgtccgagttggagaaatctatgatgggtatggtggaatgttgggtgttggttatggaagagtcgaatctctcgtgaagtggttggatatattgttgtggtacagcttcgatgcccaaatcggctagaccctttacgccatttccttggttcactacaaactcagtgacgttgaatgaattggacaatgcagatgccatctccttggctaccgaaaagaaagatgatcttttttttttctcttcacgagaatttaggagaaattagattatataagtgaaatttgttaaaatatatttaaaaatttagactattctttcaatataccacctttaaataactctaaatattctccaaacactctaaaatctcaaaattactcgtacaattcaaaagctctcttctcccactctctctgtctaacttccctctctctctctctctgttattgtaacaccctaagatttaggcacgctaccc

SEQ ID NO: 14312 - DNA, 2956 bp, Cannabis sativa
  modified_base (1371)..(1379): a, c, t, g, unknown or other
  modified_base (2902)..(2911): a, c, t, g, unknown or other
tgaattttgatacctgggatcccggtctatatggttattaatatataaattattaaagttaatttccgagtttattattataaaatgcgggcgttacaataatcattaattacatatataaacacacatatatatagataaatatacatattcaaacaattgtattatataatatatagatatgaagttaacacacattgaatataggtattattcagccaataatataacatatatttttaactataatttacaatattatatatttatttatatataactgtttatatgtgtgaacacttttacgtactattgatcgatttatacatatacatgtactattggcatgtgtcaaaacatggggcttccttacgtacctaaaatactcctacaaaaatataaataaataatataagaaaattcttatatattatatatttttgtatctaaaaacaaatttaatttaattatttttttattatgatatacgttgtagttatttaaaatattttataaaattttaaaaattaaaaaaaaaaattaacacgctaaaaatagtattttaagatagtctggtgaacatacaagacttttttattttatatatgtacgtgtgaaattaacggttgaatattggatttatcttataaattatttcaatttttttcttaaaattttataaaatattttaatgataataacatacacgattataaaaaatattgaacaaataaatttttctaaattaaaaattacactatatatattttaatggagtgcatcctataatatatatgtgaaaaaaagaaatccaaaaaataatgatgatgatatgtatgaaaaaaggtaaggaatctttaggatattggtgtggaggaacagctaatattggctgtgtacaaaaacttatcttatcttcatcatattattatatagtcatatatatatataatatataatatttcaaataataataagctagtgatcatatgtctcatataatcatattagtcatatatatgtacttattattgtaattacgtatagagaattcaataaattttaatttaacaactttgtaagaaaaaatatattgtttggggaaaggttgatattttttttaatttattactattttaaaaaacatatatatcttaaaagatataaatttatatttattatagagtaaatagcggcagaagtacctaaagttttgagtttgtaagcggcataaacttaatgattttttttagtggcataagtactcaatatttgtaaaactgtaatttttctctattttcgtcagtacagtataggctccgttttaaatttttaaaaaaagatttggaagtaactgatactacatatttnnnnnnnnnaccaaataatttaaaatttgggtcttttatgtgtcttatttaagacaataacagatctgtactaatgaaactggaaaaaaaattacagttttataaacattaggtacttatgccactaaaaaaatcattaaatttatgccgcttacaaatttaaaactttagttaattatgccactatttaccctttattatataatgtttgttttgtagattagaaagtgatgagtagaagaagtaaaagttccaatattgcatgtgcctctcggcgccaatcaaggctatatatacatgccaattgccatgcatgcattgcattttaattactatataccacgcctcacataaatgtataataattattatttttacccatacaatttttttacactatttagttgtgttttttttatggtatacagtttgttaataataggtctcgaaatataaatttgacagtaatatggtttttctattataatttattttatggtaaaacgaatgacactattcataatagttgataaataaattcaaatgaaatatcactataaaaaatcttacttttagttacaataaaatttctgactaaaagtaaaaaagttacgactaattataaatcatcatttctatatcgtaactaaaaagtctgcggctaaatgtcagggccgtcttaaacattttggaagctctgttctaattttaaaaattaaacccctaacaaaaaaaaaaatatacaattttaatagttttaaatattatcataccattatatatattttacaaaataccaaaacactcgaattattttattaaaattgtgattgattccaataaaacttcaaaaaaaaaaaaaaaaaagaatataattggtttgaaaaaaaataataaatagcagtaacgaattctttttttttttcttaaagcagtaatgaaattgaaaatgggcttttagaattgaaaatagacaataaaggactttgagacaagttgttagaaaaataaggttttaaaaaaaaacctaaaagacattaaagaaaaaaatatattagaccctttattttttgagagccctgtgtaatattccaatttaaatagttatatagccggccatgttaaatgtaggtatattagacaaaaaatataatttgttgtgactaaaactaaatcagtcatgacaatttgtatccaaatactatattttaattacaagtaatattttgttgtgattaaaagtcacatttagtcaaaaaaaaaaattatattgcggttaaaaatttattactaaatgtagcaatttttttgtagtgtatcttttattgttttactttaagaattatataattgaaaatgagaatatgaattattattaaaaaaggaaaataatttgattttattatttattaacataaaaaaaagtgaatggtattcaatttacatttatttattaactaacatttactacttacctcatttcacaataaaattttataaaatgtgatatactatggtggcgtttggtaacnnnnnnnnnntcagttttctgtttttaaaagtagaaaagtgaaaatatttttcaa

SEQ ID NO: 14313 - DNA, 8761 bp, Cannabis sativa
aaaaaaaaaaaaactaacatccgcctaactgattaaaaattaagttcattaacaaggatgccacaaatcctaatgttcgtagattatagtcattcacatttcactgttaaactatacactagaatgaatcatcataaggaaaattattatacaatttttatattatttttttaaaatattataatttatggtcttcaccattctgatatacagcaaaatcattcaattttaaaaagtagaaactggaagctgggcgaaacctaaaactgggtacatgcaggtcatttccatatagctacatattagtgaataccttacaccgaagaaaatgccattcacgtcaaacatagcaaagaatagtagattcctaccgctaccagatattcaagaagcagataataaattacctttagctctggcagagtctgatgtccttgtctggctcttgcttgcattttttgaagctttcaatgacctcaacttggatgacctaatagaatttattaaagggatattttcctcttcgtcttcttcatcttgagcattttcgtggtcagaattgctgattgagtcctcttcttcacttgcactatgttcatcaaaaagtttcttcccctgtacattctgctgtttacgtggacgacccctacgcttcacaaaacccccttctttttcatctgcagaaatccatcattgggttggacaaaatacaagatattgagcaaggggggaaaataagtattgaaaccaatagcacaaataaaagctaatgaaagaaatcagtatttagtggtactggagaaatcaaaggaactaattcagtcgtaatcttaggccaaaggcagtacagtaaaaaatggagaggggagcaaggggtgacaaactagactaacttaaaacttaataagcaagaacagtagtaagctctacacatgatgagagaaccaagttgaaaataccttggataacttcaggctttgcatacttttcatgtaaacttttcatgaatgtatcatagtccttccaaccactgggataaagatccatctgtacattctcagttcgtttttcaacatctctcatgctaaatatgtaaagaaacaaaacagatagaaatgtcacatactcaaagtataattctcaaagcatttaaaagattataccacttatagagaaattcttacatctctaggatgtcaggtgtaggaagtttagatacaaagggaagtacagcagcttccagaaaaccaacttgctttggagcatctataaaagcatgttcaatgccatccttgacaattttcaaaatttctaatctatgtttgtttcgagcagcaccaacaaatgtcccagaaagacgggaagcaagctctttacattcttgcaaatacttttctgctaaagatttgtcacttctgtaaagttcgaccatatagcgaagatatgccttttttaaataaattaggaaaaaaaaaagagttaacagttatgccatatattcacaataataatgtattgatgccctaaacaaaatactattcacatctgatgatgacacatggcaagacgacaaagaaacttgtgacctcttttcagataaaaataagcattgtttagaaaaataaatccagcaacagaaaaaaagcagattcaatgcaaaaatttcttcaattcaacatataagcatctacatcccccacagtgggtctagatatgagatataacacaaacacttacaaggatcattctcaatactctaatataccaataataataagatttattggaccacaaattagcaattatttctcaaattggatcaatattcaaaaatctattctttttactaaactaaccctaaatatttgagcagagaacaataatgattgctatgtaggtacccatgagaaacttgaacctcagacatttcgggagcaaaccacagatttaaatgttgcactatcctctagggtaagaaatctacctttttcaacgcttccaaaaatatttctggaataccatcattattctttttaagaacagtgatcagatgcttaacaatctccatgatacttgccccatgcataacaaaatgagaaattatttctgaaccaagatactcctgcattaaatgaatgccaattatataacatcaagcaacagagcagtataaatttactttttaaaataacatttgctcaaatagaaaccactagtgatatatatctaacattatccccccaactccttttcacatcgtgaaaggaagtttctcatacttcaatatataatagtgtagattcaccttagaaaccgatttactagcaaccaacttcgcagcagcaatcataacacagcatctgtttgtgtcctcagcatactctttgttaacctcatcatcttctgtctcatctgtgaaaatattaagatatccaagagttcttaaagggcagaaccaaacgacttaatatagcaaagcatgttttctgagttaactcaaagtggaaaagacagaacagaaagttctgaagttttacaatccactttcagaagaaattggccaattttgaagtacaatggaggaagtaaaacatagagtaggcaaataacatactcaataagtacctgaaatattaagttgttgctcacaaagtttccaaaacttttggagaattgcctcatctggacaatatcctaacctttccagctttgttgaggaaaaattagtcattctgaacataaaccacaattctgcaagtatggtacaaaccttggggacacataatgcataattagagaaaatttgaagcattatacaaaaattattataatagatgagaaataaaagttcatgtaataatatcaagggaagatacttaccctgctggccagaaggttaccattattaacttctccctccatttgagggctgttaagaaaatactctaggttgtcaaacaaagtagtacgtttagatagtacggaagacaaagatgcctctgataccatctcaccacttatgatcgattttagacaccaggccaaatgaataaacatattaagaagcagaaaacagacaacctgaatgagaatgagcaccaaaataattagtgatttaagaataagaagttgggacgatacaatttgtaatcttaacacaaaatacagcttacatacctcatcatccaagtttctaaaattttgtagagtattcaccatatcttcatataggctctcaacgggcacagcccttgacagctgaagttcatacaaccttttcaaattcacaagaagggaatactcatcaccaccatcctgcaatgttaagaacatgtcattttcatatcattgagtgattttcagtttcttctagtgggggtaagaaagcaaagtgcataccgtaacttcttttatagcggctttaaccttagcaacaatctcatcttcaacttccttcaatttagaacgagcaaaatcttgtagctccccttgactctctgtagcacaaaagttaatagccttcacacaagatcttaatgcttccttctcaccatgtttaaaaaatgcatctttcatgagctggaggacagttttaaaattctgagacagcaaaaccacaaaagacccagctttaaagaaaacagtcaaaaaatcaatcaagagctagtaagaaaaatagaaatcaatgcccacctgttcttgccttttcagagaataaagctcaagattcatatgcaaaacaatttcaactagcgatggtactttcgccttgtcagccaagaacttgcgtaaaagcaatgggtagttcttcatcatagcaacagtaatgtcctttctgttgtgttcaaatatttcctgaataaagacttacaataatgagaagttgacctgtaaaccagcacacaaagcaacaaaatttgaaaagaaagaatgtgaaatgtaaaatctaaaagtccttcctgaatcattcactttctttgttgaaaaagagaaaggggccacttgtcttaagactgaatcatacactttctgactagcaaaagtttcacatttatgataaaagctaaattaaactttctcagtcaaatttctaaaagcaaatttgacatttagagaataattatcataaaacatgaatttgtgcataaaatcttttgaacagagcttcttcagtgtaagttgcgccaaataatttttttaaaagcattattaacaaccctattatgtatagcaatcaatatggactaccagttttattgtaaaaaaaaatggtgcaacaagacttcccaaaaaatatggacgaactgtttgagaattataatttaacaaaatagaaaaaaagttataactcactttctgagctttagtgtaatacagcttccgggtatcagttgcaggtactattctctctccaacagcctttttgacagatgcactaagaagtcgtactaagttagttccatcctcatcagtaagctcaactaaaggattttcatccaaaagcatagatataatacatttccagtcctgcaagcacagcacaaagtacatcctaagaaacaataacaaattccaaagtcaagaactagttgttctttttccatttttaattggatcctacagttgatccagttctaaacagatgaaatctattaattatataattacatcttctcccatcaaaggttcactacacttgtaccataaacatgcattgacaatttgggtcatcttgtttattttaactcaagtctattccaactacaactcaggttaaaattaaatttacaataaattgcttctatatattttgataataacaaaatccgtcagtcgaacccagcctgaggctgctagcagtcaagtgtgacaacagcctccctcctgggttctaacctcgtactataggttggtctaaaagctaataccttcatggccttcatgtactcccaaacatcatcaatcacataattgcttagaatttgatctgtagagaattctcttagtatctgcaacattctgcccagatggacctctgaagtgttgcttccttcacctgaaaaaaaaaatgttttcaacaaaagtactgtatacatgagaggaaagataaattgagtcaatagaatatagtctaggtttcgtaccggattgggagctattaaacttttgggcaatcaagtgatcatacactaatgctccaatggcatgcctgatctctggtggctcatcaataagcaaatcgtataatggacccaaatcatcatcaggtagaagttgatgtctgcaccataccaccacccccacaaaaagaaatatacaaacttcaaaatgttttaacaaatctcaaggggaaccattaatctattacttgactaataaatttgcaaagatttactcataaattaccttaagagttgttttacaagacctattgcacatacagctacagtattgtcaatgtcatcagcaagctcaatcatccgattggaaaatctttcagtgaagagaccaagagttggcacattatcatcctcttcatacagattttgcaatgcaaggacagaagcttttcggacaccagcattcttaaagatacagtaaaagaaaaaatgataaagtagaattgtcaagcagcaaataagcatgaatcaaaaactagtgtacagttcattagcaatttaaaactcaccttgtcatttagtgtccaaccaagatactttaagtacaaatcctgcaagaacagagaggggtatgacaaaatccatacacccaaagactctatgcaagacattcgaatatttggatccatgtctcgataacggtgcataaacaaccttcaaaagagcagcaggatttagtttaaaatcatggaagaaaaaagctaaagcactattttatttaatatatatatatatatatcgtggtctttaccaaaacatttaattcttcaaccccttaagcccaaatttggaaaatcttacccagtgaagattttgcgcatcatctcctctagcattgttatcttgtcatgagtcactgaaaaccttgtgtttagtgactcaacacgaggtccctcagctcttttctttttttcagcatctaactgcctacgagttgtttcacgttgagcactgaggacatcagcaacagttatgaaggatgtgacgagttggagtcccataatagaagcaacttgacgatagactcttggaggagtgctacattgtgtggaaatgggccaagttcaaagcgtaagctacatgaaaggtttggcttcaaatttaaactacaattgtttgagtactaaccatgacagagctattatataatccatgcacttgtcgaacaaaacctgatcaaagagaggcccatgttgactctcgagtaccaatgtgtgccagaacaattgaaggttatttttgaaattcttaaactccttcttttttgagctttggtaatcttcaacttccccctaaggtccaagagtcaagcaaaactttgggtacaaaattcaatggttttaaaatattaaattatgtgaggagatatgtaaaaaggaaaggaaatcaaatagtaataataataaaaaggcattgcaggatactcttctagcaagctcgaccagtgcaacaacaacatcatccacatcaatctcatcaagaaattcgccttttatataatatttggcgccacaagcctgtagaattataagtatcaccaatcataaaatcagactacacaataaataagtgctaaactaataagtaattacattattttcttatacaagcaggtgacattccaactaaagaatgaattatgaaaggaaaattacatagatttttctatcaaactgtttagtaaaaacctatatttgtccctgagcaattaaaaagaaaattaattactctcgttttgcaaattattcaagtaatttatcggaacttccagattacctcaaacagcattgtcaagagttcaaccattgcagactttgaattcgtttcatattgctcaacccaaagcttgactgtttggttaatatattttccattgcctttaataacctctgccaataaataaataaaataatataactacagttgtcaaatctacacatcagatcccacaaagagtagtatctttatgtatacaaattattcatgtatgtttctgagtcaaaagtttatactacaaacataattaacctcaaagatcaaattttcctttaactctccacattcagcagtacccttttactgaataagtgaagcaggctaaaagatatctataacagcaattgccatactaacattccaattgaaactgagtcacaaatttcccaaaaatgttgtttgtattcactaaaatgcgactggaaagagtttccagaaaaaataattaaatatgaaaatgaaaaaaaggaagaaaataatcaaaccattcgttaacaaatagttgctcgcactttcacagaaagtgtatttaagtgcaagtaacaagaaattactctgaactataatctaaaacaattttttttaaacccagacatataattttcaagtgaagaagtctagggttcaggggtagtagccaaaattaccaattaagttaggactagtgggttcggatgttccttcctgaagacgacttcgcttactattgggacgagtctcttcgaagtcattaggcgagccctcacgacccgcctgattactcccatcgctaaccctttcattattttccccgccagtaccagtgttcctcttttctccttcgttctcagtctcttgcatttgaaccctatttcttttctgggtactcagaaatgtccaaattaggtcatattcaaatctaatttcactattataaactaaatctatacatagagagagatataggtgaactcacgaagcttttggctgatggatcaattgttggagcttgttcctccatgaccgagagattcttgagcacaattacaggtacgcaaacaaaactcccgccaaaagagaaaggaaaagcaagtgaaagtgaaaatggactcttggcaaaccaaaatatgtgtctcggagaaagcggttcgaagtcatctaatttatttacttattatttattttgtttttgcaaattttgataactttttttaattagttttttttttttgaaataaaattatcatctttattaattgtaattcattgtgattacatgattaaaatctggagtaacatcactactcctgataatacgatcattttcatctgaagtgcgattatttagttgcttgcataagtcagggacattacaatttaactaatcacgcaaatcaggtgcattgagatttaactgctcgtgtaaatctaattgtctctagtttagatgttcatgaaggtaggcttattttgatgtcaacaacgtcttttcccttcagtattgtaattactgattgacctcatcggcgaagcactttttgattaacaacttttgaagttactcatgctagtttgttcaccatgattaccatgatgggtgttatcatctcttggaagagaaacctcccttgtaagagaccttgaggattggctttgtgtatggcttctccttgattcacctatattggtgttcgaatctgtccttcaacaattaacttcttgcctcggttggcatcgttcaaatagataggatatataacttctgccagcactttgtgggcctcgcgatggtcgacaatgacttgagggtcgaattatttgttgtt

SEQ ID NO: 14314 - DNA, 5088 bp, Cannabis sativa
tttttttttttttttcttgaaactcaaaagggcttgtattaacttttacagttttcctttattgacggttagcagactctgaaatggcgactgctcagctcaccgcttcctcaatttcgggtaggagtttgccttcgttcgaagggcttagaccgtcttccgttaagttcgcctctgctggaaatgtcaagttagtcggagttaatcagaggtctttcaggggtctcgtagttaaagctgccaccgtcgttgcacctaaggtagttttctttgcccaaattgagctcgttaccggtagtcttttgtttgaatttttctagtgtaccaattttgttcacccatttgtggatttgtgctggtaatttttgtatctaatttatttctgctgagtttgttggctttgttgcgatgtgcatgaaatgaaagtgtgctgtgtgaaacgatttacgtgatgttgagcgtgtttgaacataaggaaaatggtcttatgaagagtctttatcattaggcttacatctttttccacattaagtatggtttatgaaattgtatttatatttcagtgccataggtctacaactttgagggtctcatatcataaattcaatagtgaatacgttgtgcacgatctgaaatatgctaaaattgttttttttttcttttgtatattatcttacatgtaaaatgtgatttcaaatttcagtacacatcaattaaacctttgggtgaccgagttctcgtgaagctcaagaccgcagatgagaaaactcaaggtggaatattgcttccaaccacagctcaatcgaagcctcaaggtggagaggttgttgctgttggagaaggcagggcagttgggaaggcaaaagtggaagtcagtgtgaaggtaatagatttgcttataaaattttgataaatgctttctttttttgagtaataaaagactttcatttgtgaccctcgattgcttttttcaagtaggctggcagccaagttgtttactccaagtatgctgggacagagctggaattcaatggttcaaagcatcttatattgaaggatgatgacattgttggtattcttgaaactgatgatgtcaaagatctcaagcccttgaatgatagagtcttaatcaaggtttgttacctggcaacttgacctattgtaatctcttttcatatgattatttaatcctctgaagcgccatcttttattaaatgaagttgcattggaaaaatgtactgttgttggtgtacaatggtaatgacacatttaaaatatgtgctttcagattgcagaggctgaggagaagacagcagggggcctgttgctgactgaagcaagtaaggagaagccctctattggcacggtgagtattcgttattggatttggatattctttactacttgtaatagttcactcttggaaatgagattgttgatgatggttgctatttgtttaacaggtaattgcagttggacctggtcctttagatgaggaagggaacaggaaaccactgtccgtcgcacctgggaacactgtcatgtactctaaatatgcagggaatgacttcaagggcaaagatggtgactacatagctttgagggcgtcggatgttatggctgtgctttcgtagtttgtctcagatgtctctcaataggatttgctgcacaccttgtattgtctgaattttgtggcggagttgagatttttcttctaaaggaacgttaatttttttatgtagcacaaattatagcacatttccaatataatggtagagtttttgtgccgttgaaacctttgttttagaaaaaatgggatgaataaagcgaaattaagaattggaattatcaagtatatctacacgattcataaggtggactaatagtgaaacactaatagcaagtggtttacacacgatgataggattactgtggagcaatactctctccatactctgtccttcgaataagactgacatgcaattaattgttaacctttctaacgttataacacttcactatatatgatcaatacataactcagttaaactaatgcacttcgagaaattattattattattattattattattattattttgctgcatgcaatagttgactttgaagttatttcagtccaaagcaagtgcttagagctttgtcccatacttaaagtttctcacatttatagatcagcaattaaataatgtagtcttccttgttttgctataattttgcaggagggttgtgttcctataatgtagtcttcctaatgcaatatttgagatgttaatatatttatcaatcttccatcgttattccatgttaatttacttattccttcaggcggttatagactctgtattcaaaataataagtcagcattgcagttggattgaagacctcgtgttacaaatcaaaaggaaaaaaaaaaaaacaggccactaatgtttaaggttgtcacgttaggataatatacaaaaaaaaaaggtcttcaaattttgatttactgaacagagtgaaatggcgaaggatctagcttcaaaataacaatggtaaaataaaaagttgataattgtattaagtatttcttccagaagtcataaataaatgtagggttacaagctagaaacttgtattccgaccactattgaatcagaggaaggtttagttgttgtggtcaacgtgggaacgtcaagagatggccaaaaaaaagagccatatatcacaaaagagtcctactgttactgcatatttgaccagtgactgtttagtaccccacagcatttacaaactgattaaatcaatctaaaaatagttagatggcttatatattgtacaccattttcagcccagaatagtgcatgtgcaactcccaaaattccatttttcttggtgtagtagcacggcaaacaaccattccctgcctaaaaagctaaaagcaattctttctcctcacctatatgattaagataatcggcccaccctcgtgtgtaaatgacatactggtggatcagagcttgaatcctcactggtgaaaccatgtgtgatgagattcaatgaacctttcaatcattccctagctgcgttatcattgccttgtatgaaagggctcatgtccgcgagtatcaccgggggatgccaaagtgaagggctacacttcatgagagaagatacatagttcctaacgattaaatgaggctgcagacgtatcctcgtactgtcctctccatgcgtttccgctgtcagttccactacaagcttggttggaaactgggacctgacctaaatctccatccaaactcatttgctgtacctcgacagatgacagtatttttatactttgaacacagcttacgaattccctgaaagcaattcaataaatcatatcttagaacagaaacctaaaatgggaaaaacattagctactactgcaattgttgggttctagacttactgccatggatcatcaccaacaagaagaatgtcattttcgtggtctacgtagactagcttccagtcagtcctctgtggatcttctagttgcccttcaatcccaaacatgcgagccaagtcgtgtctaagttcatcataccctttatagcgggtgacatcaatacatcttcccacagaaccacgcttttgaacctacatcagttggaataagagtgagaaaatgaatcttatgcaccatatactaaaagggtggacaaaatgcagcagcagaaaataactaaataccttcgtgtatgttctcattcgttgagcttggttagcccacaatccattgctcaaaaccccagcatcattgatggcaacatcgcttgagcatccaggcttgaaactcatgtttggcaccccaaacgactgagagctgattgcagcagtggacaactcagtctcaatatctcttggagcgccgccacaattagaaagcaagttctgaagatctttctgagagtcataccctctagacagcaaagtatccggtgtcaacccatcaatattagctccaaaagaaagattgttacgatgatttgattggacatcaccatccagacagaaggtgggaagtgggaaactttgctggattgtgctagcatccaggtatgaagtcccggaagaggaagcttccaattgatctggaatacttcctttatatttaagctgctctggtccttttaaacctgggaattcatgtttaatccggatgtctgacttgctttgaagctcttgaagcaaattgttagcaggttccgccacaggatctccagccaacatggcttgtccatgctggtttctgttcaaaaggtttgatggggaaatttgacaattattagtggatggagaggtcgaacaagatggagcatctccgtctgtaagaccagagttggctctgattgccagcagaggtttgtgctggctctgaggttggctagaaggaatctgttgtgattgtgttagtgttgaggtggagaagttgttgatgttcaaaggcttttctgttgaaaagctgttgctgttcaatggttgctgatgttgagaaagaggcgtcaattgtaaatgctgattttgctggttcccctgatgttggagcagttgaggctgcatatgtgaacttgtaggagaaagtaactgctgctgctgttgctgttgctgaaatttttgaataagctgtaactgaatctgctgttctgaaagtccctgttgtgacaattgttgtgattgtgactgctgctgtgtcctctgaggcaggttatgctgtaaaaactgaagttggttttgttgtaaatgtgtaggctgttgcggctgctgttgcttttgaaagagatttgattgcagctccatttgttgctgatactgcgagtccattggaactgatgtcgactgaactgaattcttgctagagtacccactttgctgggattgggcattgcctgtgcctaactgttgttgttgatgctgagagaacatagctggttgctgtaaattttgattaggaatctgactagttgcaccaacaccattactaacaagtggttgacatatctgttgctggtttgactgctgctgctgctgctgttgctg

SEQ ID NO: 14315 - DNA, 5713 bp, Cannabis sativa
  modified_base (2143)..(2146): a, c, t, g, unknown or other
ttttaaatgccaaaactaattaaagctaaatatgaaagcaagctctgccactatcttctaactttgcctaacctgattgaatgtgggttggtctcagtgaatgctgggttaaagcctaagaaattgtacgtcataccgcttctcccgacggaaagggaggtagccccgaaggctgaggtagcatctgatggtgataatggtcttaaccaggctcctccaaaagaaattggtgatgacatcgtggcagaagaggattgaactgttggtgtaggggtgatgtttcagctggccctcaaatggcccgctcttcgggtgggtcaccgaagggtcgctccataggtgagaggcgagctgctcccgcggatcccccatggaagcttcttgcctagagtcttcgtccaatggcttgctagctaaaactgccagttttttcaagaagaacatcgggggcaatcttcagtcgatccttctttgaagatcccttctcgatggaaaaagggcgctagctctgatccttggcgcgccatgccctttggtgctcctcctcccctgtcgaagctgagtgcctcaactggctgtggggctgcacctatcagtcctaccccggctgcgtccctcacccctgctaggtaatctacttgcccagcccgcttaggggcatcaggttctcatgtaccttctcaccctgctcaagctacaagtgctgatggcttgattccaattgcggtgtctgaggaagtaagtcgggaccgccctaggcaatcgagacgcaggccgactccagtcgtccagagcagcttgaattaaataaaaaaactaaagagttatctttgattccaattatttttctcatgacggtaaagaaacatatacttcctactattaagatgatcttattgaatagtaagtcacaatagtgcaaaagactaaatgattactgttgtagctagaaaagatttttaaaactatttgaaaaaaaaataaagagaaatttcgacaagcctgttatgcaaaaaaaaagaaaaaagagcttaaaacatacggcaaataaataaagagaagaatattggctaaaactaagaaagagaagtgaaaatattttattttacctttcatttaaaaaaaacaaacaaacaatgaaagcaaattaataagagattgagaattgtaatcatgagattacaaattaatttaccaagccaacaccgagcatattaaaggaaaaatgattgaggattgtgattataacatattataagtaccgaatatttgaacagtacaaatcaaattaggtggtattaaaatattgaaggttatttcaaaaaataatatgaacatatcaatttttatactaaatttaagaaattgattttttcttcttctatatatatattttttttttgaaagaaagttttatggatacaacaagaagacttcttaggatactactcgcgcccaaacacacttaacaagttttaagaatgcaacacaagaacttcttaagaggtcaggtcacctatcttagtattaatctcgcccaaacacgtttatttctatattttacttatttttttttttctaactaaaatttaactttcaaacatagcctaaaaataaaaaaattctccaaatgaagaaccatacacgtgccttatcagttatcaataatgcacacaacgattgaaacagaaagtaaaaaaatgacaataataaaaataaatgtaaggcaacgatggagcttaaaataaataccaaaaaacataaccaaagcataatgaatatataccaatataagaatcgagtcctgccacgataattactcacaatgacatatttatggagtgagacaccattgatgataatgatatcagcttctcatatttttgctatagtacaattcatcttcatgcaattacctggcatggcatgtaaaattatcatgtacttgacaaaaagtttacatttaagcctaaaggtgtttactgtgcgagtggtacgatttttgactattttttcaaactaacccacacatgtgattttttaaattttccaaaccgcactcgcaccgcgaaactaaaaaatcacagaaatcgcactgcaaaaaatagtacggtacggtgcgatttttgcggtttggactatnnnnaaataattaaactatcacaaataaagcaaagtttaggtaacacttatcaaaaataccataaggcttgaaaataaatatgaaaaaaaaattcaagttttaacaatataataattagtgggctttgagttcaacattcacatattagacctaaataaatataaaaatttgtatttttataatgtgcggtgcagtttgaaccgcatattaacacttcaaaaccgcaaaccgcactgcgcggtttaggaaaaattcaaactgcgaccacaacacaaagaatttcaaaccgcatttttgcagtacggtgtggtgcgggcagtttgaagacggtttgatgaacacccctatttaagcctattatcagaaccactgccatctatttcaccaataatccatacaagagcactgtcctcctttaaaatgatgaaatctatacctatctctcagcagtatttctctgccataaatctcagatataagcttagctaccgagtggcagtccctgcaaacacgaaggtttttcaccacacgaatggtttgagatggcgcagtactgataagtccaaaggcgattgccaacttctcactgtgaaggttgagagcttgctccttcatatcatcttcttcaacaaactgtagtagctgggacttgttcggcacgtaaccactagatttcaaccttgctacaatctcatctaactttgtgtagatatttctacattgagggtgagaattatcaccaactaaaaactcgtgtacgatgccattgacctcaattgagctacaacctggttctttctttattccagaatctctcattagctttcttaaccttgaaacttgatcccatttattccttttggcatatatgttagataaaagaacataggctccatggtttctgggatccaactcaagtaactggctacaagcatattcagcatattcaacatttccatgaagtttacaacctccaagcagagccccccatattgaagcagtaggagctattggcattttctttatgaactcgacagcctctttcagattgcctgaacgaccaagcatatcaaccatgcaagaatagtgtttcacaccaggtacaactccataaactggctccattttgcagaacaaatcttttccctcttccacgagccccgtatggctgcaggcacataatatgttggtaaaagtaacagaattcggcttcaccttagcttgtagcatttgtgagaacaaatctattgcatcttttccacgtccatgcattgctaaacctgcaatcatggcactccaaacaaatacatctttcttctccactgaattaaacacctctattgccttctctagctcaccacacttagcatacatgtcaatgagcgaggtcgtgagatgacagtttaacttaaaaccctgccttccaatgtagacatgaatccacctgccaggatcaatagctcctaactgggaacaagctgatagtgtactgaccaaagtgatttgatcaggttttacactcttgctaagttgcaattgatggaaaacagccaaagcttctttgggtttaccattttgctcataagacgaaatgagggcattccaggcagcaatgtcttgcttaggcatctcgttgaagacatgttgagcctcgtcatatttccccgaacgagcgtatccatcaagcatagttgtccatgacacaacatccttctctagcatcttatcaaacaacaatttagcatcttgaacactcccacatttcacatacatatcaagcattgcattgttaagagtcaagttcgatgtgatcccatttctttcaatataagaacagagccacctcccaaactcaatatccaatttctttccacaggcagacaaaatgctaaccattgttacatcattcggctttacgttctccatttccatttctctaaacaaagaaaatgcctcctccggaaaattcccctgtgcaaaggctgcaatcatagaattccacgaaacaacatccttcctgggaatgttgcggaaaacctgataagccatatccaaatcaccacacgacccataaaagtgtacaagtgaattaagaataaacacatccgaacccagagaggacttgattgccattccatggaaacctcttccaaccaaataatccttcatctccgaagcagccttcaccacaaatgggtaagtaaatttattgggtgattcactacactgctcaagcatttgcaaaaatactagaagacttcgtcgagggtcagagctggacgcgtaggcacgaatgagagtattccaagtatagatattgggttgaggaatttggtcgaacacttgttgggcatagtggagacttgagaaggaggagagagcagaggccgtgatgagtctgctagcggagtaggggtcatagaagaggcctgtacggagcatttgagcgtggatttgcttgagttgctttatatgggtgcattggtctatgagtggaaggagttggaagtttgaagaagaatgttcattgttgagagttgagtttggttttgggttatgtggaaaagtgataactgggaagcttaaagcagccatgtagaactataattgaatgaacttccaattctctcttctcatttagttgaattgaaatgaaatgaataaaccataggaacttacggctggaaaacgggtatcgagcttcttctcatggtgtcaaaatgattagtatgatagagtccaccctcccttaaaatactccatttaataatttataaaaaaatcaaggcccaatttaagtcaattataaataataataatctttaaattataattagttaaatattttctaaatctcgtattaacaaaatataacttagaataattacatcttaataaaatatatacatttattttgtaaatttatttatgtaaaattaataattttattttaaattataatacaaaattatatttctagtatgatataatattaatgattatttattgttattattattaaattgatattttttgattttttattttttttttaatgtaactcgatttaattataatctcaattagaatataatttacttgattattcttggatagattacagtaaggtaaaatctacgagacccatatcagatctgaaactatctactacgctcttccatttaagactagtttagttccaacgaaatatccgtcgagattgacgaagcctaaatcaaaaattaaaaaataaataaaaaaaataaaaaagctgaagatagcgttacaacactgtcacatagatttcgggaataatctaattggcgacagcaaatgtgccagctggacaatttcgtggcatttcttgtcacgtgtcaaattttggttgggacctttacatattagttttctcgttttcgtttttcttttgctaaattttattatcttttttttttttttttttatttctgttattagatgaattttttcatccaaacatagagagtagtccaacttaatttagttctgaattacttgttatgcaaccttttaatggttagattacaaatt

SEQ ID NO: 14316 - DNA, 10473 bp, Cannabis sativa
gatagacgtgccacaatacaataaattgtttgaatcttgttttcagcttaaagtaagattaaaactatttggatatcaaaaatatgaaagtgccatagaatttttataaattaattatactgttgttttattagtctttgattaactatatttagtttctcataattatttgtgttgtatgtttatttattttttgttaagttgactttttaattttagctataaatttaacataatgttattatattttttttatctaaataaataattctaattatttactcaaattattataatgaagaagcaattatataataaatttattttatgtatttttttagaaaaggattttctcataatatatatgatgagaggaagacactaattccctccaaggctccaaataattaaaggctttttgtaaatcaattcttagaggattaaaatttttcactttattatagttatagattatagatttctctactttgatatgcttttgacacgcatttgtgagtcaacagttaaaactaacattttgatttttaattcaaggggttttatttcccatcaaggaggctctaatgcgattatagctagttaatacaagttctcttccatgaaaaaatgttgaattaacaattccgttgctattgtaatgaattgggttacctgttatcaaagtgacatgtatatgagtaaaaagaaagaataataaaaaataaaaaaaaaaaaaactttcttgattctttattgctgagtatcatcacgacataatatcaaactagttcaaagaatagaaactattttacatataaataaatgggcttagcaaatagaactcttaatgaataaagctggaaactgtcttgttccttgtccaaaacaaacaaggcattgctaaatttccaggaacacacaacaaaacaaagttgatttcatcttctaggagtaatatctgaaaatgaaaaatcatgggcaggcggacctgcaacaagataaaaaatattgaggtatatcatatccttaatgattattagattggctgccattatttacttcactagttaatactttcatttagattggctgccattatttcaatatttggtatttttaaagggaacaaatagttgataaggcttttaccttcttgtgaacctagaatataaaatggaatatgtgcaatcatctttgtcgaaccatcactccacttcatagtgcctggattctgctcatgtacattcgaaggttgtgaaggccccaagattgacaacgaaattgctggttcgttcattaaacccaaataatcacgagcacgccttgaaaccctagcatctgaaatccgagatcgggctacctaaggaatgcacaacacagtttgactggtgcgaataggaaaatttatgtgtactacacgtgtgaactgataaagaatgtgtaaaacaattttcagacctttcccaaggaaacacgcgccctcggtagtaactcacgatggtacgtcgcaagttttgctattgctgtaacaacaaaacatagaagcctcgactgtgatgacttcctgatgatttggctcgaggatccatatgcagattcccttagtcctactcggctacaaaaatataaaaaataaataaataaaagaaaaagaaattctaggtattaaaaaatccaaccaaaaccagagaaaaataaaaaaagagaaaatatcaacaaaacataatttacacctagatgtaagattttcatataagagtagctctaaactctcgaaaagctcacgagctgcgtctttgtgagacgcaccacccccaccatgctcccctatggcccaacacagctgcaaagctaactcggcctacaggaatatgaaaataatgaagcaattttttcaacacagttacaggacctaataaccttgactaacaaaaagcaattcactaaccttttctgggctatcataggcttctgcaagcctgtccattatgggcttctacaaaaggtattaactagaatttatgattttgcacaaggaaaataagaagattttaactgaagaaaacataaataaacagaaatataccttcagaagtgcaataaaatttggtgaacgctgaaatgaagaaagcatgaattctagaaacctttttctaacctgcagtgatacataactcgtaattataacatcgcactgattgaaatttttggggattataaaattttaaaaattatattcacattagaataatactgttagctgtaaatcatatatatatatttcgttgcccaatagcttgattcctagttttgtataaatgcatcagttttcaatgaagttaaggttgaatatcatttattttcatcaaacataacatggtattagccggcacagcaaggaagcccagccctcaatctccacagccctgaagtccggcaaccacattcgtcgcaggtgggtcccacgcactgccaacaacaacagcatccttcccaggcacatggaggcgcatgacaatgccttttcactagtgatctcctttaattccattcctcttctacaatgacgcttccctacttcgtttagggtggttgactctcgcaattttgtatttgttcatgttttggttgttggttttggaacttcacctattttgcctcatttttcctatcttcttggtgcttggttgagcctctctctttttgctgctttgttgggttttgtttgtttgtatttgttcgttttgggtggtttgattcttgcaactttgtatttgttcaagttttaggtatttggttttggatttctcacctactttttctgctttaatgtttggttgagcctctctttgttttcactgccttgttgggttttgtttgtctgggtgcttgtgatcttgttgatttatgagttacgattttatttttaaaaaggaaaaaaaggccacttgtcttagagtcgccccctcccactatgtatagataatcctcacttgtggaagaagaagaccatggttacataaaaggagcttagcaaaagagaaaacagattaccacaaacaaaggagattctacaaataaattacatcaaagttctctccaaaatctaaccctctcccatatttcttctacttaacattcaaccccttcaaaaattctgctatttttttccacccacttagcttactatcatcagaggtaccgagacaagtattacccatttaacatcaaactcattcggcaaaagaatccaaagtgtacgaaaaactacactccaaaaataggagtaccagctcttcttcacttcttttacaacaaaacacaccagcccggggataaacacaaaaatgaccttctcttttgcatcatttcgtgcacatttaatttacctagagccactaaccaaccaaaaattatgactttagaaggacctctacctttccataagatcttagtccagcacaactctctttgattctgattcgcaaggaaccaatcaaatgctgatttgcaggagaaaacctcactcattggaaagcgatggtgactagcatatgagaggtactaaactgaatattgggaaacaaagataaacaagtatcaaagtagcccgtgaaatctgtagcttacatcattaagtttaaatcttcatgttcaagggctaacgattcaggaacaaaccgatattcgttgctcatcaattgaagcctcagatgagacaaaacactagcttcaacagtgtcattgtccacgtcaagtaatcctccgcacatcgctccaattttcttgaatattttcatgtgccatagattcaagggaagaccttgaactccaatccaggatgcctctgcattctactttaatgtcgaccttttggagatcccatctgaaagagtccctagaactctcagacaatgcaactctattagttcatctctttccttctcatctttgctccaaatgatacatctatcattgattaactgactgaccaccagctttcagcctaattctcttgatagattgtagaaaataatactctagtctacatgactattatctctagtaaagataattgccaaactccaatctctagattgtgcattggacaacatatataaaggacaacatatattcaaaaagactcggttcattgagtcttttcaccaggtagagattctttggtttgaagctggggttgattggtggatacaagtctctccattctatgtgccctctgccacgaacagctgttgagacagactttctcctacttgtgttgtggtttaggtgctggtttcatcaaatttttactatattaacccaagaacgttgattcatgttcccccctctcttcatctattccctagactgactggagtagacatgtgaacttgtcttctgtcgatccatgttgtcaatgggtgtctctgtcttccttctcaataaccttctaatacattcttcaaaatccttccaacccttcgctggtctctcttccggaacaatcaccatcttcattttgttgagtctcaagactgaaagtttgagaaaaagcccctagtattcatgaaacattccaagaaacaacagttagagctgtttctgaaagatcttttgaagttaattcgttgttgtccttctcttttctgcaattcctccaaaacttccataatcacactctacatcgattgatacaacaacctcaaagcctaagagtagttctctcacaaatcctgactgaacctcgatcacttgttaaactttgtgttcagttccaaagctccaatacctttttggtacaggcttataattgcttccaacctgttttaagtgaccaatactaatggagtagtggccagatttcttccctagaccagtggggtcatggtagcatgcatatctcaaaagtaggagagagaagagagcatattttaagagagaaaaatatcttgatcattgcttttgcttgtttaggttaaccatctccctttgaagcacattataagttcaagatgttagcccacatgtaactaaattagatcctaagtccttgaaatgggtcttggttattttcgtattcataaagattatagatattattgtcctagtcttaagaaatatcttgtctcaattaatgttacttcatgaaaaataaacattctttgctcgcccaatcctgcttgtcaaggtgaggatgatcatttgttggtctattctatcacatcctctaatcttgtctcgaaactaactccagcccagcctcctattattccagtctattccaggtgtcttacctcctaattcatgtcctgcacctactccttcatcatcagaatctagttccaagagatgacttttctattgccttgcacaaaggtcaactctagtgtacttatcctatttcttcattcatttcatataacgacttatcgtcttcgtcttcttcttcttttattgcttctcatttatttcatataatgtggatgtataaaattttgattgaagcagtgcttaggacttcaatatgaacaaaattgaggtgtgacaacaaagttgtttttcatattacttctaattctatgtttcatgagtgaactaagcacattgaaattgattttcattttattcatgtgaaaattcaacaaggcttgatttttacaaaatatatcaaagggggcatcttacgaagtctttcaatggggtttagagtgattatctttataacaagttgggcataattaatatctatgcttcaacttaaggaggagtgttaactttaatttatatagaaaaattgtaaaccaatttttttttgtataaggtgtacattatagttattgtaggcattttgtctattctcaagaaattatgaataatttacaaagccaaaaataaaattcaaattaagtgagtaccaggcgtacctgtttatttataagcgtgtagccgaatatttttaactttatttttgacattgtaaattattcagaattacccgaatgttggcaggatccctactataactataatataaactgtcatataataaattgggttataatttctctaaataccgaaaattaaaaagttcatataataaaagcaaaagagcttaattctagttttctaattgaatactttcctaagatagattcctagttttgtataaatatgtaatgaagtttaaggttgtatatcattttttttttcatctcacataatagatactaacaaagaaaatagatgaaacctgatataatgatctttataatagtgaacagccatagaaactactatctaaacctgtaaacacgtttccagagagttagaacatgaacattctagtcgatactcgcattcagttgatgttggttaaactgagagaaataatattaaagcataattgaaaaacaacccgggaacaaataatggtcattctcttgcccaaaacaaaccaaaaatcatccggtggaaagtggtaggagttgaatttagcataaaaaaaaaagaaagaatagcttggcagaacaattagtataaatataaggaatggtcttcccatttaatttatgtttgtagacatagttgctatatctatccattgagacaaacactcacaaaaagtcacctgtcaaattgaaagagaaacacagaagaaagcacagcagatttcaattgtatttaaatgtgtacgtacctcgaaagaaaagtttttgtctggaaatattgtggcatttctagacataagtaaggagatcaaagcacatatcaatgctggaaaaaagaaaaaaaaaaagattaagaaaaagtctcaggatagacaccaacttagcagaatactgaatgcaacttgatttcttttaaagaaaaaaaaaaatccactgcaacagaaaaagaaaacaaaagaaaaaaacatcttcaggcccaaacgatatcacaaacaggagaatagatcaacatacagtcattgacatcacgtagtgcaatggcaaaatatacttcaatgagtcgaggtgctatcttcagtacatgctttagcctatcagactgagtggtgttgattgcagcctgcagtgccgcagccatcccaggggagttccattggcgttcctgaaatacaacaccaaacaatcaatgtgttatataaataagaatccaaaaagaaacttcacagtatgaataatccttaacttgtgtggattaaggttaatcaaacctgctgctttcaaaatagatgctttcaaaattatattttcacacaagacttgaatactttttgcaagctcagacaaataattcatgtttaactcacaagaacaaaattacaacatcaacgagatatacaagtgccaatccacaaaatttactttattcctcgtaatgctacatatattacaaatatcaagatgcaagaaaagtgaaaatgaaacattatcatagcacagcagaagtaagaaataaccaatgagtagaaaatagatacaggaaagagttatttaggaggcttgtttctgtaccaattcttgaacttcagaaaaacaaaaagatgggaatgataacataagactgttgatttcaatgcgagtacaagaagccaagttattataaaggtagtaaggtacttaacagcaagtccatcattttcatcctttagaaggtcaaggaacacaggatcagcaacatcaattgtactgctgtcttcagattcagagtctccccctccatctcctattgttgttccagtataagcttcatccataagtgcaagtagcatctacagttacaaaaaaattaaaataaataaaaggtatcattattgcattatctatgatgtttgggctaaatacagtgttgttatactatggtataaaaaaaataacctcaggagccgtactcttctggattgaagctatgctatttccaactagtgaacctgagctccgctctactttttccaatgctactactaaaactattacgttgagaaaaaacaaaggtcatattggaaatgggacggagaaagcaacatattaagaaataaagaaaagaaaatctaataactaacttggcaagtccactaatgatggaaatagaggaagaaatgacccaggagatatcaacccaggaaaaactctcataaatgacttctctaaactgcacaatgaaaattataaatgaattttagtgattctagtagattatattttgctgaaataattcgtaaaatcaagtcatctatatcatacatcattgcctgaaagaaattagtctcaaaatgcgtactaaagtagaaattgggtaatgtgcactaaagaacttacttttctccattccaagcaatcagttttagcaataacggaaagaactgcatgaaatattatcatcagaacaaaataagtgaaagtgtggatacctaatagaaatgatctgtcaagaatactgatacatgaaaatgtaataaattgacataatcaccacagaataggcatatcattcatatcatcaggcctaaaagctctctaaagcgacacaagaagcaatataaagaaaactaatcctatcttttttacaatctacaatatcaaagaataacatgttacaagtcactgagacaggagttgaaatttacgagcatataatatctaatatagatgttatatatcagaaggtgtctacctatacacagaaattggttaagaaagaaaataatgtgttcaaataaacaaaaaatgcttttgtggtatatcaggatgcatacctgaggtagtaaggtaggaaaagtactaagaagctttctcttgttcgtattcaaaaagtcaagggctgcttctgcaacaacaggatctgcaaactcactgtaataaaacaattcaaaagaaaccgatgtgtgatgatcatcatatcaaaattttcaaaatgcaattcagatggggaaaaagtcccctcaagaaagaaaagtagaggaactttataacggaaaaattcccattccagagacatagtaagaatcacaagtaaagtttcaatatttgtctcaaacagacaacctgtcaaagaaagtaacagaactgaaacacaaaatagacccggtactccaaagaaaaaaccgttttatagaaacgggaaataccattacggcataaccgagttatttatcaatctaacaactttatgaatgtattacaagggtataaagctaaaaagtaccggctcaagcatgttcgcaagaatgtccttaaactgggatcagcatcatgtagaaccacatccccaaaatcaaggtaaaattgaaggatcgccttcaagtcgagagtcaaaaacatataagccttgagaaaaatatagaaggcactcaacgaataacattttgtaagaattctattaattgaccggtaattatgttcctttcagcaattagaagaagaaagaaaaaaatctatattactttgcaaagccattcaaaattgaaaatgaaataagatgccaaatttagctaacacatgtttagactaaacgcttccttaaaattgttagcaaatagcttaattcaaaactctacacataaatatataaaggaagtatctcttcagaacttgaagtgagctattgtaagaccaaatcaaatctcagtgcagctaataaattggtgaaaatttaatccgaaccagtaagagaaggccattggatgttcgagactgtgacagtgaagcaactgagcgttgaaaaagcttgttaatatgaggataaactcttacaacaagatcctctgcattctcagctttacataattcatgaagcttcttaacctaattattcaaaaagcaaacacaagacagtgagtgagagagagagagagagagagaccacaccacgcagtacctaacccgaattaagactcatttttcaaagttttcatttcgtataagctttaagaaaatgattaatcagagacactcacggaatgcacaagagaagaatcagaagcgggatcactggcagtattggagtctctggcactattcgataaacttctgagataaaaatcccagtcgcggcttcgctcatccatttacccaaacaaaaacagaaacaatatccaattttcaatttattcgaagctaaaacatcaaattgatatcgtctttctttggctctggagtcggagctggaaaattcgatctctgaactcgactcccgccaaatacaagggagataataaagaggcttcacttttgaaagaatttttcccaaatcttcttccacagagattgctcaaggttcacctcaaagaaatgaggattgggattaaattttcatgacaaaaataactttgtcaattaatgtgatcaacatctttgaaccctcttcctcaaatttcgcttgccagagattcaacgaaattctgggatggtatatatgctgtagtaaatagtaattcttacgggtgttcaaccaaatttataaactgct

SEQ ID NO: 14317 - DNA, 7064 bp, Cannabis sativa
agaatctaacaaacccatacactcctgaaccacatgaataaacaaagatgacatgtgaatgacactatgtacgacttaaataactactaagcaatttgtgtcaagctgaacatcaagtcaccttttccttttgattcaacctaagacctctttgatttcaacaacctccaaaaaagaagcctcagcccgccaaactcattgaaaagccttccaaaaaagtgttggaactatcacgagctactgctctcacactgaacttcccttctaacttgaaaagtattttgtcgacattaaccattatcttattcacatacggtttagtccaatgctcaaatttactatctcacttcatcgcatgagacaacgatcccgtactatttgataaaatgcatatatattttttaaatagaatataaatttaatttattatgttttaaaatatattagtattatttaaattatattttaaaattattatttttttacgttaaaatattaattatatatattttaaatgtgtagatttaattgaattaattatttttatatattaattaatatcaaattaaatttttaaatacaattcaatttataaaaatacaaacatctctattttgcaaattagattgaatttgcaaattgaattgaatcgtgtaaattaaattaaattgagtatttttatttggtgtaacaacattttcttcatacttggatttggatgtcataaaacgaaaaagcaaaaaacaaaagagagggaaaacaaaaacaacaaaaacaacttcctacgcttcctccatttgatcccgtatgtatctacctatgtatccctctcattctcaaaggttagattagttagttgagtgaccatcttcaatcttccttccccttaattcatttttttttcagcttcagatctacttctccttcactctccttaatgggttttcttttttctgtttaccctatcaattttttttttttgaatttttgaagtcgtagctttacaaattactcatttccaggtgaccccataacgggttgttccccaattatcaaaatctcctaacagttgctttgagtcgccattatctctataggtagtggtaatgatgtaatctagggtttgtagcactacccagatgacaatttagcctctaattgtttgtttgtatacagataagcctagatttttcttttttcatactatataatgcagagttcgtcaagctccgcggctcaacctgaagccatagtgcaatggcttcagaaggaaatgggttatagaccgttgggtccatacactgcttcttctagcaaatccgggttgccttccattgacgcactacgcaagatttgccgtggtaatatgatacccatttggaattttttgattacccgggtgaagtcggagaagactgtggagaatatccggagaaatataacagttcacggtggtggtggtagtggcagtagtgatgggggaggaggaggaggagggacggtgagttcagtaaaagaagagggaaggagtagaggaagtaggaggaaggagaaagtatcagtggagggttccagtgtggcggagactagggaagcggcgttgcaggagagggaaatggtggcaaaggaggtggagagattgaggaatattttgaggagacagagaaaagatttgaaggctaggatgttggaggtttctagagaagaggctgagaggaagaggatgcttgatgagcgtgctaattacaggtaaatgaacaaacttgttactgtttattaagagaaaagtagataaaacatagttttggatatttgagaatggaaaattgaaccttaagacttgattttaaagatgtttaatagctcaggatgatgaactagtttagtttaggtggatgtttcccactctttgatgttttatactctaatcaatgaatggtcattgtttaatagctttaacatggcatattcttttatgggcattggtttttaggcttcatgttttaattcaactgcaggcataagcaggtaatgctggaggcttatgatcaacagtgtgatgaagctgcgaagatatttgcagagtatcataaaagactgcgtttctatgttaatcaagcaagggatgctcaaagatcaagtggtgactcttcttctgaattgtctaatagctttaatggaagtgttgagaaggaatctgtctattcaaccttaaagggaagtaaaacggcagatgatgttattcttattgagaccacaagggaaaggaacattaggaaggcatgtgaatctcttgctgagtatatgattgagaagattcgaagttcgtttcctgcttatgaaggaactggtgttcattcaaatcctcagtcagaagcagccaaattgggtttcgagtttgatggtgcattgcctgatgatgttagaactgtgattgtaaattgcctcaagtgtcctcctcagttgcttcaggcaatcactgcgcatacgttacgattgaaatctgtaatttctaaagaaatagagaaaattgatgttagagctgatgcagaaaccttaaggtaaattcttccctttacttaattggagacggttatcactttcggatactctcctttttagctgttttcaatcttaacaccaagcatatactattagttgtgatcagtctaatcaaagaatccttaaataacatttgtggatgtaaagcttatttggttttggagccatgttgttcatgtcttctacactatgccgtggtcctctttagaattctatctgctgtattatgtttatgtgggtagcaacaaagcaggtgggaaaaagaaagtgtagggagctttccagttttgcaatttactaacataatgatttttcatctatactcacgatgtcatataaactgatccatttgtattctatttggctcatattaagacttcatttctgggggctaaacttgcagtttcttgttgttaatctatttcactcaattttggttagagcacacagtgctgatttgcttgtgaaagaacctcttaatgtaaaattatatttgattttttgttaagacttaactaacaaatttttattgccattaggtacaagtatgagaataaccgagttattgatgtttcttctcccgatgtgagctccccattacactatcaactttatggtaatggaaagataggaggtgatgttccttctaaaggaactcagaaccaactccttgaaagacaggttatcttaaactctagttagcggctttttctcacatatatgtgtttatgttttcatttttaaaagttttattatggaacttttgatccacttttcatatttgtatattggactcggaatcatttgcattttgttaggtgttgaggcctgtcatttgaaaccaggaaaaaataaaagagaatagtaaaactgtttttgttgtttttacttttgaaatttaatactatatcctgacctggttttagtgcgcacatagtactgtttaagcgatgatttattggatttttccttcagttgctttattttgtctgtcaattttttaatattatgtacaccatctttgtaggatatactgtttgatacttggtttttgttgtccacacagaaagcacatgttcaacaatttttggctactgaagacgcactaaataaagctgcagaagctaggaacctatctcaaaaacttattactcgtttgcatggcagtggtgatacagttccttcacactctcttggagttagtggcacatcacaaaatgcaggcggtcttaggcaatttgaggtaaatccaaattctaaatggccaattgttattcactaattagttgcggggaagagtatgcaactaatgaactttgcttgatttatctttgttcatatgtgtaaccgaatgaaataataggcaaatgaatctgtgtattcccattagaggttctatctagtcaaaatcaagattacgcttttctgatcttgttattttcacctttaactatgccagatcattgttttgtttttagcggcaaagtcagtttagcatcattgctatataggtgctttagtctccatgtaagatgagtaagttagatgaggtctttatgggtgagtggtgccttttggattaattaagcgtcgaattatctaagccaaaatctcgaattggctgatgctagtcattaatgaggccaggtggtgaaatctggagggacctttgtatatgtgcaatataatcaagaaaaagtcctttgctctctaatttagccataagaagttagggtggagttctttgctctctttatcgtttctagttggttatttttatttttgatattgaggaagtcttagcaattgagttcaagaacaatgaagtatcagcttgagatgctgctgggtcaggtcaagacattcatgttcttccccagtccatttgttcattaaaatttcaacaaaagttaaaaggtgttaaataatctcagaagatttttgatgtaaaatttgtttggttgcgtcattttttgaatgtcaattagtgcaggtttcattttttttttgcatgttaattagtatactgaccttcattccaaggaagctcatctgataatgtactggggtagtactgattgtaatgttgatgtcaaataaactcatcttgtgacacaattcccttattcatgcagttggaggtctgggccaaggagagagaggttgctggtttgagggctagcttgaatacattgatggctgaaatacaacgattgaataaactatgcgcagaaagaaaagaagctgaagattccctgaggaagaaatggaagaaaattgaagaatttgattctcgtagatctgaacttgaattcatatatagtgctcttttaaaagctaacatggtaagtcttgtattttcattgctcctatcaattcaagaataaagatcactgtgtgtagtgtttctttttgggcaagtttggtatctggtctacaatgaatattacaatttttaaaacatgtatagaatcagtttaaatatatttttgatttttgatttattgaaattttagcttatgagttaacattgcacccatgctctctgattttatccaaattaattttaagttttcttcccttataaaagttttatatataattcttaaagtggttttgtttatcatttaggatgctgctgagttctggaatcagcagccaatagctgctcgagagtacgcatcaggcactatcattccagcgtgcacagttgttgtggatatttctaacaacgcaaaagattatatcgagaaagaagtttctgctttttatcgcagtcctgataatagtctttacatgcttccagcaaccccacaggtgtgtataactgcaagcacatgagtaattataatgaggacttgcctatgtggtgaatttcacacaaacacacaaacacaatcatttctctctctctaatatacacacatatatatagttactctttcgttaatatgtaattttccactaagaggctagtataccattcacgtttctcaatggtgattaataattttttcttcctctatttctctctgaaagtttggggtctcttattttcttacttgattttttacaggcacttttggagtccatgggtgcaaatggatccacgggacctgaggctgttgctactgcagaaaaaaatgctgctatattgactgcaaaggcaggtgcaagggatccatcagcaataccgtcgatatgccgcatttctgctgcccttcagtatcctgcaggtgagttattagttagaacattagaaatatgcccaagaattagtgcattgttgtcttggggtaagcttaggtttttgaaagacattgtgccttcgacattgcttttggtgaagaggagattcttctattccatgttttaccttaactagatgttagttttgtttgtggtgaaatacattattgtgttctattcatatgctctcatcgtacttaatatacttgaaactttattgagttttaatgatgatttacagatatgtattgatgataatgtatatttagctcatgatctacaggtatgtcttgatgtcaatttcttcttttttcttgtgtattgaacataacttttgtggatttataggtctggagggttcagatgccggtctagcatcagttttggaatctctagaattctgcctgaaacttcgtggttctgaggcaagtgtgttggaagacttggctaaagcaatcaatttggttcacatacggcaggatcttgttgaaagtggacatgcgttgttgaaccatgcatatcgagctcaacaagaatatgaaaggtaggattgcaatgagtgttcatgtatttcagataaaatttactcgtactattcttgaagcttactccttggctaacatcctcttccaaagtttgtcctacacaaattatattacttcttttggttaaattttggctttatatattgagttgggtgttacgtatatgtttcatattccaaaaactgtggttcagtttggcttttactaggtttgtgctatgttgtatatacaattagttgatgggaggagagagtttaggtttacacaatatgactcataagattttgtccaccaactttgattaccaccagaagccttgaatctaacaacaaaattgattgggattatcttttgggattttgttcaagtttgagatcaccgcctttgtcaaaaatggatacacacatttatactaaactttgcatacaacacaaattagcagcatgaattgtttgctaaattgtttttctacatgatgcaggacaacaagttactgcttaaatttggctgctgagcaagagaaaacggttttggataaatggttgtctgagcttaaatctgcagttttgaatgcacaaaagtgctcagaagattgcaaatatgttagaggattggtaagtgacttctgaaactatatactctcttgtttctttatctgtggtttctatgtttttacttagttattaggacatatgttcagttctcatc

SEQ ID NO: 14318 - DNA, 8357 bp, Cannabis sativa
  modified_base (6437)..(6437): a, c, t, g, unknown or other
  modified_base (6802)..(6804): a, c, t, g, unknown or other
  modified_base (8309)..(8309): a, c, t, g, unknown or other
tcatgcgttgctcataagatgaaatctcaagcactattgccatctaccactctaccacgaataaacatcagtatacagatattttgtaatacaaaactattataccaataacagatttcatattcatttaataatataaattatgtatatgttacgtcataaagtaaccatcttaattacatagcatttcctaattagacaagttgacactttaatctgataatcttgtattgcattgcctaatcaggcaagcccttgccatagcctggcacttatataccgcataattgcatcacctaataaggtgagcctgtgccaaaatttggcactaatatatcgcattgcctaataagacgatcccgtacctacgcccagtactcacatgtcaccgtacctacgcttggtactcacatgtcactgtacctacgctcggtactaatatgtcactttacctactctcagtattcatatgtcactgtacctatgctcggcactcatatatcactgctgctcgtccctaataggtacgatgcctggcatatttcatcacctaatcaagtgagcctgtacctactcctggtactcacattcatggtatcctccaattattattgcttaataaatcaatctttttattataaacaatattaaccatatttcaatctcaatatcaatcaattcacaacaatattaattgtactacgatacaacatactatgcaatacaatatacttttcttacctataatccagattcatacatgtcgacatacccaagtggagaaacctccctaatgatcttgcccttatgtcacaacaacggtaaaccaataagtgtttatcccaaaacactgcttaacagttgcaaagaataacctagggtttcctaggaaacctctagtacaaatacactaaaataaaacttatattttggctttaaaacataaaacatatggtagacctcgtcgcaagcttcaaaatggtagatagaatgtccaaaccggacacccaagtgaaaagttacggcaaaaatacgttttccaattttcccaagactgtccaaaacagtaaatcggttgagaaccagttaactgcctccataagaaccggttggctagttgggtaggggcaaaaaatctcgattttcaatttatgcactcactgaaacgctaccaaaacctgtccaaaccactacgaacttcataaggcgcacatataccatacatatgactatacttacataattaaaatcaaaatcgagcccttatttgaaaaacactactaacgttcgaacttaagctacaaaaaagttccgaactcaatttctaacttaaaatctcctcaaattcaataaaaaaaatatcaaaactagtcccatgactactagagaatagttcaataaggtctgaacctccataactattctaattcacgaaactcctacatcaaactaatcatttttatctttaaaaaaaattaaactataccttagtgtttttttctctgaagattttctatcccgctattatcatagcttagattgctatgtttcaggttaaaattgaaaaaaaaaatagataaaagggataagattttcatttgatagaaagaggagggtttcttttcgtatgttcttactgttttaaacataatatatatattttaaatttattaaatctgataattttctaaaataataatattataataatagtattaataatattaataatataataataatagcagttataatatatatggaacccaccccaactatgttaaaattgtaaagcagacttagcagaaacatatatatggaactaaaatattttgtattgtttccaaattgaagagcacggaaatgtaaaacttcagctcaaagaatgccaaatacagctgcaacaacaaccattaaatgttgttttgcaacagacacaacaggaggctaggaccaattatgctgctatctataagaactatctatcctttttgcagcagaaagcaaaattgaattgggcaagagaaggagacgagaattctgcattatttcacaccagcatccgagagtaaaggaggcacaatcaggtgctcttaattgtaaatgcagaagggaaaagagtagaggaaccaagagacatcattgaggcattcatacaatattatattggtctattaggtactagtatgcagggaaggaagccaatacaacagtgcatactcaaagaaaggaacctattaacaaaaatacaagcagatttcctaatgacagattacactagagaggaggtaaaggaagctatttttgctattcctggtatcaaagctccagggccagatggatttggtagttctttttttcaggaaaattggaaggttattagtgaagaggtagctgatgctattatagtttatgctaattatgtttgcgagataataatcttactcattactacttagttaatcaataatatataataaatcctaattattcataattaagtctccaagatattacaccaggcctttttttggcacaaccttgccctgtggagcagaaagggcgtccaaccccgaaggcgtggtggccttttacgtctgtatgagctaattggcagtgtttacatttttcaatggaggtaacgaggcaatttcggtatgaggttctcccaccttctccttcccctttgtcctttataggatccggggttccaacgttggtggggtttgctctattttctccatcgagaggatccgcagaatcaacctcctcagagtcttcatccaggtcgccaaatttagccagaggtgaaccatcattttctccattttttgagagaactcttcctgaggtgctaacttttattgagttttaactagctcattggacactcaaagaagattggagtcctgtttgtagtagtatccatctttatagtagttgcctttgatttttacatcatcttcttcctccttttctacatcatcaaggttcttgctcacaaaatgttctttagacttggtgggctcataaactctgttgctagcttcaaatgcttccccatccctcacatggcttggctagacgtacactagagggagttggttaagatcgcccatgataactttaggatctgctcgaggagtttcttctaccgcagttttacgtgtagccaccattgttcaatatgtactgtagctttaagcttccttcaactctcaatgaatgcaccaaaatgtttatcgagattttagaatctaattaagtgagagcttcaagaatttaagtaaagattaagcaaaagatatggaggatttttacatggtttagacgttaattatccatagtccatgagtcaatctattggcctcttaggcacttaaatttattacaaatgagttttatagtaaggaaccctaactcttgctatatcatggtttctctaggtttctcttagagaagaagaaagcttagaattaaaaccaatagagcttttcgctaaagttttgtccatttttcatgaagtggtagtagggtttatataggctagagtttatgttggggcatacgcgtgacccattaaggttttattgtaaaaattagcgactaacgtggtaaaatacacaaatacatgactatgaggcccactaaggatatcaaagtcatggggcgactgtcccacactaataaggggaccgtttggtacaaaacatgtgttgcacggaggctacacctggcagacaaaggcattagaggagccgttagacaaaaggggtgtatgcaatgcgcacaataccatgatctgatacatgggacaatatctaattctatgttagagacatggacacgtcatcttaggggagacattttcttctcatttcacagtaaaccaccaactcccagtccgtggaaggcttccgagtgccctcttgtggtaggcgtccaagagcatctcacacggcctgtctctatgtatgcccttaccttcattaggaggtctttattccttccctatctaggaaggctatggaggctttcaggtctcgggggcgaaaccttgagacttcgttgggcttaggcccattccaagtctagcttagccttttacatgaggcaaggcttaggcctattttggatgatgattactttccgattgcgctatgtgtcttttctaaaaaacacaaataacacttagtgattgagaaatgacccacattaatcatgtgtgatatccaggacacagtggaagactgtgaagaacatcaatcacatatttagagtaaataagatccatattcatcacttgataaaatgttgctacagaaaggaatcaaaagataacatgattgaattaaaggaatcaattgtttttttgcccaatgctgtaattatactcaaacttcatgtatttatattttgtgtttacaaaagcatgttctagattgttattttattaatccatatttaacatacttgatagtaaatgagaccttggtaaaataagttcaaacgataccccctgtgacaaccaccctttgggatgcccatacactattctcttatgccaccaaggatgatggttttgtcccttgagacgactccctcaaagttgtgtgttaaccttgaaaattcacatggtgtaaaatgaatttattgcaaatagagtaattattaataggagatacttctctctatgagggttttcaaatgtcaatcatgtgttttaactcatttaaggtatttccaacggaggctgattggtacgagtaaaattagtgagaccaagttactaggtagaacttgtatgtggatttagatgatcttacatttagaagtggatttggtcataaacatgaaatttgtatatatctttattagctttctaaaacatcttcaattgtccgattacgagttatattgagaatgttatggcaaaaatactaagtcccactacaacaaaattaggatacaggtacaccgtagttaggcatggcaaaaaattgtgcctaaaggatatggttttagggccgacaccctaattgtcatgccaaccatgttttcactttttttttatttgaatacaaaagtgtttcttgcatgagaaggggtctcttgtcactgtcactgttgtgcctatgtttttttctcaatttatcaaaaatgacgttggaagtggcgggaattttcccagtcaacaagttcgacacgataaatgtcgaccccgatgatctatcacgttgtgtatattttttctatttgcacaaaatatgcagaaaattaggcacgtcaatgtcgtgccaactatgcacacctaataaatcctaaaagctttcttcttctccacccatttaaccattttcttcttcaatctcacctagtctctctcaccttctttgcctttagccatcataaactaccccaaaactcgaatatcatcactcctctacataaaaattattctatagacaaaatgaaagcacccatctcaaaaaaaaaaaacctttctagttctacgatgatgggcacgaacgaagctctcgtggctaggactctggtggtgggaaaggtcagatctcttcttcttcttggaagagtgcgagactaaggtatttgttctttttctcattgtaagattattgttttctctgtgctatgggctctattgacatgcttaaattttttcattgctaaagaaatcaatagaatgagagattgagatgggaagcactagcagttctctaattccccagttacagttcaatctcaagctcaacagtaagcaatgttatttatgccgttttgggtctaactcaatactcaaaatccatctgagctcggttcaagctgaaaaccccaaatccaatattgaggcaaaggaataggagcaggaagaattctagactagagttgattttgttgatgatgatgatttgagagagaagtagattgaattgggtagggggagtggcttcaacgttgaagataagtatgatgagatttaaactatttgtgagaattctcgattttaaattttatttcttatttaaattatattttttgttctctgaatttatgtaaagaaattgaaataattatatttttttttcttagaaattattttagatttatttattagttaaaaacatagtattagttttattttcctgtttgtagttcatattttttctcataatttatgcaaggtaattgaagaatcatggtttattcttgattagttattatgattaacaacatgtatccttttaccaaacttcaaaagaaattagaatcacgtggagaaactattagtgttagttccacattgctaatgtgtggaaataaattgtcatatataagatgaatgggctactcctcccattaccaattagttttgagatagaatctcatttatcttatcctaaattctaacatggtancagagccacttgtgatccgttatgagcctaaaaagccgctggttcaaaaatatgagccataaaaagaaccgtttgtgatccgttgtgagcccaaagtgtcgtcaatccaaaaaggcgagccaaacttctcttatctcccctttaacctctatttcagacctttcaactaatgtgtgccagttttagttttggggtccttattgtgtttcaaaatctacaaatttcccaacttatacacccacaaatttcccgatatttggccttgtgggattctttcaaatatcacgttcagccctgtggactattaaaggtcgttcgtcatacccacactttttaggctaaaacgtgaggagggtgtattagannnagtcccacattgctaatgtgtggacataaattgtcatatataagatgaatgggctactcctcctattgccaattacttttgagatagaacctcattcatcttatctcaaattctaacagaaactaagggtgttcatatgtgcaattcgtagttccaaaccccaaccaatctggaccaaaccatttgagacctgacaaaataaatctggtgtgaatgatttgatcaatctggaccgttttaaattctttggttcggtcacacttttagaatttttggtagcatttcaaactaaactaatccgtataactattatatatatactcttaatatatttttgttttccacaaaacattgatatttaagaacaactttatgtagaatattgatattgagtttatattgttatgattataattttttattattaattatgtattataaacttactaaaagtaaaaaaataccgaaaaatgaacaattattgtaaaaaaaaaattaagacaactacgaaatataaaccatggttcgaaccaaaataatttgtttctgagtggtttggtttgatcatttaattggtctggtgtagttttgaatttttgaaaaaacagtaatacttatttaatttaaaaaaattaaaaatccgaaccaaaccaattcgtgaacacccgtaacaaaaactatatccaaatgtcactttttaaaagtttcacaatggaggtcttttatcctgccaagctcttggaaatattgattaaaaacatgtaagtatgttagtgacgagtctttttcattgtaatttgtggttacttctcctctgcttttagtagcttcaatagaattgacttgctatcaaggtctgttatactgccaagctcttgtaaatgttgattaaaaatatgtatgttagtagtgatgtgtctttttcattgtaatttgtgagtacttatcttctacttttagtaatttcaatcgaattgactttgctaatttcatgtatatgtaaatttatatataagcttcttgttactactttcatttatatttatgaaagtcactaattaatcaatctcttgtttattcgtagttcgcttgtgatttaataattgtgtagtatcaaagataacttttttttattaattatttatgggttcattattatcttattaatctctctttagtatattttaccgagataccctaatttgaagttaaaatgctaagtatgcttctgtattttctagttcaccatgctttcatattgtaaaagtttgatgtactctgtttctgagtatctaatatctgccacctttactaatacttgttaggaacttaattgatatagcatgagaatgactccattggaagtcttgtattgtctcgctcacaataactatggatggtaatgatttctttcgtttaatgtctaaaggttagtgttttgttcctaaagagtatgctaagacttaacttataacgtatcacttaacactactacaatgttagcntttagaggcagttttttcaaccccatttataaaaagggaagctaaagg

SEQ ID NO: 14319 - DNA, 3167 bp, Cannabis sativa
aaaaaaaaaaagtcaactttatttgactgtgatgagttatccatatatggagccttgagtggcataattggctcacattaatatgctagctgtattatcacaaaaaataaaacacctcaataatccaaataatttgttcctaactgagataatgactattaaattaaatgatatatattctcttttttttattattatctttttagttaagttttataccaacccataaaaatgatttacaaccactacaatttttatatatttgatgataaagacagctcaagaaaattaatatctgttttattatataaattaattatacaccattaaatctcaaatgtcattatcactaactatattatatagttttataatttgagtgatttgagtctttagttttctttggcttgttaagtatctaaaccatcacttcaaataataaaaattcttttttttatataaaaaataaataaaaaaaagagaggggaccccataacatgtgctgttatcacaaagaaactaaagaaagtcctaatcaaattgtatagaaagtccccacttttttgaacaaacctaacacgttcatttgtagttgtagattcttatgtatacatcttccatgtgctataactttcttcaccttacaaatcaaaccaaaccaaacacaactcatcaaatattaaaagggattgctattagacaccggtagtgttcaatatcactgttacgagttgttaagtatcgattgtgttgacagttttagatcgttttaagcaaatttaagagatatgatactttcagatcatattgtacactgtgttgtattgtataatattgtgttgaactagattatactgtactgttctatatttggtattaactgtaaaattatactaactttaccttaaacccaaccccgaccaggacccaaacccggtttccaaactaaacctggaccatgaaccacaaaccagaccctagacccaactcgaaaacctggatctggaaccaaacccgatcttggaccttaacccgagataatatctacttttttagagagtattaaatgactcaagcaacacatttttggtaatgttaggcaaatttgttcctttagcattaaaagcaagtcaaaaatcatagacatacacttctcatccagctaatatctaatcatcaacttttggttttttttatagccttatcaaaagctctctttccatgtcataatagagtggaaagtggttcaaaatatggggaatcctaagagagtattgagtccttttctttttaacactacaatactcaaaagaacaactcataagaaaaattgggcaaaggaaaatgtctcacaaagaaattataattaagaaagtaaaaaaggaaatattatacatttggagaataatataatgaaagaatatcaaaggagaacaacaacaacacacctttaggggccttttgttcttccttttttggccatattaaggtatcttggtaatgagaaaaacaatgtgttagctcaaaagaatcaacaatagctgtaaatttttacatatttcatctggttttaggacaagaaaacatattgtgtgaagaacaaaactaagcaataaatacagaagaagaaaaatttaagataaaaacagttgcaatattcaatcatcaaatcacttgggagtcaaatgattatcaccggcaatccgttgattgaaatgagtcagcgaatttcgatggaatgctagattgagtttgtgataaggaaatgtcatcaaacattcgggaagtcccttcatcggcttgccatctttgtaaagcttgaggaaggctcatgtttaggttaataccgtcgttttcatcgtcttcttggcaagaaggtttccattgctcgacgagaggacctaagatgttgacagcatgtcccatgtcgggtctttggtatggttcccgagcagtacaatgtcctgctaactcagcaactttgtatatgctctccattgtctcctcatcggggtcgagagtttgatcaatcgcctttggaatgttctccttgttgattaggactcttctgaaccatgtcaccaaatgagacctctcatcaggcactgtgtcatctagagcttttctaccagttatgatttccattaaaacaacaccaaatgcataaacatctactttcgttgtcactctaccggttgctgtagaaaatcaacatgagtaataatatttagtatggtaaataactcttcctatgtcttatcctaataaaatttctagcagtaatgtaaatagatattttaaagagacaatgtgagaatttcttaccagcatactcaggtgcaaggtacccgaaagtcccagccaatctcgtctccaaagagtattttccatcaggggcattcttaaccaaaccgaaatcagcaacctttgctctcatcaaatcatcaagaagaatgtttgatggttttaaatctctatggataaaactttgttgagctaaactgtgaagatattccactcctcgcgccacatccaatgctatagtaaccctttgcttccatgtaagaggagaaatcccatactcttgccaatcaaacaaatgttgagtcaatgttccttgtggcatgtattcatataccaaaagcctctcatggccattgatgcagtatcccaagagtgcaaccaaatgtctatgcctaactttcgtaagaacagcaatctcggcctgaaactcgttcatccctttcgttcccatggcattagactccatccttttcactgcaattttagtcccatcatgcaactctcctttgtaaacaacaccgaaaccgcctctccccaaaatattatcttcactgaaattattcgtcacttgtctaagaacttgcatcgaaatggaaacatttccaccctcaaaaaccggaaaatcattccgatcaccactactctggctctgcaattcactagcaattccattataaccattattacccattacactagccttccccatttctttaccaatctcaggattttccacccttccaaacttcttatgcctattcttaacaaaacatttataggacacaaacaatacaacaagaacaaagataatcacagcaattacaataccagcaatcataccagccgaaacccgattaccattc

SEQ ID NO: 14320 - DNA, 5196 bp, Cannabis sativa
ttttgaaaaaagagttatataaaatatattggttcaaaaaaaaaattttgaacatttttaagtatggaaaattaaatttcccttccaaaatgcaaaatccacatccacaaaacataacaaattaccactttcgggtttgtacggacacactataaatggaaccaaaccgttacccctttgctgtaagttttgtaattatgaaagcctcacgtttttttgtttcttctagatatattcgtttgacagaacacgctactcttttttggccaaagaccatttaatattttattgaaacggtttaattattttcttagtgcagtaaaacaaatcacttcccaaaacccattaacattaacaaaaagccaaaaatactaaacccacgcttctcatgcatttctctctctctctctctaataattaacctattaacattaaacaaaacccaattaataccctcctctttttctctctaaaatgtttcacagtttcccaaacacccaccaccactatccatattccatgtgaagactttgaaacaaaatggcccatttcaatggccactcatcaaatcaagtctacctcgtccttgtcaacgtcaccaatatcatgcatgaaagttcaaacaccacactgcaacctttattttagtcctcaaactatgttcatttctccctctcactcacagacaaaagcttccatctttctctgtatttggccatgacatacctcaacccaacacttcctcaactattgttcttcatatcttcctcgtgggttattttaactgccgcatcactcgccggagacactgatattttgattcgggtcaaaaatgcccaactcgaagacccgaatggagctcttgacgattgggttcccaacaaggaccgtaatccctgcaactggacgggaatcacttgtgaccttaaacctctcgccgtagtttcggttaatctatctgcaacaggaatccgtggtggatttccgtccgggttttgtcgggttcggagtctccggaatctgattctttcgaataacgaaatcaacgggactctgtcttctcaggcactcttgttatgttctcacctccaatacctcgacctcaacaacaacctcctcgtcgggccattaccggaattctcgccggaattcagcagtttacagtatctcgacctgtcggcaaatagcttttccggcaatgtttccgaaagcttggggttcctttcgtctctatcagtgcttcttttgtcgtctaactatctcactggccagattccatggtctttagggaatctcaccgagttaattactttgggtattggttacgttactctgaaccagagttctctgccgccagagatcgggaaattgaccaagctccagactcttttcatgccgtcatgtggactctccgggagcataccagagaccattgggaatctcgttcagctgaaaatctttgatctctctgaaaatcaactgtatggaaaaatcccagaaaccatcgggggaatgaaaaatattgagcaaattgagctttatagcaatagattaaccggcgagttgcctgtaagtttggggagcttgagttatttgagtaatttagatgtatctcagaactctctcacagggaaattaccgaaggaggtcgcagcactgggtttggtatcattaaatcttaacgacaatttcttccaaggggaagttcctgaaagtttagcctctaataaatatcttcagcagttaaagatctttaacaatagtttctccggtaatcttccagaaaatcttggccgcaactctgacttgcaagaaatcgatttctccacgaacaagttcaccggtgagttgcctaagcacctctgttatagtaaaaagctttggagccttgtcgctttcagcaacaaattctcgggaaattttccaactactttaagcgaatgtactactttaacttacctgaggattgaagacaatgagttttccggtgactttcctgcccgagtatggggtcttcccaaactttacttcctcaaactcaatcacaatagatttgagggctctgtttcctcttccatctctggcgccaataatctcaccacactgttgcttaccggcaacaaattttctggccagttaccggcggctatatgtaaactaagtcagctcgtgagtttatcagtggataacaatcagttctccggtgatttacctctctgtattacggagcttagaaagttgcagaaacttgtaatggcggaaaacatgctcaccgggaaaatacccagttcagtacattcgtggaccgagttggttgagctgaatctatctaaaaaccaaatttccggcgaaatcccgccggagataggtattttaccggttctgaactatctcgacctttctgataacctcctcagtggtgagattccaacggagttgaccaagctgagactcaatgagttcagtctttcgaacaataagcttcatggaaaagtcccttcgggtttgactcaaccccaatacattgcgggtctaaccggaaacccggatctctgtagcccgaatttcgcacctttcccaccatgctccagacccaaacccgctaccctatacgtcgtcataatactctccatctgtgccgctctcttaatcgggtcactgctctggtacgttaggaaaaaatctgatctattcggacccaaacccaaaaggctctgcaaactcaccacattccaacggatgggactgaacgaagaggaagtgattgtgccactgactgaagacaagttgattggatcgggtggttcgggtcgggtatacaaagtgaagctaaaaacgggtgaaaccgtggctgtaaagaaactctggaatgtggagaaaaaagaggatacggataaaatatttgaatccgaaatagagactttgggtcggatcaggcatggcaacatcgtaaaattactgtttagttgtagcggtgaggataacagaattttggggtacgagtacatggagaatggaagtttgggtgacgtgttacacgaagagaagtgcgcaagtttattggattggccacaacggctcacgatagcacagggagcggcacaaggcttagcttatcttcatcacgactgcgatccggctattgtacaccgggatgtgaagagtaacaacatattgttggacggggagttcaggccccgtgtggccgatttcggattggcgaagtctcttcagcgccacgtggcgggcgaggaagcctatggtgccatgtcacgtgttgctgggtcctacggctacattgcgcctggtaattttgttttgtcgttttctagatcactcttttttttttttatttctttcatttaaaaatagtataattatcgtcaaaaacggtttatttattttaattttacagtgtggaaagaatcgatatctctgtaataagagtttgttcgttaagattatgctagctaaaaataccataacttaaaagtatatattacaggattaggatatgcaccagtacacattaatttctttattgtttagatgtcaatttcataattactttagtagagtgacacatacaagatttatatctattgctatacaataattaacacaatgaatacacaaggtctatctatgtgggtctacctaaattgaatagtagtacaccacataagttaaaatgaagtgtttggtcaatgtagatctctcaacattttatgaccatataatattacaagtttacatatttaatgataaatatatacatttgtgcagagtatgcttacactttgaaagtgaacgagaagagtgatgtgtatagttttggagttgtgctattggaactaatcacagggaagagacccaacgattcttcttttggtgataacaaggacatagtgaagtgggtaaccgatgtcactttatctttgtcatcatcaccacaagaagatccaacaaaaagaagccatgatgattcaggcagtagtactaatccttggaaatttcttgatcaacttgttgacccaaggatggatttaaccactagtgattatgaggagatagagaaggttttggatgtggctcttatgtgtacctctaggattccccttagtagaccttctatgagaaaggtggtggaattgctcaaactcaaggaccagaaattggctcgctccaaaaccatcaactagttaattacttaattagtacagtttggtgaaagaaataggcaaaacaagttttcctttttaccatgttgtaattattcggattagctagtcattcagtttttgtttgattttagaagaactgcacaaagttcagtcggaaattagacaaactttggtgttttctctttttccattattattactataaattatgttttcagggtaagaatttgaaaaaagctataacaatcatataaattattattttaataaatgttagaatttaagaataagatgaaaggttccatcttaaaatcaattggaaataagaaaagtagtccattcatcttatatatcttaaattatttctacacattaacaatgtggtattaactcttaatacaaaaaaaaaaaaaagaagtaaaaatttctacttataatttgatgaaaatcgtcctttgtttttttttctttttcgtatttcttttacatttgtaaaaagttacggtaccaatggagtgtggatttataaatcatatgtagctataaatgtaagagattattattaatagccctaatcattcaaccaataacataatctttatttttctcaattatacaagttatatctctagcaatatgcatcgccatattatatgcttcagtttgactatcgattagtataacccaggctgatctcatagactggtcacgggctataccaacaaataatgcaaggctagtaaccaaaatggttattaaaatggttggtgtcaaatgtcacagctatgtcatccaaaatttaattcctccgttttttatttcttctattataaagtctccccctccaattaaaaaatttctcaaaattattacaatttaataaaaaaattgattatgggggctactgttaatcaattgatgctttgtgaggagatcaaatgggatgtggatgtggtaaatgatttgtttgaggacagagacaaagatatcattctaagcattccattaagta
